United States Patent Application Publication US 2014/0057251 A1 - sequence listing, part 195

SEQ ID NO: 403652 - DNA, 1013 bp, Cannabis indica
gaaatggtaaaaaagtatggaaaaatgttctcatgaaatataacatctctagatgtgtatatttggtgagattcaatgtcaagtagaagataggctttcatgccggatggataaccaataaaatagaggcacgacacctggtgaaaatttgagccgtttagagtttaaagttgaaaccataggctaaacacctgaagcatctaagatgatcataagtaataagtagggggtttattgtgtaataattcaaaagctgtacagctttttagtaaagcagaaggtgtacggttcattaagtaggtagtcgtggcaattaaatgaggccaatagaccagtgggagatgagattggaattctaaggcacgggcaacatttagaatgtgctggtgtttcctttcaacaacagagttttgttgaggtctctcaacgcatgaatggtattgtattacacctttggatgcataaaaggatgaaaggtttagttctttggcgttatcagaacggacaaccttgatattttgggcaaactgagtggaaatcattgtaaaaaaatctggaatgattttttgtacttcagatttcattttcagcatgtatgtccatgtatatcgggatttatcatcaacaatagttaagaaatgtctataaccttcagtacttattattggaaaaggaccccaaatatccatgttaactaagtcaaatatatgagatgcaaagttgttattggatacaaaagggagtttcttttgttttgcaatatggcatacatgacaatgagtattgtgaacaatggaagaaccaatttttttattgaatatgtttgaaatgtacaaagatggatgaccaaggcgattatgtcattggtctacatttgttttattaaaagctaaactagtagctactatgggactgtcttgatgtatgatgtacaacttcccttggcatttagctgtcctaatcaccacactctgagaaggatcctgtataacacaatttttggtgttaatgaa

SEQ ID NO: 403653 - DNA, 576 bp, Cannabis indica
aagggacgcccagtcagcctcacctcgaatcgcaaccagacgcgctgacacgtgtcacccattcaaacgcaaagacagctctgatgaagtcctgtacagacttggggggcaaatgttctcccaattttcgcactctgacatggcatcacacgatggtgacacgtggaattgacttcgggtatctgctcacaagatacgggccgaatagaacaccttgtatgcttactcaagacaaagtagtaagcaacccgcgcagaacgataaacacttagcgaattcagctttcacatcgtgagtcatcaaggaaatccctataacttgggcatcaaattacaaagatatggcactctgtccaaatcccacgatcagtgtatactgtatttactatgcaatctttcttctcataaatacttccgctccaagctcatagccctataaatagtgatgcatattcactgggcaaagggtcaaaaacattttggttgagagattttgtctaagaattcatattcagagatactgttctaagagctataagaaaagaaacctttctccttgttcttaagttaatacaaa

SEQ ID NO: 403654 - DNA, 1302 bp, Cannabis indica
atgctgatctgaagcgtagagatattgcatttcaggcaggagaacatattttcctacgagtttcaccaatgagatgtatcaggctcataggaaagagcggaaaactaagcccaaggtttatagggccatttgagatactcaagaaggtcaggcaggtagcatattggctagccttaccatcaacgttatcaaatgttcataatgtatttcatatttcaatgctgaagaaatatgtttcagacccgactcatgtcttgagttatgaagccctaaaactacagtctgacttatcctataaggaacagccagttcaaatcctcgataggaaagaaaaagttcttcgaaacaaggccatagctttgttcaaggtactctagaagaacagtaaggtggaagaaaccacctgggaattagagcccgtcatgagggtttaatgtccagagttatttaggttagatttcgaggacaaaatccttttaacatgggataattgtaatgaccgcatgttagattatggattagtaaatgcgattagtattaattatcggtattttataagtatatatatgattttatatttgctgtgggcccatttctagaaatggacattagagttataatttctcaattctagagattttattaaattctaagagtataatttatgctacatatgaattatgcaatttttatgatttttgctcgatgacgatgacggatggacattagtgtaacgccctaatctatagggacgccacgtgtgtgattttataaaactagtttaatactaatagaataattaattattaaaaaccgtgataatattaaaaaaacttgaactaaaacaaaaaactaaaacagaaaattaaaatgcagaaattaaagtgcagaatttaaaatttttaagtctctccccccaaactaaatattacattgtccccaatgtatacagtaatatgcagagagaagaaacttacctgagaccctttcagaaagggttgggtggtggcggctggtcatagggatagaaccgaggaggttgtgccaaatagttcgggtcatcaatcccaatgttcattctgttgataagagagttgagttgctgaacttgtccctcatcatagatactcctctgcaccatgtattgttgcatgtggttgttctgctgaattatataactcagctgtgcatgagtgtattgtgttgtaggatcgataggcccaggcaattgtaggggttgctcctcttcttcttcaacactaggctcgcgttgccgcctacgcccttgcggtgcatcaggtg

SEQ ID NO: 403655 - DNA, 850 bp, Cannabis indica
tacattcccgacagtttaaaactattgcctataagtttaaaattgtcacctataacatggtataggcgactatttttaaaccgtcgggaaacccacattagcgacggttttcaaccgtcgcctattatgcccgttttacgacggtcgtataggcgacagttatagaaaccgacgggaatactttaaacgactatttaaaaacgtcgggaaaacccatttttgtagtagtggattgaaacttttataacaaatattaaactttataatttacatggtcatttacaaacaccgggatgccgtttctaaacttttatacaaaatatgtcaaaatacataaccaggtcacacagcaactataaaacactaaaccccagatgtcgcgagatcgaaaactctaggtcgcaccgccacgacatgtacaacctcatctccgccaggctcactcctgttcagctttcgcctttcctttacctacacatggaagcagaacggtgaatcgacagactcagtaagaaaggtatataacatattataatacttacttgtatctaggcgcccatacacctatttataaggctcaataaatgagtaagaatgttctagctaggatacgaccatgtaccatgtaccacatgcactcagtatggttttctactagtataggtagggtatggaccgcaccttgagtactgttaagtgttgtaccacagacaccgtgtaccttcccgtacaagtgcttgtaacaccacgctgtactttcagacatcatacactttaccaatgcactctgtatcaaaaccatgcaagtgttggtagtgtatgaatcacaacatataagcatgcatataca

SEQ ID NO: 403656 - DNA, 1455 bp, Cannabis indica
ttactgaccaaaaaattaaaaaatcctaacaaaagcatgttaattttttaaatctctccactaataagatttatatttagtgtcttaattattaaattattttgactttacgtactacattgaatctccatttaattaatttgaacacattaatatttaccattaaatttcaacataacatttacattaattttaaatctaaaattttggaacaattaggtgtagtatattaatacttttgttttttaattttttaatcacaaaattaaagtaaaatttttatttttaaaaattttgtttttgaaaaacaaaaatgtgttttgtaatcattttaatttttcaattttaaaaacagaaaacaaaagtgcgttctgtaaagtttatttttatttttatttttttattttatttaagtcgagtctaggtccgaggtcggattcgagttcgagtcagaagtcgggttcagcgctagggttgtggggggatttgggtccgggtctagtcggagtccaatatattaattaagaaaaaaaattgttttaaaaaaaatattgaaagtggtttttttttttcaattttaatttttaattaaaaaaattaaaaagtgaaaacaattttataaaatatgtttttgaaaaatatttcacttttctaattttaaaagcagaaaattaattgaaaaagtgttaccaaacaccaccataataattaatgattattttaataagaaattttatgtataaaacaaatctaaaatgtaccataatatttcttttgtattataattatttttatgactgttggtttatttttttttttatgaaagatttttataaatggattaaattaaacttcattcatgaagaataaaaaacagatatattgctattattattaataaaacatgtgaagaatgatatgatattaatataaaaaaataaaaaattttagaataataaaaatttaattaattaaatgtatgttgacttaaaaaaagaaaagaataaaatcttgataaaattaaataattttttcaaaaggtggtttaatttaattttctaggtcttgttcaagcttgagggatattattatagattttagtgcatatatagttataatattttattatttttatcgtgtacttttttgagtgtttacttaaatatatacgatatattatataatattttattatttgtatattatatattaggggtgataaaatgtattattgagcgttttcgtgtcatgttttattttacttggtttttatacttcgtgtcaaacgtattgattcgttttcagtctgcgtttaattttttcaactctaatccgacccgacccgtaaaagatcgtatcgtatttgtgttaacccactttgaccaattttgttatactaaagctagagttgtgaaaaaaaaatgataaatttagggttccattaaaaaaatttat

SEQ ID NO: 403657 - DNA, 591 bp, Cannabis indica
tatctaatattttaagcctagtagtttttggattggatcagatctattcgtttatatatatttttacttataacaacataaaatttaattactcatctaaactaaataaaaatattaattagttcaattggatgttgaatgtgttggatttttagatactccatccaacatccaatccatgagctcttgtgctcagaggaataaaataagaataagaagagagtgtctaaaagaggaggcagaggttcttcacgtgatatatagctatgctcaggtttcacttaaagaaaagagagttcagtctacaagaagctggcagagatttagctattggactacatccatctatgctacccaaactggcatatcacatttggatcatatccaattggcaatgtatttggcgttgattttgtaaaatgggtttacctttgtaacgcccttacttacgtaaaataagatgccataaataaactgacgttaagatactaatgttgcctttattaaaaaaaataacaattttcaaaacatgggtacccagttaaaaataaagtattactacttagggaaaagtaatagaaaatttaaacg

SEQ ID NO: 403658 - DNA, 676 bp, Cannabis indica
atatgaacacaagtagaagtattcactctttattggctttctgatgttactatagctataaattacttttctaatctgcgaagatttgcagagttatgtgtgtaaagttatgattacgctaaaggttagtcttgaaatttaataagctataagaaaaaaaaaaatattgcatttttttaaatttataaaacaaatgcgtaattttgaaagaggaaaaaaatttagggtttctaaattaatcagaaacgatattttattatgatgtttactaaactattcagaaagaaaaccagaattatattattttgtttacataactaataaaggtaattagaatgctttaatttgacaaaattattattattagaacatataattatttggaaaatttacatccaagcacattaatattgatttatttacataaatattgtgatccaaattaatataaaaatattaacgttttccaaataccgttcacatattaattattttgctttaagtaggggtgttcattggatcacatccaatagatttagacccatccgatccaatccaattatttattggatattggatttttccatctgatccaatctaattgaattgagtcatccgatccgatccgatcctaatggatgtattggattggatcggttccatccattggatgctt

SEQ ID NO: 403659 - DNA, 568 bp, Cannabis indica
aggcagggagatccaatgttgccattgttatttgtgctaggcatggaatactttagtagaataatgaggaaggttgggaagaaaaaagaatttggatttcatgaggtgtgctgaaatggaattgaatcatttaagttttgcggatgatgttctaatgttttgtagaggggacttcaaaagcatttacttaatgatgcaagctctcaaattgttctctataacctcaggtttggtgcctaataatgctaaatcaacagtgtattgtagtggaatgagtgaatatgaggctagaagggtgcttgacatgtcaggttttacaaagcaacaagagcctttaaagtatctaggagtaccgatctgtgctaggaagatctcggctactgattgcagtagcttagtgcagaaaatggcagctagaataggatttggagctcgaggcacttgtcatttgcaggaagattggttttgattaaatcagtcattctctcaatccacgtctcttggtgccaaattatgttccttcctaagcaaataattagagagcttgaagcaatatgtaggagttttc

SEQ ID NO: 403660 - DNA, 1053 bp, Cannabis indica
ttaaagtgtcatcatcaagtagtccttcaattaaaattgaactgaaaaaaacataattttaatacatgtattatatatactatgtcaatagatatactactgactagtataattatttcatatcagactttaaactttgatcaactcatggagttagagagtggagatggattttggttgaagacgcaaaagaaatgcaattcattagttggaagttgaaactcaaaaaaatttcttatccatcgttgaaaatactgcatgcatggttatttaataattttcatgtgcaaaacttgacctttcataacaactctagattacacttcagattagatgataacatatattattatatttatacatgattcatatatatatgtataataaacgtacgatgctctctaaatagcaacatttctactaattgcttttcctgattggagggatggaagattctaaattctcaattgattcaaagccgtgtacatgtgtacatatcatattagagagagagttgaacatctttgccttattttccatatctatattatattataaaatatggattctattagatttttttttccttacagtggaaaataaaataagacaaacaaacaaacggccactcatatgaaaaaaagggtccagcctccaaatgagaaaaatctttgttatgtgactagtgtctagtgggaaggaaatgaaccagaaggtggttcctataaataggcccatccaactgccgtggtagttaattagtcagcccatcagagcaatatattcaaaaatctgaaacgtcaccatttattgcatctaacgattcataaatgtttttttttttgctaaaggcgatttagaaatgttttgcgttatgaatctatatttttttttatttgaaggacgaaagtatattttggttggtgcagtcatcaatgcgctcaatgggaaggagtctcgttgggctcttgagaactatgtctcattttgctctaaatcttctccctcgtttattagttgtaattttattaatgttagtagatcctgtaattt

SEQ ID NO: 403661 - DNA, 547 bp, Cannabis indica
atgtttttttttggataagttattattatatatgtttcactttcttttactaatataaaaaatttgctacacaagatgatcatattttttttattattattattaatttttttttaaaaaggaagctgatcagaattgataaatagtactttaatttatggtaaataaaataaaacaaatgtagtttatattttgatgctttacaatgttgggtagacattaatatataatatagtagcttagtagaagtaaagtattttggttatcataatattaattatttctaaacaaaacaccattaaactcttgataccaagtattaccttaacattatataatatactattatataagaaaccccccaaaaaataaaataatacatatatagaatacatgtattaattaattattgatggttattaaaaaatttaactataaatgttaattttaaaaaaaataattaaattttaattcaataacgaataataaaataaaaatttaacattctaaacttaatttaactacttaacttaaaggaaaatatatc

SEQ ID NO: 403662 - DNA, 593 bp, Cannabis indica
tgtgtgtgtgtgtgtgtgtggggggtgtgcgcgcgtgcgcgtgcgcgtgcgcgtgcgcgtgtgtgtgtgtgtgattttgattcgggtcacatatgtgaaaagacatgaagtaaaggtggtgtgtataatttgattacacaaggttggaccggtatgtaataatattatatacatgaactcatctttgtgttcattgagttctttgattcactcgttaaagtttctcagagaagttgattcttacaacttctgttttgggagttcaataacatgagtggctaggaacatgttacacaataagtaatccaagctttccgaaatgattgaatattagttttcttatagtgttaattctaggagtgttaacgagtggatccaaatctataataagttataaattaacagtttatattgaattaatgctacataaggaatcaagatatagttagaagggtaaaaatagtaattttgaccaactctaattatgtactaataataggagagcgaactacttatattgattatattaatggactactagtaagaatttgttggaaattattttaccagaatattagatctactcacaagta

SEQ ID NO: 403663 - DNA, 545 bp, Cannabis indica
taaaaagattagaattaaaatgcatattttttctattatatataaggtgtacttatattattttaaaactttgacctaattaactagtttacattttatgtttttacaaattttcattttcatactttattttataaaatagctctattttgcaggagctattccattttagatcttatattttaatataatgatttgtacagaatttttattttgtaccttaacatataattttacaagtaaatttttaattataaaaaaaaatattatttttagtttaatttaacttaatactaaattaatctctacttttaatttattctgtaaagttctttttgggtaagttagatgccaaaatattttttatttttagtgagattctttcactacaaaaaatcttattacttttagtcacaaaaaaaattgtgactaattataaattattattcctatgctgtgactaaaaggtccgtggctaaaagtattagtcacaaaagtgacaatttgttgtgattaaatgtatttttagttcacaatacttgttg

SEQ ID NO: 403664 - DNA, 378 bp, Cannabis indica
ggataggatatatcttagagggtcagcttttgacactaaagtcacaagatgtgagagcaaatagtgtcgtagttttgtgacagcaaaaattaaagccaaacacactttctcaattggagggtagttttgttctgcccctactaaagttctacttaggtagtaaagagcaacttcttttccctcctcattattttgcgccagcatggctcccaaggagcggtcgagtgaagtgatatataatatcaatggctttcctaagattggagctctcaacactggtgggtgcaacaggtacttcttaatgctttcaaaagcattttggcatgcctcatcccaaataaatgggacatttttctgcatcaaccgcgaaaagggttg

SEQ ID NO: 403665 - DNA, 648 bp, Cannabis indica
tatacaaataggagatataacacggagacatgacactccaaaaattacttcaaatatttttattttttttccttaatttttttcattttctttaattttttattcaatttaattgataaaccaagtttaaaataggaaaattaccccttatagtattttttaacttttttaaaaaatttattgtttggatttctatggtggtttctatgtgggttactatatgaattttggttgtaatttaggttactccgttagttatgcaaataggggtttctatgtagaattctgtaataaaaaaaaaaaaaaaaaaaaaacaaaaaaaaaaacccttaaaatatactataacaatattttattcacatttattctatttacctaattataacccaatataagccatatatatttatgtatgtactcattctttctctttactcttgtatcatatatagggatgcacacggggcggggaattagcagggagtgttttccccgtccccactccccgttaaggattttaattcccatccccgccccatccctacttattccccatcggccggggacggggcggggaatcccctattgtaaaaataaagtttattttaaaaatttaaatgtataaaattattaaattacataaaagat

SEQ ID NO: 403666 - DNA, 752 bp, Cannabis indica
actatgcttaatgaattaaaaaatattgttatttatttgttatacgataagctaatatggtggttcacaattttgtaagagcctctatattgtatcctgattgtagtttcagtttgaagtttgttccaactgatttgttatcttgtttggtaactgagataattatctaagagcatctccaatggaggtgtaaataagtggtgaaaagctaaaatatagctcatttaacaaaaagtgtgctccaatggtgtgctaaaaagtgatgtaaatttggcacatagcaaatattgtgccaaatttgctatgatgtaaaatttataccacaataaatacactatttttttatttacatttatgtcatttctattattttattagtgtatttaactatcacattaaattatgaaacatttagattatttttttagtcttacatattaaaataataataaaattgattataaagttattagattttattctttttaataaaacattaattagatattaaattttatattaaaattttacaattgtgcattggagtataatgctaaaatttggtgtaaatttatcacaaaattactttttgtgctaaatatagtacaatttttatatctccaattagagatggtctaataaaactgttatttttcatttaaaaaaacgaagtgtgaactggaaaaaaagaatttagtctcatttgtaaagaatgtatgtatgtattttttttttttgtttaaaaaaataat

SEQ ID NO: 403667 - DNA, 1093 bp, Cannabis indica
attaccttcgagttcgggtgacaattgatattaacaaacctctgaagcgtcgtatgaagttgattaaacaggatggaacatggatttggactacctttaagcatgaatatgttcccactttctgttttatatgtgggttcattggtcatggtgatagattttgtcccaggaggtttgatcctcatttcgatccgaatattaaaccttatggagaatggatgaaagccaatacaaagaagaaaaactacctcataggggctcaatggcttcgttccaaccgtaatgatgatgaaggagttgctaatggtagaggacggcatcggaatcaggccgaggctatggacatcaattctcctgtgatggtgcgatctgatggagtaaattcagggatgtgattgggagtcaatcaaggtgctatttctgaagagaatcgtggtggtgatatcggtgataattatggaaagaaagctgatgataagatacatttggaaggtcaaaatgatgactcagtgctgatcgtagataataaaagacgtcgtatgggaaaggaaattttgaatgagtctactgatctagatgatgataacgtgggctttgaagacaagttggatgctaattcaaaaaatggattacaggtgggccttggtgttcaggcccaccagtcattatgagcatattgtcttggaattgccatgggcttgggaacccatgggcttttaaattcattaaggatttagttatccaaaagcagcccaaagtagtgtttctttttgaaactttgtcaaaagctgatacattggaacgagttcaggtatcattgggttttgaaggtgttttttcggttgatgccagggggaaaagtggaggtgttgctatgttatggaggcagagtagtgatgttcagttgctgggttatggggtgaattttattgacatttctattgctggagaaaaatggctttcaatggcggcttactggtatttacggtgagcaaaccataatcttcgacgaaatacctaggacaaaattcgagagcttaaggctaggagttctctgcccttgtgtgtgttgctgacctcgcaaatgtcactt

SEQ ID NO: 403668 - DNA, 593 bp, Cannabis indica
tgtgtaataaatttatactatgaagaaaaataaattaaaaaatataataaaaaataaatttttacataacataatttttatatagatttatgattataataaactagattatagcattctcattattacagtagaattttaaaaatttacagtactttaaaatgtatattttctaaacgctaaactcaacttttttctatgctactttttttttttctcacagtacagttataactgtgtttttctcgtagcacagccgtgccaaactgacctttaaaaaaaaaaagtatagtcttacttattaactaaattaactgttaacggagcactcaaaaatttaaaataatcatcagaccaaattagtaacaaataaaatctgtgtatgggccacactatttgtgtcacgcgaaatggtcccacttttatcttcataatattgtgtatagtaatttttatattttttaatatatatttatatatctatttctattatatataaagtgtgcctatataactgaattcttgcgtttatgagaaattcatggataacttttttttaaaataattttctattcaaaaataatatatttttt

SEQ ID NO: 403669 - DNA, 696 bp, Cannabis indica
aaataaaatgccaaaagagaattactaatatttcaatatagcaggcgggtttgaaaagtatatattttatatgatataatcacatttaatgtataagatatttactgtaagtttaaaatttaagtagcgttttttaaaaaatattatatctaaatatgtattattatatattagaagattatgtataatataaatcagacacatttaatcaatatgaaggggacgctgtaaattctggtctaatatataataaaataatacataattgtcttttaattaggatatatctcacttgttttggtatattttaattaacagtgtttgccttcttaaatttctctaaataacttgtattatcctacttgtgtccaatcacgcccaatgagttcttcctcattggtgccagcaaaagtgtgtttgatttataatcttaatgttgttacgaatgaattagtttattagagtgaataattattgaatgtataggattatattgaattgtttaattaaactttaaattttcttactttattagtgcattccaatacagtagagaaaatgtataatgaattaatgcattccaataaatgtagatttatttctcaacttcatttatttaaattgccataaaactaacaatactaaaccatcgcgtaatattatctaaaaatagtatatatattattaaaaaaaata

SEQ ID NO: 403670 - DNA, 799 bp, Cannabis indica
ttatttttgattacaaacgaagcgtgttgagcgtccaaaacttacaatttttcaccaactgtatcttgaaactccaaaattcatgctaaatccaacaaattcttattatttagcatatttttctcttatttcaacccacatgatttacttgaccattaaaacctgaaacaaaaagaaaacaagcgtaaacctgaacaaaaataaataaaaactactaaaacacatactaaaatggactctaaaataaacctaactaattccccaaacttaacctttactaacccttgagtaaataccaagttaaattattgaaaaagaaaataaataacaaacacacaagtaagccaccattgttatctatactacattgtctttcccgtaaaatctcaattacaatttttaaccaaatttataactcaaccgtctcaaagttcaaccttaaagttcaataaggaaaataaataatatgtctcactgttgtcgagtgaatttcgcaacaccaaattatattgttttattaatatcaaggagaattttatgtgtaaagacaagtgcgagtattcaacctagaatggcgagtactcaactgggaatgggaaaacaatcaacgaaagctggaaaataacaataagacagagaattatagtggttcagtcagattatgatctgcttagtccactgtagcaagggattcgtaggtgccatttcatggtggatcacctctttatatacaaagcaggtgtccaatcggttacacaaggattacattcattgttaatccattatttacatattgaat

SEQ ID NO: 403671 - DNA, 599 bp, Cannabis indica
acttcctctagttcttctacaagcccaacatttgtgtttatttccccaagttggggatccatatctttgtctccaccttagacgaattcctattgggcgatgtttttccccttccctaaactctggccgaaagtatcttctttcttggccatagatatagcaaggttgtagcattcctgtgcagttctttaatttcattttagacatcctactccactctttattcgaaacttaatgtacaagtgaaagactgacgttatagcttttaaatcaataaggctcgccggcctaacatgacatttaaggtgtcatctattttttacaattaattaccaatatagactacttatgtgtacacttttgtacatgtgtcaaatttatattggtacacctaatattataatttaaaaaatataaaaattattttaaaatttataataatttttattttttaagagtattttatatcataaatacctaactctaacttctagttgcaaataaatatctaagtttaattttagcagtaacaatacttaatttatatttatgtaactctgtcggtacctaactattaaatattaagtcattatccacgt

SEQ ID NO: 403672 - DNA, 1133 bp, Cannabis indica
tatgttgaattaagcatgttttaaaggctgattttttgattgagcaagctttgagttttagagctcaaccttggccctttaagggtgattttttgattttgagcatgggtagtggttttattgcttggattatgtctattggggtacaatatgcaggtctagaaggtttggtaaagtttggaattgatttggttaggctttggaatgttttgggtttcttattgtaaatcggctaacctgttttacaggacctgtaaaaccggttacccggatttgctactgggttccttgaaaaatttgtgttgtcagttcgtgctagtttcagagttttggttggttaattccctactagtttagggtatttccatgttaagtttcagtagataggtttttagtttaaaacctatgtcctcggttgtgatttagcgtgtcacttatccatgttgttatcgatgtgatttaggagcctataatccgccgagcagttgttccacacaggttggccggtgcacctaaaattggaattaaggtaggattagtataatgatattcatacgtgtgtacatgtttagcgtacatgttagttgccgtcagaataacatatcagggcatcagtgaggtgtacatagagttgcatcgagataccaacagatatatgttaggaaaatctatagccatcagattagcataccagggcatcggtgacgtgtacatagagttgcaccgagatgccaacacttgtatgctaggctatcagatagtatgagttatctgctaccacatcagtacgactaaagtacttagtataggctagatttgcagttagacataccttgtcgtatgaatgttctagactcattactgtgtgggacacagggatagggttataatcgggtgtatgggcgcctagttataacccgagatgttattatgtttgttggaaatattttaccaggatctagatttactaccatgtatgtttcattaatatcctaatatgaaatctaaaacaatgaaatacacacatatgaagtttagtaaaccttacattgggtgcagcggaatataatgactccttccgttcagatctctagcccttgattcctttctgtagcagagcattatcaagatct

SEQ ID NO: 403673 - DNA, 692 bp, Cannabis indica
gttagttaaattatttgttaactagttaattatttatttttgttgttacttattcttatttttataggtacatatatcaattatttattttggtattgttattattctagttttttgtttgttattatttagttgtttaaccaagataaaaattagtatattgtttaaattttatgggtacatatatttttgagttagtgtactaagtttttacaagttattttgtaattacttttaagtttcttttatcttttttttttttttagattattaatgtcttgtttttatttttatttgtcgcaatgtattcatacatatttaatttgcctattaacatggtgttgttataaagttttttgtttgttgttatttcgttgttcaaacatatatgaaggttatgtttctttaagattgtcgacaatatttattgacgtccaataatttgcatatttatttagtgttgttgtgtagttgtacttttattgtctaataaaaggcaatttttttatatacataattttgagttttttgtctaattattttatcattgttagttcactgttcgttcttatttatttgttcaactaagagaaaaaataaatatatataggtgatgtatagttctttttgtaaattttttatcaggatttttttgggtattttttcatgttttttgaggctttcgacaagta

SEQ ID NO: 403674 - DNA, 892 bp, Cannabis indica
gcagtacccttaagattcgaagtcccaatccaatttatcgtacgccttttccaagtcaagtttgatagcatgaacccgcgtttacccttcctccttcgcattgagtggacaatctcacgggctatcattgtattttcagcaatgtgtctacctttgacaaaagaagcttgatttggggatataattcttggaagcaagtctcgaagtcttgaggcgacgatcttggatataatcttgtacgccacattgcatagagcaatcgggcgatagtcattaactaggcatggagagtctttcttaggtaccaaaaccaatgaggtatcatttatgaattgaggcaattccatatgtgtgaagaaatggatcaccatctcaattagatccgtatggactgtatcccagtgatgcaaatagaagcttggtggaagtccatccggccccggggccctttgctttttcccatgtcgcaaagagccagctttatctcatcttgttgcggaatagcattcaggagggagttgtcttgttccgttatagtagaattaaataccccatccctgagcgttgagagatcggtgtccgctttcttgaatatctccttgaatttgtggagaaagcactgcgcgatttggtcatggttccttatccaatcctcttccggagtgagtttgatgtgctgaataataaatttaaattaaagttttatgtccagtaaaaacatacaagtaggtgaaattgagagagaggcttttgttgtgtttggctgtatgggtgatgaatgggttaatcgtaaagattgtttaatttttttggctttaatttattttttgaaatttgaatttagccgtgtaaaaaaatttcaaaaatggtaggatttgttagagagatatgt

SEQ ID NO: 403675 - DNA, 1123 bp, Cannabis indica
atgaaaaccattaaattgttctcagatctaatttttcaaattaggatcataaatccttacttcagcaggacaactccatatacgaagatgattcaaactagactttctcccaatctacaattcaaaaaaagttttggaatttatttcatatataaaaaaaaaatatcaaaatagttacatttgcctaaaaaaaatctttcaaactaatttcatctcatacatatttgattatttagtttgattagttaaccctaaaattatgatttttttttaaaaaaaaaattaggttatattatattattttattgttctttaagatactttgatgttatttctattttatcaatgtttacgttaattgaaacatattttagaaagtaagttgcagtaaagtacaaaaagttaccatatagtttattagtaaaattagtgtaatttatttatttatttggtaaactaacttatatgatatttactatactatttcattttacaaattatgatattgtttaagatacaatttagtttctttgtaaattattttagaaaccctttggaaagtgatttataaaataaacataggtagaataaaatctaatcacttttaaatatgaaataataaaaataaaatattagtaaatttatttttgttgaaaatttaagataccaattgattaaggtattaaataggggtgtgcataaataattcaatctaattataattgattgatctaattacataactgtcaaatatttgtacatctgattgtcatcggatcaaatataattggaaaacacttaacatgtcttagatgttaaggcattacaattaaaaaagtactcctatttttggagagttttggaaaaaaccctagatggtattctgtctatctatcaaaaagtctggattgttagttttattattgtacgtgaactataacactataactcatcatcaaaaaatatactatagctcatgttcttgctaaattactctatgatgttattgtattttagggtctcctgaattgtatttgagtttttggcttgtttttgtggtggttgcattctaatgaaaatctcatttcttaaaaataataataaataataaaataatattttt

SEQ ID NO: 403676 - DNA, 385 bp, Cannabis indica
  modified_base (377)..(377): a, c, t, g, unknown or other
gtgtcgattgcggttcttatccttaaagaatccttagaggctcacttggatggtaccttctggctcgttaggattgtaagcctcgctgatgctaacgggatgaaattgcatgaattcttcccataacgagacggtcacctcgcttacttgttcttgagccaattcgacttttacacttagtttgttcattgcacgctaaggactttcacgattgatacgtgtcgctttctttagtgcgtcgctattcacatttagcaacatatggtttcttgctaatacactaagtgccagtttgtacattgattcctcacctaagaccttacagtcatcgggttacaaatatactctgatacttacgtaattaatgagttattccntaaaaagc

SEQ ID NO: 403677 - DNA, 984 bp, Cannabis indica
acaccaactacgggtccaagtcccaggtaccgggtctgggtccgggtccacgtcccgggtccggatccgagttaggttcgggtcggggtccgggtctgggatcggggtccgggatccggatccgggctcgggttctgatccaggtcagagattggtgttgatcgcaaatcctttgtaaatattgtaatataagctaatacagaccatttattatgtattaataatacaacatacattgtattaaaaaatttggtcgtaatagttaatataatacattatttaatccaaacatagtgttatttattatttaatacaatacgactcttatacggcgtactaaacgactttagagaataataaaaataagagactaatttattatacataacataatagtatgttacatatataataaagcaaaatctgcaaaaattaagagcaaatgtgaaagtatgcatgttagcatattgttttgagagttaatgaaaaaaaataatatcattgtaatatcattctaataacattgtatacataattagaattattatttaaaaaatatatttatgagtgcatgaaaaagattaacgatcaggaaaaagagagtaaaaaaaaaaaataaagagccactaaagaagatgcaaatatattttaggtttagattattattactttgcttatattaaaataaaataataataacatagatagatttataagttgttttagattttttttcttttagattttttcttttagcgaatgtatttttattttaaaagttataaatttttaaatttttattattattaattaatagttttaaaaattatgaataaaaattagataaattaagaaaatagatatatgtgtttataagaattttagaccgccatatcatcgcctgatacttctactttatatatatagatagtttataaaaatttacatttttctattttatcacacgtatttatattaaaactg

SEQ ID NO: 403678 - DNA, 710 bp, Cannabis indica
tacgcaggagagcatttggctgccgacgcaaagctttcgttgatctacgccggtgacgcagggaataggtactgctattctggatctctcattgcctctaaagtcgccggaaagagtgctgttaagctcgcaggtggtcttgctttggtgttagctaatacagaagacagtggcgaagagctcatagctgattctcatcttataccagcgaccatggttggtcagattaatggtgataaaatgaaacagtatataaaatcaagtgatgatcccgcggctactattctgttccgagggactgtaattaggtcatccattgtgagtatttttcaaaaaagtaaatattctcgaatgacgagaaattatgataaatcaaattcaaaaagtcaaattccgttagtaactaaagacttgatctataagaaggtaaaaggaaagtgtttttgaaagtatcataatttatatattattttgaaaaatatcattttttgatttatacccaacaaaaaaaacaaatcatattgcattagatgttcgatatgtttctttagtttgacttttaatttattagaccctatttgtttggtaacatttacaagttataatttaaaattaatcatagtagtacatgaaagaggaaaaatcaagacttttgatgatcttaggtcaggggaaaaatcaacacctttcattcatggagcaggacatgt

SEQ ID NO: 403679 - DNA, 587 bp, Cannabis indica
tcacactatggatagagagtctagaagagatactagtgcaccaaaaagtctctaaagtcattagagatgataagttactagtcgagaagaaactagaagagaaagccaaaatggaggagatggcttgttacatgatcattatgtatctgtccaacaatgttagtttggaacaagctggaggaaatctacaagaagccatcaattactaacaagattaatttgctagaaaggttatatggttttagaatgatttcttctctttctttagatgataacattaacaggtttaatgagattattgtaggattggctaacataaattataaaattgatgaagaaagccagaccatcattttattgagatgcctccaaattgtatatcaagaagtcaaggttgccatcaaatatggtagagatgtaatttttttggaggatgttattgctgcactcaagttaaaggaatttgaattgcaattggagaaggaatccaagaataacgaagtgtacatagcaagaagagatcaccaaagagagtaaattcgaagagtaaacaccacatctcttaatcaagatcgaagtccaaggag

SEQ ID NO: 403680 - DNA, 742 bp, Cannabis indica
gcgaccagtctctgcagcgatctagaaaagaaaacaagctaagtatgagagatcaagttaaggtagggcacagacgaaagggaaaaatcaataacaaagactcactgcggtcatggcagtgctgatatcctgaacctaataatagcgttcgtggaagcgcaagctgcgtatcttttggccgggagttgggtcaaatgggaaaaaaattggctcatcagttcagaggcgaagggatgttcaggtcccaggcgttcttaaaggcctccacgcgcaaagaattttgttgagcctcccgtaagaccttcttcaaggcctccacttcggcattccccctactgtattcgtccatgacataattatgtttggcaattcaaagttgctgcctctccttatcggcaggaacgggagtaagaatgatgtcggggggtacaacgtattcctctgcttcaggaggaatccctgaatctgagttgatggccggggtgtcctttcttctgagcttcttggaagactcagcctctaccatcttgcccttacgcttccggtcgagcggagccacaatctcgccttcctcctcctcctcaacctccccatcctcgtcaatcaagacgattgtgcctaagggggcactgaaagatgacctccccagggtcaccatctgggcaggtgctggagggagaaaaagggtccgggctataagttctgcaagagtcgccaagagatcttccattggcctagctgc

SEQ ID NO: 403681 - DNA, 669 bp, Cannabis indica
cttacttcacaatttgttacataaatattgtgtttattttatttaaattatttattcaaaactttttttttaacaaacccattatttatttgatatgaattgctatgattaacttgttgatagatccaatgatctgattttaattatagtccaattgtcactagatcttataaataatttgtaataggtaaattttatatttcttttatctgtgtaaacctagaaatatgatagggtccatccaaatcaatttgacctgtgtgagcctatatgtttgtttctaggcttaaatgcatataggaagccgatttatttctaaatatttaaatgaactaggtcgctaagtaaaatattactcaaatgatagttttatttaggcccaattagtattggacttattcaatgaataacaattatttaatgaaaggttaaatttctctcatttgggccttgtgtgagagttagagggtcattagtagtgtgtacgacatactggacccaaccctcccttacatgaacaaccccaactgtgaaggtccatttgcctttttttaaataattctattaggctaattaaaattgaattaacaacacaattaattttgaataaatgacattaattttttattagattatttaaaattaatttagaaaatacacttagtttaa

SEQ ID NO: 403682 - DNA, 1105 bp, Cannabis indica
cgaggtcagtctgcctttgttcatagttgcttatagatattgtctctgagtaactctcggattgataatttcatgagttacttatacattctcagttagcataataacatcaagatctacttccttctcacatttgtctacctgaccgactatgtcctcgaaaccttgattgttagtgctcgagcttgcttcatctcgcactggccttttcctttgtaagagattagaaacacgtcctctattcaagtacgtgtgtacattttctctatctgcttgagaaggacgttgaggatgtcttggaggaagtccacttgaccttggttaatttccagggtttctctcattatggcgagggattctctaattcccttgtcaaggctgcctttcctcttcattcatgtgagatgcttctgacatgtcagttcgttcattcccttggttagaaaatccatggaaattttgtggaacatctcgttgatgttcttgattccttacattattaggatttgtttgattatccattgggatatcccttgtatccccaggttgctcttcttgggtgttttggggattcccctggtttgtttccggcctcgtggtcctagagccttgaggtcttcctcgcggtcttcttactataggatcagattggttctgaggaactgtcccttgtgtagccctggctgctgtagcttcccactccaactcagcatttcgtcagtttgattcaaccaaacattgtcaaagttgcctattttcgaactccaccaacggtacgtacctagttaggtcataagcatcctcactcctaagcacgtatctggcagagttattggcactttcgctccttctttctggattttgatcaccattaccatcgtttctccttgaacgtggtgtttcagaggtgttaggtctttgagatcccatgggttccttgttagggtgatgggttatttcctcagattgattattgttgtgttaatctgttgggttttatgtcctaaataaaactcatttcaatataatcagatttacttattagtatagatcagaaataacatttaatgttgcatggttcacatgatttatttcatgattatat

SEQ ID NO: 403683 - DNA, 831 bp, Cannabis indica
tagttatattaatatttatttttctcagagttactcaattttaattgggagtgcctttgtgactattcttaagatccattcatcatgagagcttcattatccaataaaagtagatggttacccaaaatataagtaatcaattacttaagatattataatcacctaaaatataagtatcttgttatccaaaatataagtacctagttacctaaaatattagtgttgggttttatgtgtatttggaagtaactgtgtaattactaggcagggtaattactagggtggtaattacagagtttagtaattacactatatgttaaaatgcaaggtgtgtttggatatgaggtggtaattacatatgaattcctaatatcctgtttggcaaaatagttagtaattacatgggaaaataatatttttttagtagctaatgtttaatatggaaagtttttagtaattacacagcgtaattacattcaattctcatgggggaccatgagaattggagagtgtaattggaacccctcaattacttccaattacacagttacagtgtaattacatggtcaaacaaacatgtcaaattgtggaattacctcaaattacacacaaatccaattacaatgtggctttccaaacacacccagtaaaactccaatttcaatgtaatctttatcctttaaatatcaataatgaaataaaagtatttttcatcattttgtgtgttatttggttcatgttatcatgtttaattgatttataaattcatccaaactcatttcacatttatattcttgtttattgtgtcgtcatcacagtagaaagtaatca

SEQ ID NO: 403684 - DNA, 657 bp, Cannabis indica
ataaagatcttttgatctgatagaagtggaagaatttaaaaaacaatgtatgcagttcaaagatcttttatatcttttgaactctagactatattcaaaactctataggatctccataacacttagcagtggaagacgttattgatctatgtagttcaaacacttttaacttacaactctagactatatactcaatacaccgcagtatctctaaggcacacatatttttattaaacatggatatactataataaatgaactagcaaactaataaaacttattcttgatcatgtatatgttccaatgttccccactatagaaattgataccaatgatgttagtatcacggtaccttatcttagtgggaaaattttaaaattctagcccattatacttggatgacactagtgatagccaactatgtcatgatcatgagaagaactttagaataagactaagaaagtaaatctaatcattcatatggatagaaataacttatcagaattatgagaataaaaggaagtttttgctaggtttattcgaatgacataagtaaaaccatagtccttataaaatgttttacgatatctctaatcattacttaatcttaatgttaaaattaatgttatgttgatgacttagcctagaaggaattta

SEQ ID NO: 403685 - DNA, 603 bp, Cannabis indica
ttttcttagataaactttgccggatggaatgctttccgcagaatccgtcgtgcacctcagataggagtcgtacatcttcttcttgagtaaagcatctgagcaattgcattgagaaccctcttctgtacataattccctctactatgatataccgtgcagctttccctctcattttccgagcttcattctgattatctaggagtttcccagagttgaggtaggctattattggtgtcatccaatttggggaagtatcaatcattttgatttcctccgtgccagtgatgctaggctcttcaaggaactggataggaaccaagttctccttgtcacttacattgctgcttgccaatcgagctaacgcgtctgcagttgtgttttcttcccttggaatttgtctgagaccgtagcttttgaattgtgcgagtagatcatgtattttgctcagatatgctatcatcttttctccccaagcctcatattctccggatacatggtttaccactagctgtgaatcactgcagatttcaatgtgttcgaccttcatctcttgggctagccttagcccagcattagagcttcgtactcagcttcattgttaga

SEQ ID NO: 403686 - DNA, 587 bp, Cannabis indica
ttttttccccaataatatatcaaatactaatatatttattatggatattacatcatcataacacccccaacaaaacccaaaaataaacacacacatacatttaacacacccagtaaaaccatggcatataaaagccagttgactatgtttattgtaatattctattaaaggcgaggtagtgttgtttttaattaattagcattttagcaatgtttagtgcataaacaacggcggtcaatgccactgcagtagccactggaaaagcgttcgattttgcaaacattatcgcaggtgcggttcgtcacgcatactcccctgtggctttggcttcgtgcctcacatgtttttccttccgctactcttggccccatttctagatattcaaatatatttatttattatcaatttaagagtactcaaatcaaatcttttaaaataaaaattatttttaaaaaaatttataaaattaaattaaaagtatgctaaaatagatgctctaaactcacattctatgaagatttccctttcaaaaaaaaaaaaaaactacacattctattaattagctaagtactctttctaaacacact

SEQ ID NO: 403687 - DNA, 1029 bp, Cannabis indica
attgagcaacattgttgattatgctggctcagattaggagttaatgagtgttgagggattgcatcatggatgacttactttgattatttctttgtagctcttgagattgatatctcttattctcattatcaataaagattggtggcaatgctttcaaactggagtattttttttcaagacttcggcaggaccaagttcacattgaacttaggatcggaaccagtataaatctcgtgtgttattgtatttgaaagctatctagattcatttgtgttattttttctcgtttaatgtgtttgctagttttttgttcttgatttgtttgtttggatttaacttttgtgttgtttaagtgtgatcttaaacttggaattacagaggttaattcctatgtatcagagctaaatttcttacaaatcagagctttaattcttcgatcatcaagggaaattcaaatatcacttgcttccgcaccaagaactcatcaagaattcatcaagaactcatcaagaattcatcaaggaattctacaagaacacaaattgaagaaggatgtcgatggctaggttcgaactagagaagtttgatggatcaactgatttcgcactatggcgagagaatttaaagggtatacttgtgcaccaaaaggtggcaaaggtactcggagatgaaaatttgctggctgagaagaagccaaagaaaattgcaaaggtggaggagatggcatactacaccatcatcatgtatctatccaatggagttagaagaaagctaatccaagaaaagatcgcaaaagtattgtggaacaaactagagcagctgtacatggcatcatcaatatcgagcaagattaatattcttgaagattatacggggtaagaatgaactcttctctttccttagatgataatattgataaatattaatgaaataattattggtttaactaacattgatcataagatagacgaaaaaagtcaagcaatcatattgctcagatcattgacaatggcatatcaagaagttaaa

SEQ ID NO: 403688 - DNA, 483 bp, Cannabis indica
tttgtctagttccgccactgaaattagtggtggtaattcatattctctctactcttctcgttgtaaaaaagttttgatatatattaattaaggaaagtttattttggattgttatatatgataattattattacattttaagtatattatatttttctttaacaaaattgatattatttattcttattaagtatagatgtatcactactacaaaaacctcttttagaggcggtttttaagccctttcagcgttgattttggcaaatttcgctaccgacgctgatcagagcgacgctaaagggttttcaaaaatcgacaccatatatacccctatggcgtcggaaattatctaggaaccgacgccataggagtatatatgacgtcggttcctagctataaccgacgccataggtggcgtaggaaccgacgccaaaaatgagcagttttcaatttttttaattttatataatttattttaattat

SEQ ID NO: 403689 - DNA, 505 bp, Cannabis indica
ggaaatgaaataattttcattttcttcctttattcggtcatattttaaagtattagaatatcattccaatggaatggcctttccatcattttggtggaatgactattccactttaaaatggaaggaaagaccattctaatgtaacatgagaaaaaattaatggtttttttttatcaattttcttatgtattttaaattttattacattcctattcctattcccattcacattcctattcctatattttcattcctcttaaccaaacaccacataaaagttctcatccctatgacttttcgagctagaccattaccaaaagtaacttcaccacattgcattggtctaatattgtcaagataatattttttacctgtcatatgcctggaacaaccattgtcaaaataccacatttaagaagtaatagatttaaaacaagaaggactaaccacacatttatttttgacaactaatttttgtttttgagaaacatatttatttctaaaa

SEQ ID NO: 403690 - DNA, 983 bp, Cannabis indica
tacttatactaactataaaatttgttattgaccccttataccctttcatgtaacactcattcaatcaagttaacactttcaagtcaagtatctctaaattaaagatttcagatagtatattgttcacaatgaaaagccaaacctgttacactacatatattcataggctaaaactaaaaccctagaaaaccataaaaggttgaatgaatgggaatgagtggacctggtcgggtgcatcaagaggaggatactgaatgcggcgaagtccagtgagggaagcatagatgatgtgattgtgaggagacacataagcacctttccctgctttgaaatccgaagctttacccagaacttcacctggcgtgaccatgtttgcgtcgtcttcttccattccctttctttctataccaaattactgaaaaaccagcaaacggtggcactgagctttctcaccggaaccagcggcgggacgaagaaccttttcttctcgtttcggttctttcctgctaaccctttaattttttttaaggggaatttttatttatatacacaaatatcataataatttcaagaatagcgatgctcaaactaatttttatataaggaaagttttatatccatacagtaaatgtaaatcggcttatctgtctcaaactttagaaagagtctctcactgtgaggttgttcattcactctgaaataagttatggaatagcaaaattttggaactatacaaaattctttggtggtgcattctctctaatgcgctccctgttagatcaatgattggaaaaagattccacatagaggacactagctgttctttatgtgggatagaggaggaatccatggaacatcttttcctgtcttgtgatgtggcagtacatttttggcgcgcttcaacgtggggcatttaacttatctgtaacaatgggatttgggtatgggattggatcaaatttatatggaatctcactaatagg

SEQ ID NO: 403691 - DNA, 566 bp, Cannabis indica
atatatatatatatatagcacatgttattatatacatgtttcattttgactcagatctctccattaagacggaaagaaattaagaaaagaaaaaaaaacagagaagagaattttcagtaataatgagaaaacatttctatttgagaagctcttacgggctttatatatagttttttaatatctaatgtctatcttattatataattatactatatacacacacgctgtgatcgatcattataatataattagaagtggtggattttttttgtgataactaaaggtagttgataatatcttgctttgtcttaacccgtactctttattttatgactttttaataacatatatatcaacacctattgtactactactatatgatttattcttttttttttttcttttttgtaaagagtatatatgattattaaaagatatatgtctaattattatctatgcattttttcaatttaattaattaatattgtttttatttctacactttatgtatacttttgttaacacacaaaaatactcacgcaattaataataataataataataat

SEQ ID NO: 403692 - DNA, 866 bp, Cannabis indica
atttacaaaataataaaaaaaatcaacatgcagtccatttttaattaatcataactattagacaatctaaactttgacacaagtaaaaacaattcaatcttgtagtgatctgaaacaaaactataagagtaacacctaagcatttcatagcaaataactgacctaattttgcaacctctccaaataatagatttctatttcttagaagataattttattactaactaaaaaaaaaataagttcaacaaaattaaaatatagagatcactaagtcctacaaatcttccaagtaaagataaataaataaataataaagataaaaagagagtggattagtgaaaaaaaaagtaaaaaatatattttagttgtaagaagaaaaatattacacaatatagaaatacaatttcaacccacacacaaaatttaattacactaaaattagaatgtataccaaggccacatgataccaatcctagacttcacacaccaaatccttacccaaaccccaaatcttaccatcaccatcaccatcaccattctcgtaaccccaaaaataaacaaaaatatatacatataaacataaatatatatattattaaaattatatataaatataaaatacatatacattaacctaaatacatatacatatacattcggtctgatttggatgggatatgaatatggttgatttgaggatttgatatacattagagataagtgggtttagatttcgggataatgtttacaatttgagagatgatgaaatataaatttaatctttatatatatcaatatatatacctgaagaaaatttttattggagctttggctggtatgggggagcttggacggaacttccacac

SEQ ID NO: 403693 - DNA, 661 bp, Cannabis indica
gagatgccacagatgcaatcgcatcattcaaacttacctcggttagattttggagaggatcaagggtcaaagaatgggaacaatattcctgatttagtggatgaggggaatattcctaataatggacataaagctactaatgggaagcaaaatattagtggtaccaaagatagtgtttccaagttcagtgccaacgaaagagggaagtctgttgtgtttggagatcatgtgccaggtcaacattctctgtttcttcctggtccattaatgccacgtggtggacaagggggccgtgggccttctctagagacaaaaagaaggagacaaagtgaaggggttgttgggcttgattatgttgatatggatgaggatgatagtgctgatatggttgataatggactctcaaaaaacgagttcgaggtgggctctggtctccaggcccaccgggcattatgaatactttaagctggaattgtcgtgggatgggcaacccacgggcgatacaattcctatatgacactgtggcccaaaagaagcctgattttattttcttatgtgaaactttatgtcgtaaagatgtgttggaacgggtccgaatgaaattgaaatttgatggggtgtttgcggtggatgcttgtggtagaagtggcggggtggcttt

SEQ ID NO: 403694 - DNA, 1073 bp, Cannabis indica
tgtgtttggattatggggtcgactggagagagacttttctctctggtgtatggtttttgtttaccggatttgtagttttgcttcttttgttattgttttcatttattaggattgaccatttactttctctgcttgtaatttattttttaaacttatcctctgtttgttgatttttgtagggaattttacaatcatattagcaaaagttgttgcaataatggttgtgttggattggtctctcactcttggtcttcctcttcatgtggtggagtcaaattgcttagccttggttttggctctcccaaagcgtttttccctttgtaatgaactaggttccttattagatgatattgctagtttgctttccagttttcctggggcatccctaattcatgttcgacgtacagccaagaaggctactcatgaattagctatgcatgcacttagtgtggatggtgaattggcttggtttgaggattttccttcttttctcattaatgtattaaactctgattgttgttaataagagtttaattcaaatatatatatatatatactagatattagtaatatgcaatatatgtttgcttagagttctattaaagttgctatgatctaattattaatttaaataataataataataataaaaaataaatctaatacaatttaattatatttttaaatatgtaaaattttatctagttttaaatttatttataagaaaatatatgtaactaattttattaaataataacataagtaaataagttaagatattttaaacaaaataactaataaattatttataaagtatgattaattaatatttttgaatagtgtgcgtattgtaataaaattagcccttggcccgatgtcgttgtaccccgacccactttctctaacctcaatttctcattcctcacttaaataataattaaaaaaaatactaacaataaaaaaaaatgaaatttactaaacacgtgtcatgaaacacatttttacttttgttgaccgagattttcggcaactaataaaatattataaaattattgagctgtaagaaagtgaga

SEQ ID NO: 403695 - DNA, 731 bp, Cannabis indica
tctatttttagggtatttggcaagctctaaataccccaaaatacctcagtatttgtaaaataactgatcccaatagtcccatcaatatttctaactaaaactgttgtaacatttttgtcctccaatcagatctctagggtcgtcgaacctaaaaatatttttatttcacaaataactcatattacattcacacatgctatataaatctccataaataacaaattatgtttatttactcacttatggcaaaatttaaattttatgttgaaataaataagtgggatcataatcccacttattatctaattaacccataatataaatataagccctaattaattaccattagtcttatcgagatattacattgattgacaacatgggttctaggcccagccctaggtcaacctaggcgttggccctgtttccatggactcaggattgtggtttcctccctgagtttgcttcaatctttaatatttctgatcacggaaaaaattcccggaaccctttttgttaactagatcgaaacagtttatgttgacaatatgtcaacctaggcgctaggcctagccccaagtgtcaacctagatgctgggtcccgcttttgcccctttggaaattccatttagtccttagaaatagttgaatctcaatatttcttgaaaacaaagaagaggctcaaaagaattcttgataaactccattttaaatggcctaggttgacaaaa

SEQ ID NO: 403696 - DNA, 709 bp, Cannabis indica
tttacagatttgaataatgaaggagaaaaagactcaccttaggcctcacgagaatgagttgcttcctcttcgaaggtccaaggaagaagatgaagttgacctcggccctttgcctaatgaagggaaatctgatcgagagaaaaaaaaaaacacccaatgagattcgaagaaaatagaaaagaaagaacaagacttactgagttggagttttcgtcgaatcttgttgggttttcctcaaatcctattgggtttccactgaatggggttgggcttgggcagagatggggttggacttgggcgaagatggggttgggacagaagacgaggagcatggaggaggaggcttaggatcaaaggttgaagataaagtgaaatgaagatttgcttgacttcaattgaggggttagggtaaattaataagatttgtgtcggtggataatagaagctataggtttaagcttcagttttaaaatgaagcaaaaaagattagctagactttcaaaccgacgctaaaaaataaatattttttttaaaaaaatttctattagcatcgggtgttgtattagcgtctaatatacaaccgacgctaattaatacttttttgcgtcagtttagaagtgacgccccaatgttttcttgtactattcacgtcggtcaacgcgatgaacagtagcggtgaccgacgtaaatagtgctttttgtagtagtg

SEQ ID NO: 403697 - DNA, 732 bp, Cannabis indica
gaatatagaggatagttgtaacatttttaaatatttttattttataattttggttaaaattagtagtgattatagggagtttctgtggtgcacaaaaaaaaattatttcggtatttaggaaaaaaaaattagtttagtttttttatgattgtgtacattatagttatttgaggcatcctgcaaaattttgagaaatttaacataatttactatcaaaagcagtgttcaaactgtttttgtcacacacgtataaaataaaagaagaacgcgtgcaacagactgtttgaacattatatcagcgtgttaaattttttcaaatttttcaaaattttacaggatgtctataataattgcaacgtacacaactataacaaaaatttggactaaacaattcttttaaataccaaaatagataaggatgtatcagtacaccatagaattccacaagtatattttagaaaaattctaaaggtgaatcgagacatctctttcgcatctagaataattttctagtcaattttttttaataatcatgtacattcaaatagtctatttcaaactgtttattacacgtgtgcttttttttttttctactaagtgtgaaatatactatttaacaatattttctatactgtaaataattctaaatttttcaaaatttacataatcttaaaatcctacatgatatgacaaaaaaataaactaaaaatttttcttagatattaaaaccaa

SEQ ID NO: 403698 - DNA, 528 bp, Cannabis indica
agagagagagagagggggttccttttttactatatataaatacatatttattcatttatttatcatattatttcatattatttttctttatactcgatgaaaattgagttcttacattcttccctcgttaaaaaaatttggtcctgaatttcaaagtataatttcaagttgaaaatttaataagtgaggatacttcccatacatcttagactctatctcccaagtagcctcatcttttttgtgatttttccataagaccttaactactaaaatctctctattccttaacacttttagttctctcaccaagattttgacaagttattctgcataaatcacattttcctgaagaggaataacctcatactcaatgacatgtgatggttctagagtattcttcctcaacatagacacatacattatgaacatgtcccaattgggtaacctcaaaaggtccaacatacctcggggctagcttacccttcactccaaatcttattacaccacgcataggagtaactttcaaga

SEQ ID NO: 403699 - DNA, 980 bp, Cannabis indica
tgagtaacagggatggacccactactatcaatgtaggggctatagctcccactaacataaatattgcattttaaaaaattaactgtaatttttttaatttgataattatagactaaaataataaaaaattccccacaaaattaaataaatttagtaaaagtgattataatataagtataaatattttttaatgataaataagcccccacaaagtaaaaatcttgagtccgtcactgaagagtaatacccattaagatattatactatgattacgtagtacacacagtttttttttttttttagaaaattttcatattattataaattaactgtcatttacaataatagagaaaataggataaggtatttctcctatccaagaaacatattcatccaactctaaagcgtacttaacaagaccatgggaagtcttattagcttgcctacgagcatgagcaatagtaactccaggaaaagaggataaaagacaacgtgcatcatcaataagatcactaaaacaagataagtttctttgaaaagagttcaaagcaaaagatactcttaaggcgtccgtttccacattatcaattggcaattggtattgtgcagcccagtttaaagggtagataagcgctttacttctatttcatcacttctaaaacaactttgcactagcttagaaaacatagattttatatatatattttattttttctatttcctctttcattattatcaaccgaaaacaaaacccttaagtccaagtgtaagtgaggtcgctataattatttaatcaaataaattatacggtatatattgattgtcttatttctacacacgtatgcgtcatcgtatcttcttctcatatatataaattgaacttaattacttacatccaagtgtatgtgtggtcgctataattttcgaaataaaaaacggttgaaacctcaaacacttgacttgtgaatgggtggggtcaa

SEQ ID NO: 403700 - DNA, 244 bp, Cannabis indica
tgagatatacttcaagcttcaaagtcactcatttacatgttcaaaaagactatgaaaccaactcaaatcataattcttacaactttgttaacctgtacaaaagactctattataaacctatataataataaatctgatagagaggaaatttttctaatcaatctgataataaatttgatccatgacctttctctgtcatctatacatacatatatattattaatttcaattcatatatatatat

SEQ ID NO: 403701 - DNA, 757 bp, Cannabis indica
atttgatccaagcatcaatatggaaatcgttaaagacacatctgaaccgataggagcctccaaggacggcgtaacccccactttgcctttgcatcacacaaaacagccctcaaacccaagcgagcacgaaccgtttccatgtaagcacttctagaacgagtctctgacagaaaaaccaatcccgtatcaaaatctttgacatttgtggcaagagccgagacagtccaagggtttccaagcccttggacattccaaattgggaattcattgtctcggcgaccctgggatgcagagttcgccgcttcagttttttgttccacgggtgaatcactttgctgtgaaacttccctagaaagtatgtcgtatcttgatcctgtgttcatgttcccttttgtttgagtcttgctcccttttggcacaaacttctgtcgcttctctcggactcctttgttctgattagtaaatccagtttcaaagacaattggtacatctatgagtgtccctgttgtaatacccggaattaagaaatggattagcaaaaccctaactagataattatgtataatggaggaattatattattatatagttcaatatatgtgattttatatgaattttaatatattaaagaccccgttggtgagccaggggcattttggtaattatgacccgagaagggtaaaatgatgaaattaatttaattacgtgcttaatagaactatattattatatagtatgcctgtgttgtcttttcagg

SEQ ID NO: 403702 - DNA, 845 bp, Cannabis indica
ctaaaatgaaactaaggttaattcttattgaattaattagttgctaggtgtcacatgattagtcagccacctaactctctatttaacaaaaagactaaaatgccccttaacttacaacttaagtgtttttaagactaggggtaaaattgtcaaaaaccataacccttcacaacctcggtattttattttctccaatatgtttcccactacaaaataaggttctaaacttacccatgtgatcaaactagtcatccatcgcattttccgttgtcgccgagcaaaaattacaaaaataacataattcatatataagccaaataatagccctattaatctccggaatcgagaaattataactctaattcccatttctaacaatggggctcaaaaataattaaattcataaatacttataaaaataacagatattagtgctaatggcctttactaatccaaattactaaagtggtcattacatgactcctgttcagagcatcactccacacttgctcatgatgaacatgaaatttcagaaagcagctatgctaggaattgttttagctgaagagcaaagagttcattttgttctcaacaacttatcccttgagtttaaccaattcattgttaacaattggaactcgtctgacatagacaagctggacgttgaattatgtggttatgaacggacattgtcacttgcatggagatccttctccagtaatgcagataagggtaaaaggaaagctgaagatattgagaataattcctctgacaatcttactacttcgggctcaattgagaagaatagagaaaatgattccccttcctcagattatccttcacaa

SEQ ID NO: 403703 - DNA, 1324 bp, Cannabis indica
gtgttaaaaaatttaaagttcaattagtttaggcgtcaatatccttaatttataagtaattttttttttttttttacttttagttgacttaaaaacataattttttcagtataccgtataataagataatctaaacgttatatataagtcggttttcgtattattaacgacttcaattttcaaagaagtattaagtgcatccgggcccatgaaatatatggataatacattattatatattctttgaattggaaaatctcttctaagtttttgtgtttacattcttgggatcgtgaccaggaaaacaaatttgatgcaccatcccatactccttccattatcagttacctttccccttacctgcctacaatcctgaattatattgtgataataataacgaaagaaataagagaacactaaggtattgcaacagttttatatttaatattttgaccatttggagattccgttttaattataacatatctagttttaatttgataaatggaaattgcgcagaaatctattcaatttttgtgagattgtgacatccttatcaagttatgcattttgttttgcctaattttcctgctatgtacatctgttgaccctcacattactagttatagcccatttttagaaagcaacaatttttgtcatatatagatgtttgtgacatgtaacgatattaatttattgaatgtgtttacattatggccttatatagcaaacattatctgaaatattagattggtaccaagcgattggtggagactcatatcagaaaatatggtgctacaaaatctagtgattctattttacacgcagtgttaatttttcattacgttaaaactaattaaccatgtatgtaataacgtacaaattcttaatgctatcttaattagacttcttaatgaggagccaaaaacattaacattataacatttctaagtactttaaactagaatgttcttcaaaattttgaagagataaagagtaaaggtgcatccagatgatgtaaacttcaatgttcatttttcatcaataatgttggacacgtcacaccagaagtccatatatacgtcacacacacgcgtcccatgtctcattgctcccataacattatagtgaaactattattaggtgtctctctagtgagaacataaaaataaccaagatgcttgtcgattatataaggggcctatcatattatttggctttgcccagttgactataatgattatatgcatggatcaccaccaaacgagtggttatagttaccgcaagtctgaactcgatatgtatgggtgcgtatggtgtcaat

SEQ ID NO: 403704 - DNA, 708 bp, Cannabis indica
gttatgctaccgaaatttcagtagaaatagaataaattttactaaaaaaatataaatattaaaggaaaagtacataacacaaataactagttaattactcgccagttgtaagaaattaggtgacataaaacatttatataaacttttcaattataaatgacaaaccaaacaaatgaatggattcactttaggaaaagtcattccaattctacctacattccaatcaactaaacactaccctagttagttaattacaacttatacaacttaataacatgaaccaaactaaaacaagaattttagtaatatataaattaatatgaattaattgtgagaaacctagttagttacattgtgtaagtagtaactagttataattagttactaaatactgaatttttttggttaggatatttgttatggataaatcatggatgcgtgaggagagagacacactgcgatttcaagtagggttcgatgcatttttagagtttgccttaaagaattctaaaaatcctgaacgtattcattgtccgtgtgtagattgttgtaatggatctaaaggaaatattacaatgattaaggaccatgtgtatttacgaggtttcaatagaagttatactacttagtattggcatgacgaacatttagctgatgatcaatatccattaggaaagcgggggtagatgatatcaagagtaatgattt

SEQ ID NO: 403705 - DNA, 522 bp, Cannabis indica
ttttgatcttttgaagctcctttgtttttggataaattggttgaatccaagtttgtaggattttgtttgagatatttatggaagcttgttgaagaagaaaaaaggctcgtgtagccttgttcaacattcctaccatcgtttcttatgccagcatattgactaccttgctaggcccctctcaagacttacctttcttgtaggattatctgtggaattattcttgcatggtgtcacccttctcttctctagatagcatgtcgatggttcgaccatatgcttcatggaaggaaatccacagcttatggatgccacccccatatgggacctgccagacacacttctgcttggaagatccttgtcatgtttaacagttggctggattgtgccacgtgtaagtaccacatcagatgtgcaaactttgagatatcacatacaatttgtcttgattattatagggtaaataacgatataagtaccaaaagttttaagtttgtaagtgacataatctcaatgtttattttt

SEQ ID NO: 403706 - DNA, 718 bp, Cannabis indica
agcattgaccttctccttcaagctgtccacctcagccgcctaagcgtccttatcttccttcagccgaagaaggacctgccacagagaagtcctctcatcctgaagacgatcaacttcagcagataaggtctcgatggtttcctcaaagagatcagcagccttgaggtccttggtcagcacggtgatcttcttctcagcggaaaatagcttcttgttggcctcacccaactcatggcgaacagctgcagtctccgccctggcctactcagcttccttcttggccaagtccgccttagccctcaaggtgtcggacagagccgcactcttggaagtagcagatttagtccgggaataggtgtaagccaacttcaaatctgcctgcataaagaaaaggtcagcatatgaagctaagtatgaaaagataaaagggaagtgtcaaaaagaaagactaaccctggtaagctccgtcaaaactccacccaccaacacatctagagatgagtcgttagcacaggacagttgctcaccgacctcaggaaccagccagttcatgtggtgagccatcaccttcttgcccttcttgacttcaggcagcacgggcatgggtggagttggtgcctgcacccgttcaggaatcctcctgaccagttccgaccaagatgttggtggcatagactgtagggttttgtgccctatataaaatccatttcaatataat

SEQ ID NO: 403707 - DNA, 711 bp, Cannabis indica
ctgtaatatggttacatttaagaaaaaaatatcattaggatttaaaacccatacaacataggatttaaaaatattaattgaaagaaaaaatttaattttatttattatgatatatattcattgattatatttttacaagtaaaatatgtgaatgatagtgattttaaatatagtggccactacagctgagatacatctattttgattatagtgtgaatacagataagatacaataataacaacaattttaaatatataatatttttttataataaatttatttacaataattttatttttactaagtacaaataatgaagatttagtaatataattactcatattactaaaaaatattatattaaaaatattaaaatttaaaatttgataattttatcattaattatcaataaactaaatatgactgcatgcgagcaaagcgcaaattagtttctaattaattaatattacttgaacgatttacgtattatataaatcccccgtacataaatttaaatattgtgctagaggagtactttttaaaaaatatatatgaattaagcaatttaatcataaattttataattccttaattgcgtgatttattaatatgcaccaaaactatatattttttttatataaaaatagcctttttttttggttgggagataaaatggtgatattttataaaagagatgaataatatgtaat

SEQ ID NO: 403708 - DNA, 848 bp, Cannabis indica
gtcaaagaaagatgcaaaatcacgtttaatccgttggatacttctttttacaaggagttttgatctagaaattcgtagataaaaaagggtctgaaaaatgttgttgcttagatcacttatctaggctagtattgaaactagtaaagtagcctacccctatcaccgaaacttttcctgatgaacaattgatgaatgtttcttctctgccttggtatgctgacattgtgaattatcttgttactggtgaaataccatctcattggtctaaacaagataaaaataaattttattctgaggtgaaaatttttatctgggatgatccatacttgtttaaatattgtcctgatcagattgtacgtagatgtatccgaaattgtgattagactaaaatcatatctttttgtcatgatcatgcctgtggaggccatttcaatagtaaaaagactgttgcaaaaattttacaatgtggtttttattggcccacaatttttcgtgatacatatgcatactgtaaagcctgtgaacgttgtcaaaagttaggaagtctgtctagaagaaacatgatgcctttaaaccctattcttattgttgatgtatttgatgtttggggtatatattttatgggacattttcctaactcgtttgaaaatttgtatattcttgttggagttgattatgtttcaaaatgggtagaagctgtcgcatgtcacacaaacgaccacaaagtggtggttcatttcttgaaagaaaatattttttcccgttttggcacacctcgtactatcattagtgattgaggtacacatttttgtaataagccatttgaacatctcatgaaaaattatggc

SEQ ID NO: 403709 - DNA, 491 bp, Cannabis indica
gattgggcgtgttgtactggtgcccttgattcattggaggctggttctgtctccatgaaaaatttggatgatttctccaatttggattgtaggattgagaaaatgggctatcagatgatttcccataagtttgaagagcgttcacttcttcagaaaatgcctcttggtatataggcaatgatggacatgactgggcactatgacttgtactatagcataaggaacaaatttcattcctatgtataggagtattcatggattgacttaatgacatagcttcaactctcctagttagatttgctaatgatgttttaatatctacgtcatctttgacatcgtaaattccacctctcttaggtgtgttggaagctttcgatctaggatcttggcaattccactgttgagaatttacagaaagattctcaagagactcccaagcctcatcccctctaaattgcaaaaattttccagtgtgcattgattgtaccatt

SEQ ID NO: 403710 - DNA, 607 bp, Cannabis indica
atatatatatttatataaaagtttatgtcaaaatttagtacccagactggcaattcttctctccaagattctgccgaagatgtgtcaatattgttagttcagaatctattattatgtagtaaagattgatcagtaacatgttttgtgttgttgaagtatatatcattgtgtaaaatatactgatttcaaataaaattataaaaaaatctatgtatgcaatcatatcaacttaaggcctaagccctttgccataaagcaatgccaaagaatgaacatcattactaaagtttgtcttaataataataattgctgtaaaaagagtttgtcttaataacaataattactgtaaaaaaagtttgtcttaataattaatattattacatgcaaaattactatatttagagcacccttaacagtttctttactctatctttaaaataaatcaccaaaattttactttattttacaatatatttttacactacaccatacatcatcaaaactttacttttttgttaaaaaaatttattatattatttttcagttttaacaaaaaaaaaaaatataacaatattataaaaatgctttcagttggccaaataaataa

SEQ ID NO: 403711 - DNA, 600 bp, Cannabis indica
tttcctgctaccctctcggaagcggcctaacaatggtatttcaagccggcccttggaaagttcaactcatggaaggccttctcctcagaattccatgcacaattctcctcctctcgccaacttccgttgcatctaggagacttggtcgaagtcaagcaaagaccaggcgagcctctccgagcatacatcaacagattcatgatggaggcgaccaaggtttcacgggtaactgaagataggaaaattgtatgcgatactggggggcattgaagtcctcagtgaactttggaagaacataaggaagaacggcccggtagactcaatgagcgattttctcgaccgtgctgaaggctttatcaagctcgaagaagctattcaacgagcaaaaggtgagaaaaagcttggcaagtcaaaagctccttccactggaacgttcgctcaactcccccattacccaaataattcaagctcacatggaaaatgttccaacaacaacaacaggcaagggaatgggcagaaaggaaaattcactggcaaaaccgaccaagctccccaggagaattaggcaaagtacactgcatttaccatcttgacggagga

SEQ ID NO: 403712 - DNA, 758 bp, Cannabis indica
cacccccaagcggccccgcttctctcgccgctgttagcttgggatcgcgagtcaacgtttgggagttcaaactttgaatagagttttttcggtcaccttcggcgtccatttgacgaatcgtcttgaccgctaaactcagctcgtcgaggagaacaacctacactaaaccatttttttccggttcactacttttccggtgaagtttttgtagctccgcccctttccggtgacatcgtgtaccgttttgacaaacggttgggatgggtgtgatctactcgtcgaggtggtcgtttggatataaactatgcctattttcggcgacgtttccagtacaccgattttttaccgccactgattgttaatgtgcaccgcttaggtgaggcttcggaactctaaattttaaatatagtcatattatatgtcgttggactcagctttgaatgtagaatgcgatgatgataattatttaaccatttgatggtataggtgagagtaatatgtaagattggactaaacaattggagctcgggacttgagagcttaagattatcttttggataaagtttaacgacttgggagaggtagggactcaacttgattattggacttgatttttatatgtgtagtataccattagacatattctaatttttatgatttacaaaattatttgaaaaattgaaaacttaatttgcatatttttctggactgttctggggcactgagtgccaaatgtatttttgtgtgcaaatatttat

SEQ ID NO: 403713 - DNA, 362 bp, Cannabis indica
atgtagtatcagctacttctaaatgttcttttaataaattcaaaacggagtctgtactgataaaattagaggaaagttacagttttacaaatattaggtacttatgccgctaaaaataaacattgggtttataccatttataaattaaaattttgggtacttatactcctatttaccctaattataatagacatctcaccctttttaaaaaaaattctaaatattttatgataccaaaaacaaaatttaaaataatcaaatgcacataaatatataataataataataataatattctaatttttctaaagttgttaaatatttataatatataactacaatatatacaattataaaaaaaa

SEQ ID NO: 403714 - DNA, 875 bp, Cannabis indica
cttggatcagcaagctaataatatatatattcatgtacactttcttggaaagtctcactgcaccatttatatattcatgtacaatatatatatatatatatatatatatatatccgatgcttgtattagttttggctcaagctaacaaaagctaataaaaatttaagtaaagaagttgtgttagtttggagcctgtattgggcatccgagttgcatagagacttttaaaatcttccaatcaaagattatatctatatctattatatataaatggttatggtattgagaaatagtacccaatagtcaaagaaagaagtgagtgtggtcttggaaatggagatagaagcaaccaagtggaggagtttggagagttaaatttattattagcttgctgatccaagtttctgctgttcactaatatcttcccgttatccttaatatgttaaatttaaatatttttcgttggatgtatatgtatatattatataagagttagaagacgaaaaaacgattggtttatcttacttctcgaattatgtaacagaaaagttaaaaaaaaaaatcgttaaacttgctgttacttaaccacaaaaataattaaagaattaaaaatatacatgaatttctcataaataattttattttaaataataaaccattctatttttaatatctttatatattaaaagtgtctatctaacgtcatttcttggtttaacagaatatacttaaaaataaaaagaatattctgttaaatttaacgattaggtttgaatctcccgttaacaaataaatccaataattaaacctaaaacattaaacaatcttttaaatattaataatctctttttaaattaaaaaaatcatcttaacca

SEQ ID NO: 403715 - DNA, 652 bp, Cannabis indica
aatgcacaagtatagccataagcagtaattaaatcctaatatgttacaactaaaatcctatatcgtgaataaaacatactctactacaataaccatagcaaagtggtgttgtaacaccattattgaaaataaaaataaacaaaaaaaaaaaaaaaaacacacaataaaaatgaaggcaatacattctcaaaatgacatcaaccaccaaaaattcatcactgctcattccatctccctttctcgagaataaccccccaaattatgataaggttcagtagaattaagttacctatgtccttgatctacaaagctattgacctagctttgagctctattatcgagtcaagttaacaaacttgactaatcctttcaattggaaattttttactaagatgttttcaaatctcttacaatagttttcactgccaaagactatcagcctcaatctcggattactttagtgtcaatctcactctaaccgagttgtttatgatattagtgccaaactcacctcaacacaataataggaatgtgtttttgtttacatgcaagttaatacaaaatacattttgatacacatcagagcatctctaatggtaaaaatttagagtgcttgctgaggtgaacatattatgtggtaaaatattgagat

SEQ ID NO: 403716 - DNA, 490 bp, Cannabis indica
agcattggtcggtttagtcggttttttccctcataaaaatccaactgtctggtttttcggtctggattggttcaatccaaaaccgaccgaccaatttaataaccgtcctaaaaccgaccaaactaaaccgcggttcggtcggttcaaactgccaaaactgactttttttttttgctgtaaaatatagtccaatttattccataaacccattattcttaaatctaaagctacaaccatatagacactttctttaaaaaaatgctacaaccatacaaattatttgttcaaaaaccaattgtaaacacatggttctacatattataagtgcaaccatataaattaaaatatggagttaaaagtctaaaatctaaaacataaatcaaatataagtccacttcaaatacattattccacaaccaaacatatgaaatacattaaaacaatagatagtgttaattctatttttggcatatttaattgacaaaaatat

SEQ ID NO: 403717 - DNA, 581 bp, Cannabis indica
aaatgacattaaatttattaattaattatataaatttttatgaatgtttattttattttatatttaattaacataaaagagatataataattacttattttattttattttatttaacttttctattataatatataagatttatgtgctcaaccaaacactataatctaattgacagtaatctaattagatattcccatggatataaccaaacacagtaataagtttataggtaattatattctccttcataatatttcccttaatcagattattttgaaccccttataccaaacgcctcctaagaataattattatgtatgaatatattgagattaacatactatttattattaataataatgtacatatcataagtttatatacacaattatggttcacttactaagtttacatttataaaacaaatcatttaaataataattcaaaattagttaccaaatttaaaaaaaaaaacaactaaacttaaataaaattaaacattacgttggctctacacgtaacatccacctagtgtatatatatatatatatatacaagtacaaactagtaagttaact

SEQ ID NO: 403718 - DNA, 1065 bp, Cannabis indica
acgtaaaaacccctgggtttacgagacaaaatcttcaaatatatgaatttacaagaatactacaatagggaatttttaaaaaaaatccataaattaaatgggtcatttaatcattttttatttgtgaagtgctcaatatattataggtctagtgataatgaaataaaaattaaatgtgatgattatataatctgataacagttgattgaaaataagtaatcttttaacatatatatatatatatatatattttttttcaattttttaaattggagaagtattttaatttattttgaaaaccaaagtagtttttgtcgtcttctcaattatgtagtgtggcagaggtaaattggttcaatttttatcaattgtgtcgaaagagttttgttgataaaactcaaattgatgatcgttaagttcgtgcttatattggaagtgatgagtttctaaacaaaggcagatggaagagattagttcttttaaattgttacttaaatgtctttgttggtctttatttgcattggaattttgtaggttgcaaaagtgagaatgaagagtgtagaggtttcttaagaaaagagagattggatgagtgtggcacatcaaatttattatcgagttttattgttactaaaaaagaaaaaatcacttttagtgaccttttattcgcaacaattttttttttttattaaatgtgacttttagtcgtaataaaatttttcttgtgactaaacataatatttaagtaaacgttgttactaatttagttttagtcacaataaattgtaatttttatgactaatacttttagcaacagactttttaatcacaatgtaagaatgataatttataattagtcataattttttggaaaattaccccatataatattttttttaacttttttttaaatttacggttcgagtttttaaagtggttgcaattctagttgcaataggaatttctatacaattttttattgtaatttatgttgcagcgctagttgcaatataagtttctatgtagaattttgtaaaaaaaaaaaagaaaaaaaaataatttaag

SEQ ID NO: 403719 - DNA, 766 bp, Cannabis indica
ccgtcattttaatacattaaattaatgacaataacatactaaaaatttgggtgaagatcattatctagacgtataaaagaaaattgtattaattaaatgttattcaactaataattgcattattttatttagtgaagctcaaaagactataaatatttataaaattatttaataccattacattctacattttattcttaaaagttgaaaaatattaataattcatttatatagaattacttaatgtagcagtctaaatttcattaatgtttcattttaaacccacccccaaattgtatatataataacaaatcctcctctgatcacttcagataccatcgctcacctttattttttttttctctccttagtatctttttctctttctcttccgtatgagtcttatatatgtttattattactttttgtttcctttcttaagtatctatttcactttatatttatatatagtatgagttttatatatgtttatatttatatgttattgttattgttggaatgtaatctttttttatgtttataataattatcaaatatagttgtgattatgtatgcgattcaacttaaagaatgagtttaaaatttgttaaaaaccatcatcttcgttgtcattactgccacatctctcgcggcataaagttatctccagtaaaggtctaatataatctaacaacataatttttttaggttgcatgctgtaaagcccgcttagttaatttggaaattagcagttatttatgttaat

SEQ ID NO: 403720 - DNA, 749 bp, Cannabis indica
ccatatgcaacttttatctcactccttgacagtatttcaaaatgacgatccgaagaccatgaactataatttttagctccaataaattagtttatttattcattgaccaaataatcttgttcattaactctatgattactccactataaatatagaattgaactcttagtaattatagaattatatttactgagttttactgcaatgtccattgatataatcaattctagtgattagcaatccttgtgttggttcataattagttttagtcaaattatcattttatccttctaatcacttctttatcctttaatactgttaattcactagtgaaagcttaatttagatctaatctaaatttgtccacaatttttcagcttcattattaactacacttaaagggaaccaacattcaagtcattcgaatgttagtttctatatcactcataaaatatgcaacaataaaattcaattctatagataaacatattacatataattataagtgtataactatagatctaaagaatacctttgttgattcaaagagaagaattcaaatggcggaagcgtaccttaattcatagatagtgatgatcttaatccatcttgtagagataatctttgtggtgattttgggtaatgatcttccaagaaaacaagacttaggttttctaattttctctcttgatgggggaagatgagaatagaaatttttttttttttcttggggaccactaccaatttat

SEQ ID NO: 403721 - DNA, 717 bp, Cannabis indica
ttcttacgttcttttttcttttctttttttcgtcttttttttttttttaaattttggcatttgattttatttaattgagtcatgaggacaatgcttatagttaagtgtggggagagattaactatcgtgtctatcctaattttttttccttagttgtttaggttagttttttttttagtttatattagtttttttttctttaattttagtccatggattgagtgaaattttgttgacaatgattgctcgtgtttgatgtttgattttattttgatgtcttatgtatggtcttatagaaagtaattttattgatgatgaaattcttgattgtgtggtagttataattctaggaaaatgatagattctcatgatttatgtgtttagctcatgattaattactattcaatggaagaaatgaataggtttaaaatataaaataatcgaaaataatacgttattatgttgtttactaaattgatcagaaaagaaatcagaattattttattttgtttacataactaagaagggtataagatttgactaaattgtcattgttaaaaaagtataattgttgaaattccgtattttaatatttccagtttgattatttaattaaatgattaattaaatgcggaataataaaactggtactgaaaacagttttctgtagttacagaatgcaactctgtaactccagagaaacccagaaaaacaaac

SEQ ID NO: 403722 - DNA, 728 bp, Cannabis indica
gcattaatttggctcaaaatttaaccagtaactaggggtcttcattagatcaaatttaatatttttaggtctatctagatccgatccaatcatatattggatgctagattttaccatccgatccgatccaatcaatttcagtcatccaatcgatccaacatccattggatgtgattggatcggttctattaatttgatgtatttcatatatatatttattggtttaatttgtgtttatccaatattttagacctagtattttttgaattgaatcggatccattcaatattttaggtctagtatatcttggattggactggatccatcaaatccaagaaaaaaagagtaaaattttaatgtgaattaattttcatatatacatatagatttgatgtataacaatataaaatctaattactcatccaaactaaataaaaatacaaattagttcgattggatgtttgatgtattggatttttagataccccatccaccatccaattcgatccaattgtgtatttaaaaataacatccaatctgatccgatcacaattggtcggatatctaatgtttggcggtcagttgtaattggattggtcggttctcattggattagatcgatttatacacactcctaccaataacgatatgataccataaatttattacgctttttaatttatttttatgttatttttattattttattagtatttaattataacaaa

SEQ ID NO: 403723 - DNA, 806 bp, Cannabis indica
attttatgtatatttttgaaaaaatgccatgtacatatgggctagaattctcatggatccaaagtccactaactgtagaatgtggactttgatccaaagttacatacactacaactacgttcgctttacaattgactcaattgtccgacttttcgcttcggaacaagtcctggtaaatttgcatgtgactatatttctcaaaatgtagtagaggactcatacttataaattatttaggcaaaattacaccgtatattatttttttgggataagttgaaaaatattttttttatatctattaattaaaaatactctcatgttatttttttattaaaatatacccattttctaggtggattgcctaatatactcccactctctacttaactttagcatataatttacataatttaaggggtctaatgggacatcatctacaaaagtgggtatatttaaaaaaaatatgaaaaatagaggtaaaaattaaaacaagtaaagtaaattaggtatacaatgtaatttcttcctatttttttgcttattttttatttttatattgccatgcagtataatttttaatactttttatacggtagtatattatattttttaaaagttttgatgttaacgtgggctgttatttttagtgacattttaattatttatttttttatttttttttacttaaaattaataatgataaaaataaatacatatatatatatactaagttgatgttacgtgcaaaatgcacgtataattagttttttttttttaattaagtttaataaagtgatattaagtgc

SEQ ID NO: 403724 - DNA, 705 bp, Cannabis indica
gtcaggtcgctcttgagatcttcaggtcaacaccatttttttcggcgaaaaacttgaagattttggcctaagctctcaatgaaagcaccaaaatgttgactggatttttatccaaccgacacggagtcgtaataaatgagatttaaaccaaaatcacaataataaatgcaattaataacaccggaattcgcagtaaatgtaaataaaagacaccggaatttaaagaggttcggccccagatgtcggtaatagcctactccccttgaattttattaatctgagttgcaaaagtcaagaacaagctcttgattgcaaataatgagaagtgtttattttttttaaatgttttcagatctcagatcctccctcccaggtcatgggtgacccctgatataggggaggggggtcggtgcttcttgcttcaggagacgcgaccaacgcggagctacctcaaccgtctccttgattttcagaggcggttagagtctgatttttaggaaaatatcccgctatttttatgggttgacaactgtctttgagcctttcgcgggatttgaacatttgaaggagccactgatgacgagggtcccttgtgggtgtgacatggtcgtcaaccacctttgaggattaagcccatacttgggggtaacaccctcgggaccctcgtcgaggggggatgacaaccatcatagttaggtgaccccc

SEQ ID NO: 403725 - DNA, 574 bp, Cannabis indica
atgtattttgctcaaatatgctcatcttttctccgtgagcatcgtattatccggatacatggtttaccactagctgtgaatcactgtagatttcaatgtgtttggctttcatctcccgggctagtttttggccagcaattagagcttcatacttggcttcgttattagatgctttaaatctaaaattgactgcagcgtgcaggtgttgccccacaggcgtaacaagggtaattcttacaccagatagctcatctgtagctgacccgtctacgtgtagtttccagggcagcttattttcactattacttggctgaggtgtttgtaccggctcggggttgctttctggtatgctttcttccttgcctgtgcattctaccacaaagtctgctaaggcttggcctttgattgctgttcggggttggaaacgtaatttcgtattggcccaactccaccgcccacttgagtagccatctagaggcatctggctttttgcaatatttggcgttatggttggtcagtgtacacccgaataggatgagctgaaaaataaggccttaaatttcttgttgctaga

SEQ ID NO: 403726 - DNA, 672 bp, Cannabis indica
ttatttgtatattatttttgtgggtattatgatgttgtttgcatgtgtatttttatgttatttttttttgttatttttacgttgtttttataaaaaatcgtaaatatataaaaatatgaaaattttacagaagaacaataatttatgtaattattcttatttttttagtttattttgtggttaatgaaaaattaattatgtatattgttttgctttaaattatgtgatatattttttagcatgttaaaattaaaaagcgatctccctaattttcttcttttaaaataaatatgtcttcatttttttccttcaaattatatataaaaattaaaaaatgtttatctttttttaaaataaaaattttagctctaaagctaggtaaatttttaaataatgtatttttaatacttcacaaataaaagtagaaaagatgaaagagaactctatggaaatttaaagcgaaggatgccagaaaaaatcaaaataaaactttagaatatgatccattgttgtcttagcattccatttttgtttcttaccaaaaaaagtttaaaaaaatccaaaaccttgaaacaaaaagaaaatattattgaattttatccaacttagtgaaatgatatgagaaattcatgggtaacttttttttaaaataattttctattcaaaaataat

SEQ ID NO: 403727 - DNA, 930 bp, Cannabis indica
ggccgcgttggagcttccatctgaagttgccattgtttgagagtttgtgttaataagatgaaatgaaagagaaagggagttagttagtatttgtgagtggtgaatacaatatacattgtgactatgtatttatattggtatgaaaataattgtttttttttatgtaaatagcttcaataggttcttgatcatggaaaattattgtccattctagttgctacataggtaggaaagaaaatgttatgttatagaagcgttcccatggaaaaaatgatcatttttatttattaggtttttttaattaaaaagaattatgaaatatttaaattacaacaaacatttcactatattttccattaaaccattaacaggtaagattatcttcaatgcaatatctaaaatttgacaataaaaaataaatttgtgatatatttagtccactattcatccaacattcttattttttgaagaagcctgatatgcaaggcgttttgggatggtcttttagttcactcgaaatttttgaggtgcgaacaggaaagcccctctgcttgaaacggtcagacacaataacacgacttgaaactcgtacgagatttagcaggtttaggtttgccttaaatgggtttgggtcgtgctcaggtcgacttgtctaacccatttaataaacggatcgcgttcgggttgacacagctgacacaaaactgacccgttaatgatatatttaaagttattttagtactttaacatgtcataaataggttatgaacgtattgaatacttcataaacgtgttattggttgacatgtttaaacaaaatatgcatataaacggattacacgggtcgtgtcgtgtcaatctgtttataaacgtgtcgtgttcggattttattttctgacacagttattaaacgggtcgtgttcaggtcaa

SEQ ID NO: 403728 - DNA, 708 bp, Cannabis indica
ttagtttgataattttttttaaattgggtttgaatttgtatcatggtattttagtgttgatttggcaatggtgatggaagtggtggcaatagtgatggaggtgagtgatagtgaaggaagagagggagtcatcaggataagaaagaataaaataaaataaaaataattttaatttatttcattaattcaataactttaaattatttttagtttgaaataaattttaaaataattttttataatttttaaataataatattatgtatgtcaatatgaatatctcatatgtataagagtgtaaacgtaaataatctatattaatacataagcatagtaaataaatgacactttaaaaaatagttcaataacttaaagaattttattatcaaattttgaatttaaaaaattaaatacaaataaaataataaattttgaagatttaataaaaaaaaatgttacttttattagcaagcaaaggctaaaaaaaaaaaaaaaaaaaaaaaacaaataaacgcatcaacgatatatatatataaaggagaagtatgaggcggtaacatgacactataatatcactctaaatgtatcaatctcttctctccttcattctctcattttttgaatattttattagtgattaaatctacaaattaatattttactattattttaataaattttataaaatatctaacattaactaattat

SEQ ID NO: 403729 - DNA, 713 bp, Cannabis indica
atacaactcaaattcactctataattttataagttcctcggatcttttcaatccgtcgtattcttttctcacctgtgttattccagtgaataggtgtctaatgtttctctcgtaccacacttattaaagtacctaactaatggtacatttaagtatcacttttaaataaacactccatcaggggagattattctaagataatctaaattttatcaaatattctcacaacatgtttctaatattccattgatcttctcaggttactcatattttaggaataaaacactatactatttttgctttaatctccatggttttcaagaactttctttaactcttaacatcatatccaatgatatcaactttgggatttcacaagattaaactattcctttgtatgaactccatatccttgtttattataagatcccatagtacataattcgcaattatttctttctattcttcctatgggatcttttaagttgatgtactaatttaacttattaacaagttaaatattcgtttccgaaagatatcaaattataatatttcttacttccatctactaatatatactcatcttgataccttataaatcttgatctattaatactttccttcctcttaataatttctagaacgactgttgattcttcatcccaatacgaatctttccagcgtacttcgtcctcactcgtacgctttctgag

SEQ ID NO: 403730 - DNA, 1221 bp, Cannabis indica
aaatagagataagtgaccatttttgggatatagcctgtatatgaattgattggttggattctgtatacttgattggatcaaatagatactgtactataaaaaaaaaaaaagaattaactgtactaatacatatatgtatgctggaaaaagaatgtatatcatggaatatggaacttggatttttgcttcactttttcttgtatgccctttgtatttttgtagtgagatgggataaagtttgcagctttgtaaaagattatagatagaagccttgttactcataatcccattctgtttcttgagatttctttagccgtttagctatatttattttctctgcggttcttgaattcaaggaaacccataaatggtaaatacatatatttccaatttgtttattgttttggcatattcaagtaactaaactttattcaaattctggggttttgtgtgaccacttatttgaatattttggtatattttgtgttctgactgaaatgattttggtgatttgcacttgcactttattgaagatgaagatctcaagctctcattagtgtttatatgtttggctgtagtaatttttgtgactctgtacctttagtaattaggtgtgcttagacaaacggttttgttgatagtgaaggattggagtgggtggtgtccaaaataagtgatatatattggtcttagtttaccttgagagctgcagccaaacatggtataaataccgaagcaagcatcacctttctaacagcggttcttggcaacttataggctagctatatttcgcactccaagtgtctccttaattttccatatattttgattcattttgcctttcttttttgcatataaattagtgatgttcttgtttaccactgagaatttgagaggtaggccatggtttgcttgcattttcatgatgtgtgccttgtaatatcaaacatgtttgagtttattattgttacaaagttagcaagttcagtcagactgtagtttctcactcgagtttccatttcgaaattcagaaatttccagaaaattaggtatagaaaaaagttcacttgtgttttagaagtattttgctacctttttattctaggtttctcatctaatcctattaatgtgaggaaccagaaacgatagcgaatgatatgtaggacatgaacctcaattttgtttcaaaatcattgtcaacgagtccataagaagtgatcc

SEQ ID NO: 403731 - DNA, 589 bp, Cannabis indica
attcaattactaattggatttgatcggatgaggaaaaaaatattagattggatcggatgcccacccctacgtgtaagtatgggctcgttggccaatcctcataatttttaatctaaaaaccaaatcataaactttttttctttgatcaaaccaactaaatcataaacttaaaattaaaacaataaatactaataacaaataataataacaataaaaaaaaccattctgcaatcattacttagatgtaaaaagtatttcactgtcatagataaggagagtgagtattagattataaggatcctgggtaaatttttatgcttataactaaaagtataaattaagtaaaaataatagcttatttttctacgataactattttaaaaagatttttttttttttaaattaaaaagtcgtttttaaattgtttagttatcgttaaaataatttttttttgtaataaattaagaagtaagtatgtatcaaaaagaatggaagtaaatacattattctaacttttaaaaataatttcttttcaatattatatttttttattctaaacatataaatttaattttcggttgtaaataaa

SEQ ID NO: 403732 - DNA, 581 bp, Cannabis indica
acacataaacttcattgaaacatcggccttttaaatgaaaggtcattaaagttcatcagccaaagagtatctaaattctataacacactcctttagaaattaaatgtagttagaattatcttaacgatatgaaaatcacaagagccatcataaacccaagcttgtccacagaaaaagaaaaagtaatcgcatacacaaagaaaacaaccactgtaactaaatatcatggtagaaatacaaacaatacattcaactcagctggaagctataaaaatttaaaaataaaatacaaaatctatccactttatacaaatgatcaggtccggccctaaaaatatatgggcccaagacgaataaaattttgggcccttagaatatataaaaaaaaatataatagaagaatgttataggatttgaatccatgaccttggatatcttaccattaacctcaaccaactaagctataaatattagttgtttataatacacctaattttaattaaataaaagcctaataaaattttttttatttttttattttgggcccccggaaagtgtgggccctaggcacgggcctagcc

SEQ ID NO: 403733 - DNA, 687 bp, Cannabis indica
atccaaagtcaagaaacctctatgagaactctaggaaatttagttggacaactagctagtgagcttcgaaataggccacaaggtactttgtctagtgatattgaaaatccaagaagagatggcaaggagcattgcaaggcagtaaccttaaggagtggtaaagatctggagtcaaacgaggaagaagctaaggataaaaatgagcccacttcaatccaaagtcgagtagagaaaaaatgttgaaccttctaatatggcaaaggagcaacctgaagaaaatgctgcagcaattcctcatcaaaatgcagcagaaaagttacttagcaagccacccccaccatttcctcaaagatttaaaaagcagcaagaagatggtcaattccgaagatttcttgatgttctaaagcagctccacatcaacataccattagtggaagctttagagcaaatgcccaactatgtaaagtttttgaaggacattttgacaaagaaaaggaggctaggtgagtttgaaacagtggctttgacggaagggtgtagcgccatgttgaagagcaaaattcctcctaagttgaaagatcccggaagttttacaatcccatgtaccattggcggaagagatgtgggtagagccttatgtgacttgggagctagtattaatttaatgcccatgtctattttcaagaa

SEQ ID NO: 403734 - DNA, 1082 bp, Cannabis indica
atctttagttcatatgtccaaatctttacttgttcatcatttttattattattataatttagtttttggtgtaataaaattccttcaacaacaataaatgaatacttaacttattattaagctaagtcagtaggtcagcttaggaggtcccatatatggaatgtaaagacaaaattattaattaggtattgtggaatcttatgatttttactgaatagtaacggttggacgtaccgagttaatatgttatctatcagtatagataatttatacaataaataaggatatggaattcataagaaggaataatctaatcttgtaaaattctaagattgatatctttggctatgatgttaagaattaaagaaggttattgagaactatggagattaaagcaaaaatagtatgatgttttattcttgaaaggttggtaaccagagaagatcaatagaatattagaaacatgtcatgggtatatttgataaaggttagattatcttagaataatctcttcctttgacaaagtgtttgtctaaaagtgataattaaatgtactattagttaggtacttcaataagtgtggtacaagagaaatattagataattgttactgaggtaaataagctagttagcctataagctaaccttaactcatgtgttgtccgaagtatataatgtgtttcatgtctccatgttgagaaaatatgtatcagactcaacccatattctttattgtgacgatgttaaagttcacacaaatttattataatgaaaaaaaaaaacatcttgtctaggttttggactagaaaaaagaaatactatgaaatgagacaattccactagctaagaaagtgttgtagaaaaaaaaaaacagcaagatagaaatagcaatttgagagatagaatcataaatatgggaataatatccttaattgtttaaataaattttgagtacgaaatttttataaggaggggatgaatgtaatatcccgataagtttaatggtaaataattaggatttatatgtatattatgtgttaatcaggtaataagtgggattatgatcctacttatctatttca

SEQ ID NO: 403735 - DNA, 398 bp, Cannabis indica
aaccggtgctggtggaggattctggtttgctgtagcttcaggaggccgaaacttagcttgagcatgctaatagttggacaagtaattggtagcaaaagatgccaaaagtacagcagacttagccttgttaccatgaaggattcagtttctctctgtccaaatggaccataaaatgcagataatgttttccatttcaagcttggaatgaagggtagacaagtatactaaataatcacccttattcatttgtgcagcagcattccagtcgaaaagaaaccctgtagcccgccagacagcctttgcatatttgcatccaaagagagcatggcctatggattcccatgcttgtcgacatacagaacaggtagaatcagtgatgatattgttggaaattattt

SEQ ID NO: 403736 - DNA, 618 bp, Cannabis indica
tctctcagactacgaccgtttgcttggtcttcaacggcacctccattattaccgttgtcccctccattgttagcagcgttggcattctcagccatgatttcttgtatttcagcagttgctgaaactctttcttgcctcttgtttcttctgtttctcctacaagtcttctcgatttcaggatcaactggcaatatgacaccttgtccttgacgtcgcatgcacccctaatgcctgaaataaaataagacaatctaaaagaaacagattagcaataagcagaaagaattaaccaaagtagaatttaatctaatttttgtaatatcaatttttaaataattccccggcaacggcgccaaaaacttgttacgaaaattatataaaacaatacgcaagtgtacgtaatcaagtagtaaactcacacaggtgaggtcgaaccacagggaattgaactgaataccactaaactagatttatgattctatttggcagataaaaagaattttaataaagtttgaaataaagataatcaagaaaattaaagaaagcagtaaagttgtttaattaaggatgagaaattagggaaaagaatcatgttgatttaattacccaattgttaat

SEQ ID NO: 403737 - DNA, 598 bp, Cannabis indica
ggttatattgttccatgtctttcaattctaagttttttgaccaaggttttgcttttttcaagccctctcaaaaagactcgtccctactcgcgagatggtcaaccaacacaggctcctgctgactcttccccgcggccttaggtcgtgcgacttccttcaaaacgaagccaatctgagatcggtggacctccttactgacccggattatacttgtgattataaatttcccaagtattcctcttggcctgggatcgcgcggctcgggcacaataccttcaaaacactgtccctcgggatgccagtgaaggagcatcccgaggtaatcaatgtggttggtcacccacagtacttagggctgaacgtaacacattagttacattccgagatatctgccttaatttctatatttggaattcccttcttgtagatcgaattgcccataggtttcacagccggtaccttatataacatgtccagattaactgtaatgagtcatattatggtatagtcgagcaatatgacaccatgacagatagggcaagtcatatagacacgagctgagatttagaccaatcgagccctttgatatattcaagat

SEQ ID NO: 403738 - DNA, 673 bp, Cannabis indica
tgtaagatacacccaaaaccttctaaacacttcaattcgattccaaacttcacaaataactccaaaacacctatttaggttacaacaaacataaaccaagcaacaaaaccaacaaaaagatccagaacacaaaatcaaataactcttaagaccacggaaccctaattcataaaaatatgcaatagaacctaacttgaacttagaaaatcaaaggaaggagagctaaggggtttacctgttgggttttgtgccctaaataaaacccatttcaatacaatttattgtaagaaaatgactaagtctgaaaataaagtagcaaataaaggagatatttttttttgattccataagtgttctatcatcttttttctatataagatgatcccactgcctctgttgtcttaacacaaccgaagaggttaataccatttagtagtcttagacaatattcacggtactttgtcgtagtgggagggtttcaaggaactcaccctgttatgacttggaagacaccagtgataaaaatccattgttagtttaaacgagtaatggattgtgagaataagaaactaagaagaaaagccaagagaactatggttaaaactattcatgtggaacaaccaaaagttttcttttacaaggatatgaaaggaaatttcgttaataagtctat

SEQ ID NO: 403739 - DNA, 974 bp, Cannabis indica
tattaaaattgaacatactctcattattaaaaattacaataataaaatacatataaagttttaagaatatttaaattgaacatatcacaatattaaaaataaaaatacaaaaaataaatataaaatttaagaatattaaaattgaacatatcacaatattaaaaataataataaaaaataaatataaagttcaagaatattaaaattgaacatactcccaatattaaaaataataatgttacaaataatatattaatatatatgaaagtcctaattactacaagttctaattgatgattcttaacagagtaattctatgttatgaactgaacttaaaatcaatgaacacagaatttacaagcttcctctgcattggaaacgcattccaaccgagtagtgcttgggttcccttgaaccgggtacagtaactttcactaaacaatcaattcaattacaatttccagttctgattcttcaaatcaaacaatgtaatctaaattgacttttgtacaaagttacctaatgcttgaacaacctcaagctttgagatctaaacacatttagatctcagtacacaagaaacacacagctgaaccaccttcagcaaagtaatctgaactcccttcagatcaagcagattcgaactccatcttcaacctcaggaagatctctggaatttctctctgcaaactacaaaacagaaaacaaaaagaagttgtgccctagcagagcaagaatcaagaaaatgattctaaccgaagagagttagttagaacaacagtcacaacagaatttatatcctaaagataataaaatctgactaactaaccaaccagcaaagtacagctggcacaaactaacaaacacgcagaaagctgacatggcactaaaatgcacttagtgaaatcagatgcaactaactacagaaaagatgtttagacaaacaaatactgatgcagatatactgaacaaaa

SEQ ID NO: 403740 - DNA, 536 bp, Cannabis indica
tttggaagctctcatgcacgttctcgaaagcacctatagttatgttgacgtggagatcttgcttaaaggagagcgggttaagttagctactgcctaactaacttaacaaccttccttcttgcagccaccaactttaggatctcgatcctaagcctataaatactaccaacagttatcctttcaggtagaacgatcaaattgagttttgagatagagagagaaaagattgagaggtagagagagaaaggagagaaaggagagagattggggttggattttgtatgaagaattttctgtagatgaagaagattcttgggtaagagtgtgagagttaacactactgcaaaacaaggctttagcttcccttttttgaacccattttataaaaagggaagctaaagggtctgaaaatacccgcctattgaaaatttacctttagaggcggtttttttataaaaaccgtaggtataaaattggggtatcacatttagaggcggtttggaaataaacgacatagggtttgattaaataaccct

SEQ ID NO: 403741 - DNA, 637 bp, Cannabis indica
ttctctatctcattctctctcaacctctctcattctctatatcattctctctcaatccctctcggtttctctcattttttttttaaaaaaaagaacactgccgacggccaccaccactagaccaccgccgatgactacaaaccaccaccgttggccactactgtggacccaccaacccccaccacctctaatttcttaaaggtatttttaaatttttaatttttaatttttttaaatatttatatatatgtatgtgtgtggcagtatgtatatatgtatgaatatgtgtatgtatgtgtatatatatttatgtatgtataagtgtatatatgtgtatatgtgtatgtatgtgtatgtatatttatgtgtgtataagtgtatatatgtgtatatatgtatgtatttatgtatgtatgtatgtgtatgtgtatatatgtgtgtatgtgtaagtgtatgtgagtgtatgtgagtatatgtatgtatgtatgtatatgtgagtgtatgtatgtatatctgtatgtgtatgtaagtgtatatatatgtgtatatacgtatatatgtatgtgtatatatatgtatgtatgtgtatatatatgtgtatgtgtatgttatattatttataataatataatatata

SEQ ID NO: 403742 - DNA, 736 bp, Cannabis indica
tcttgaagatatttcttttgtgagagcagcagccctgtagcagtgggaagtgcttgaatgcctaagaaataatcaagattaccaaggtctttgagagcaaatttgctactcaaggcagcaatgagattggtaacttgacttgagctactccctgtaatgaggatatcgtccacatatactagaacatataggcagtggttgttgttgaatttcacaaatagggagtgatctgactgagcagaggtgaacccgagatcagtgagtgcaccagatagcttctcaaaccaagcacgaggtgcttgtttgagcccatataaagctttggtaagcttacaaacatgtgttggatgttggggatcctcaaaaccaggaggctgaaccataaagatttcttcttgcaattcaccattgagaaatgcattatccacatccaattgtcgaattgtccaattttgtgtgacagctagagttagaacaactctaatagtaacatgcttcacaacagggctgaaggtttcattaaaatcaaaaccagcttgttgatgaaaacctttggccactaatcttgccttaaattgaacaacctctccttcagcattttctttaacccgatatacccacttgcatcctattggggtcctgtttggtggaagaggaaccactttccatgtattgtttctgatcaaggctttatttccaacatccatagctttaaaccatcttggatctttaaggg

SEQ ID NO: 403743 - DNA, 639 bp, Cannabis indica
aaaatgtgagtaattaaaaacaaatagtataaagtagtttgagtgataagaaaatgtatggaataactatttgtattttctaaaatataataataaaacaaaaaaatagagtgaaaatgcgtttaaataaaaataaaaaataaaaaagagatatgaaaattacacttatttaaaaaaaatagtgtgagaaaaaaaaaaagagaaaaaagaaaaaaaaatgaaaaggagaaaaagagaagaaaaaaagtcagctcgctataagaagaagaagaagacaaagaaagaagaaaaaactcttaaggctgattctttattgagcttaactcttaaggctaggtatttcccaaattcttctattcttgatgctaaagttggtcataacccttccttttcttggagaagtatcctttggggtagggatttgttggtatctggtctggtatggaaagtgggtaatggggagactattgataccttaaaagatcattggattcctaattctagatataagcagaccctttgtgatctggaccatcagcagtcgaaactatcttattttattgatcctttggggtcttggaatatggataagacttcgatcttgctttgatgaaacctactattaatgatatcttaaat

SEQ ID NO: 403744 - DNA, 631 bp, Cannabis indica
ttttcacatatctattttgtttttagtttttttgttgtacattgtgtttgttttgattatatttgtgagtattttgtgtgtgtatttttctttccatttgattgactaatgacattagttttagttatctttattaagtgtttatcatttatgttttgttatgatttattatagggtcaaaattgatttcataaggttttagaaaatagtttcaatggttcacagattttaattagggatggcaattatagccgcgggtttggatacccgcgggtacccgtccctaatggagcgggtacaggggttgacttgtttcgtttcgggggcgggggtgggtatggatttaaacattcatacccgagtcagaaacagggcgggggtgggagaatagatacccgccccgaacccgccccgatatgatatatgtatatacttaagttttaaaatcataactactacaattaaaatagcttcatgctttaggctttttattgattatactcttttttttttactatacacactattccacttaagtatattgttttactaagtttttatgattgatttttttttttttaaattctctttgagacattcattttttttttcaaaaattatatatgtaatg

SEQ ID NO: 403745 - DNA, 623 bp, Cannabis indica
agttatatgttttatgtgttagtttgatttcatgcagaatgagtattttctatgctctattctttttgtttctaacactttatgtagattttcttcttataaaatattttatcaattaaggtggcataggcgaagattgttaattctatttttgacatctttaattttacaaaaatattttataatttatttattaaattcggttgaggtggttgaggtgtgtatttaactttcatatttttaaattaattgatttatatatgaaaggaaatatgtcaaatttttctatttatgaaaaataaggcatagagagtaagttggatgactattctttttttttttttttttttttttttttcttatagagcttagtatatctgatcttgtgtgagtttcttaatatgttcgattagatttcttgtgaagaaaaccaaagcaaaacctttcttttttatagaagaaaagtcgcacttaatactcacgattctgtaggtacagaaatagaaatttctaggctaattgaagatctattttagggaattgtcaagtgagttgtggtcttgttcagaccgtgtatgagctgtcaataaggtgtatattgattataaatacaccttatagta

SEQ ID NO: 403746 - DNA, 865 bp, Cannabis indica
gtcttgtgaaaattgactgagtcgtcagaataagactcatgatcagttgataatggctctttgacatgaccaagagattgaaagggaggattatcggtgatattttttgatgagcgagaggcagacgatgactcaagatattattttacccttggtagtccctcttgagtatcatcttcactagacatctacaccagaggtagccaaagtaaaaacaagttagtaatagagaaattaaatatgaataataaaataaaataatagttctcggcaacggtgccaaaaatttgatgcatgtcgtttaccacaacaaatttactaattattttattttaatactttcaattatttcagtataaaagaaagtgagggtcgatcccacgaagactatgtttattaaattattcaatagttaattataggaattaaaaaaagaagggttttgaattacaatagcataaaagaaaataaataacgaatgacaattacgattttaaaaacagttaataattattctatacctctaacaatcagtcaagaatagtaatgataaatattatatttaattccaaaattgaattattaaccctgtagataatcacttattcgagtctccctattacaattaattacaacgaagcactcaataatgaaatctttttactaagcagtagacccacggagcatgcaatctatttaatatagggaaagcattaaattctatgaagacaagtgaatctaagcaacaaatcaatttaacatataatttatttaacctaggttataatcttcatcacaatacccatcacattaccattaaaagcaaattatcacttaaacctaaaattctagactattaagtgaa

SEQ ID NO: 403747 - DNA, 727 bp, Cannabis indica
gcgtgtttgagttctttgttctttcaaacttgacacgtgtctctctctgatgtgcttaccgaatttcgagtataacaactagcaagtttaatttgctagaaagattatacggttttagaatgatttctttcctttctttagatgaaaatattgatatagtgagattaatgcaggtttggctaacataaatcacaaggtcgatgaagaaaggcagaccatcatcatgttgagatcacttctaatcgcatatcttgaagtcaacatagccatatatcaagtatggcagagatgttattgcattgaatgatgttcttaccgcacttaagtcaaaagatttcgagttacaattggaaaaggaatccaagaaagaagaagtgtatttggcaagaggaagatcacctaagaaagtgagttcaatgagtaaacaccatcactctcaatcaagatcgaagtcaagagagaaggacacggggaagtattacttctatggaaggtctgaacacttgcaaagattttgcaagaagtacaaagaacaacaaggcttcaacaaatctcacaatggagataggaaggagtattggcaccacaatcatgggaagactctgctgcaatcgctgaagatagtgacgactactccacaaacggagagttttctctatgtcagagtcttcaataacagagagtggattctcgattctgaatgcatttattgttgggaatattttac

SEQ ID NO: 403748 - DNA, 622 bp, Cannabis indica
ttatatatatacatatttttaatctagtgtaaaaagatatattttattatatatttttctaattaagcacacgaattaaaatttttcttttattattcgtcattgatcaaaatctaatgatttcgtaaccatcaatgtgtaatactcattaagaagtattccatatatatatatatacgatatgtctatagtgggattattgttctatccttatggtatgaaagttttttagagtgataaataatagatcaaatagtagtaaatgaatatgtgtatgataatagttcatatttaagttgcattaaattatttattaaatttttttataatattcaacaaataaattatgagagtagaataattactataaaattattttacatgtgtaattactcaatcgtaatattttaattgtaatgattatataatagtggtctatcaatagatttttttttttgaattaaattaattttaattataattttcttaaaataattaatttttaatttaaatatttaacaaaattatttttaagaattaatatttataaattttttttttattatatttaaattcctattatagttttttaactagttaaagtatttaattatatatttac

SEQ ID NO: 403749 - DNA, 480 bp, Cannabis indica
gaccaaaagggcacgacacgtcgtgccaagataacagtaagcactaaaaaatgagtttattggcactaatttaatcgtgccaagaacatttttttcctgtagtgccatgtgccaaaaactagaacaaatgttccaagagcaatccccacacctgtttaacatgtgaataaataaacatcaattatgacattttttttattaaatattctagctagctataaattaggatatgattttataagtacatacaaattaaaatgatcttttcattattattatcattaatttctctttgaatattaatttcttaatataattttatattatagtgtatgttatagtaatattaggtatttctttaagagcctaaatagtgaaatagctagacctattccctataataatttgtattattaaatagctagaacctaaagagtaatattaggtatttctactattaaaattaaggctaattagtaa

SEQ ID NO: 403750 - DNA, 538 bp, Cannabis indica
ttgatgtgttgtcaaaatacatgatgaggtatcgtttataagtaatagactcacaagagtaagatcgatcctacaagaacagtacttaattactaaacaattaaatttctaaattctatttggtgacaataatgattgagaaaaaggagtttaaaaactatttgttaattctatttttgacataattaattgacaaaaatattttattattttttattaatttcagctggtgtgtttaatttggttaccttattttgtgtatccaaacttggaaagaaagctgctagctttcctatttatggaaattgtggtaaaaatggtaagtttgattacacaattaattcttatataaccagctatatattctgatcttgtgtgagtttctcattttcttagatcagatttcttgaagagaaaaccggagctaaactttccttttctataaaaggaaagttgtacttactgcccacgattctgtaggtacagaaatagaaattcctgaactgattgaagaattattttaaggaagtttctagtg

SEQ ID NO: 403751 - DNA, 901 bp, Cannabis indica
aacaaaactttaaaaataaatagccatcgctaaataatttgaaaataaaaaatatgaattagaaaaaataaataataacagagacttctaagttaagagttgatacaaaactttaacttgtatttgagacactatatatatacacatataggagtaagagctatataaagaataccaatagtttttattttttagtagaagaatataaatagttttaacaattaataatagaatattaatataacataaataataaatattaaatagtatgtcttttcaatttttttttattgaattgaattaaagataaaattaaattagtaaaaatagtttaaaaaatttaaaaaattagaaaacctataaattagagaaagtaggaaaataaaaggaggtgaaaccacctcaactcttctaaaccttcctttatatatatatattgatattgatattgattatagaaaaaatcccaattttcttactctcttcaacctcctaccaccatggcctcttcttgaagaccaaagaggcaaagagtgacaatacaacaaagggagcaaagaactaaggcaaggcatgagctcttctcacatagaaaatatgcaaagaagttcaaagaagatttctcacaaagggatgtcgtcaatggtaagcaatgtgatctctaagcccttgagtatgtcaattttaattttcttattgaatgtatgggatgggaaacattgttagaaattcaaacaaatatatatcctaggttagttagagccttctatgcttgcatagagtttagttgtgatccatgtagcgttaagggaattctgaaaggggtactgttgaccgagattttcgacaaccaatataataatatataagaaagatgtaagaagtttaatgcacgagattt

SEQ ID NO: 403752 - DNA, 847 bp, Cannabis indica
gcataaatatgatcgcgaggaactgccaattcagtgtaattaataaaacgtggtcttccttttctctttggagatgtttccttcttggaaggggacttggtaagctttggacttcgctgcctctgagggctgcgtcttctcgggcttctacctctggggttcttccctctaggacttcgagatcgtgaccgtggtacgggtgactcgcgcttctccttcaccctttctaattcagccagagaattctcgattctcttatgcgactcagccatggcgaagaactctaccaacgattctggtcttcgggcttgtaactccttccagaaatcggttcttggcaagacacctgtaattaacatacaaactaacaaagactcaggggccttcttgaccttggttacttcagcattaaaacgcttaaaataatcttgtaaggactcactgaattcctgcttgatgttagggttgtataaggcagtttatacgtcatcgtggcttggaagtggatcaagaatatatctacaaaagtctcccaagtcgatatgggtgcctcaggaaactgactaaactaatcatgagcgttgtcctccgaggtccctgccaagatgcgacattttgctctttgaggtacctggtctacctccataattgtattaaatttttctaaataatctatgggattagtagtgtctttatattttagcgattcaaataacttgaatcccttgggaagtcgagcttgtcacacttcttcggtgaaaggagaagtcccatggagcttgtaaatgggatttctctactgctcgattattttaaacgctcgtagcaggatgctctgatcaacacc

SEQ ID NO: 403753 - DNA, 666 bp, Cannabis indica
tttgtaggatttagaggagcttttaaatttcattggtgttgatagtttaggaccaaggcatgtacttgctaatttgaaggagcttgtaaggactattcaatctgcagattatattgatacatgaaataatattgtttatatttttcttaacactttttcctttttacatttatgggtgcaaattttttatgggagcaccttaccacaatgtcttgttgtactaaaaaaaagttgtgattaatgcaaaattaattatttagtatgattagtgatctcattaatcaaaagggataattaaaaaaaaaactcaaaaacaataaaaaaattacaaaaatacagtctgtacggtattttcaatacttttatttttatggatattatttatataaaatacaattttttgatgtatttttatattgtatttttattattttgttgttaattttctgttacttgtatattattttgtatgttggtttgatattgtatattgttatcttcatgtagttttcatgtatttttatagaataccatgaaaatataaaaataaattaaacgtaaaaatgtaatttttttactaaaaattaagtgttttatataattatttccaatcaaatttaaagaatgatgagaaaataacatgaaagatttatagaagttatctat

SEQ ID NO: 403754 - DNA, 546 bp, Cannabis indica
tgcttgctttcggaacctttcgttcaacgactccatacgattgccaaaataggttgttctactggcaccgctggaaccgcaacggcccgaacaacttgctgaggaggcacggcaggaggaccctactgcctcaacctctgaatttcttcatcctactggcggatgcgatcttgcatttctgcaaatctctgctcccaatccagaggagcttcgggtggatttacagggcgaccaccctgaactctgccacggccacgaccgcgaccacggggattctgggggttttaatttccctgaccgcctcccgtctcaacaatattaccctgacttcttgtatttcgctgggcgtccattttataggacttagcctgcgaaccaataagccaggcaagttagacaacgatcataaaacttaataccgctctttaggacttaaaggcaacacacttaaaataattaattataatctaatatgcttcctaacatgctttcataatcatttaaaatactaaacaagtacgggcttactgaaccgtgaaccgagct

SEQ ID NO: 403755 - DNA, 553 bp, Cannabis indica
ttaccgtttggcaatgaattcgtagactagactcatccaaatgcatcgaccgacaatgtgcaatttagagtaagagaagtatataacaaaaatgaccaaaggccaaaattctcataattaacgcaaggtgatctaagtataacatcattatacataaatacaccagaaggttaaaaccgtacaccctagcgaacccaatgaacgaccagtgtgggcttaaacccatactgaaaaaaaaatatatttctttttatttgttaactaaaaaaaatctttaattattttaattacccataacaaatgcgcaacaaaatgggagatcaatagttgaatgatagtttgacagtatatctcaaaaaagatgtattcaatgctattgacaacgagtttattattcatcgttttcaaaacatgaaaactcgtcgaggacaactctaaagatatgagctcaaaaattgatatatttgtcaaaattttaggatattgagtatgttatatattttgaacatcgttttaaattgcttttttttttttctattagaagatttttagt

SEQ ID NO: 403756 - DNA, 719 bp, Cannabis indica
ataatatgttaacctgagcgttgagtcccagttttggttctccgaaaattctatttgattcttggaaatagttgaatctcaatattttctgaatatggtgaagatgctttgaagagttcttggaaaataccattaaaatggcccaatttgacaaaatgtcaacctaggcgctgggtcccatttttggcacccagaaagtcatgtttcttcttcaaaaggacatattccccatttttatgaagatgaagaagataaaaaagttagatatttgatttgatacttggaaggtgccaaattgacaaattgtcaacctggacgatgggtgctcgggaccccagtgctcaaaaatgaacttgctccgattctgatgccttacatatgtctgtggtatgtttagttgatgtcctaatgaaatttttgacccatttgcactaagacagtataaaaaattgaagccttagttgagaacatcaacgtaggcgccaagtgaaaccctaggtgcccaggttggctttcgagttgcaggttcgtgtaatttcaactcccaaagcttagattattaggttgctccatgtctttatggtacagaatactgaatgatagtggattcaagttattaaagttccaacttccatcccgaagatccaaagtcaacttgggcgcaaggctagggtcactacaaaaaaaaaaacaatttagtgataactttttagtcataa

SEQ ID NO: 403757 - DNA, 526 bp, Cannabis indica
tgccttagcatagtatttttttcatgcgtctctgctccaaaatgcttaaggaatgctacaacacctaggacttccaacttctaaaaaaaaaatatcatgctttttttttttctgcaaggggtggcacacccaaaacttaatttcaaacactcttttttttttcaaggggtggcacaccccaaacttaattttaaacattctttctttttcttttttttttttgaataactaacaatacaaatataataatggcaatatacacaaaatatggtaactctcccccaacttaaaattcaacattgtccccaatggtgagaataataaagtaccacaatgaaaacactcacccaattaccactctaccaaaattacactcctcccatccccttcatgacacaacaaacaaatatcttagaataataaggtgctcaaagggtatatggtgagaagatttgtatttagctaggcttacatgtgggtaaaaaaaaataaagggattcaactatgctcaaagagggtgactatg

SEQ ID NO: 403758 - DNA, 510 bp, Cannabis indica
atctgatctagcggggcggggcgaggcggggcggggcagatctttacatgatctggatcaggtcggatcatagccggatgagatccgacctgacccatttacactcctatatgcaagctctcatattcatcttgcgacggtctagcaagtttagtactactccaatccatccctagttcgtagccaagtctcttacccaatattattctctttatttattaagcaattagccacgaaaattgttttaatttttatacacttaatcttttttttttggagcattgctattaggcaccagtggcgcctaacaccttttaaacgtgtcgtcttgcgattgactagcgatattctctaaaaattattacattaaattatatggaactcagtacttagttgggccaataatgatattgacacgtaagatggtgtttggcaccactggtgctctttagcattttgttgtgaaaattatattgatttataattgcgcaagtgtacacaatcacaaac

SEQ ID NO: 403759 - DNA, 1021 bp, Cannabis indica
cacaaaccaccatcaccaccacattttggcgaccaacctccggccaacgcccgaccccacgcatcggacagaacgaaactctaggtgccggcgacctcacccccaagtggtcccgctcctttcgccgtcgttagctttggatcgcaagtcaaagtttggggtttcaaacttttaacgaatttttcgataacctccggcgtccgtttgacgagacgttttcaccactaaacttagctcgttgaggagaacaacctacactaaaccatttttcccgattcgctactttttccggtgacatttttgtagctccgccactttccagtgacttttcggtgacatcgtgtaccgttttgacaaacggttggcattggtgtgatctactcgtcgaggtggtcgttttgatatacactacgcctattttcggcgacgtttccgatacattgatttttaccgccaccgaatattaatctgcaccgcttaggtgaggctttggaaccccaaattttaatggtcatatcatatgtcgttggactcggttttgaatgtagaatgcgatgatgataattatttaaccatttgatggcatatgtaagagtaatatgtaagattggactaaacaattggagctcaggacttaagagcttaagatcatcttttggaaaaagtttaacggttcgggagaggtatggactcaacttgattattggacttgatttttttatgtgttgtataacattgggcatattccaatttttatgatttacaaattgtttgaaaaattgaaaacttaatctgcatatttttctggactgttctggggcagagtgccaaatatatttttgtgtgcaaatatttatgcaggttatgatttttgggtttattcaaaatacagctgttatgctgccgaaatttttttagaaataaaaaaggaatatgttctttgtgatgattattattttccggctttggttatactgatgagagccatgttgatcatgttcggtgcatattgttgtttcac

SEQ ID NO: 403760 - DNA, 939 bp, Cannabis indica
gggaatacttccctggagccatgatttttagctaagagtttgtacacacacctggaaaaaggggcagtacgcaaaaatctcagctatactattattcctaaaacttttgagtattctgcaaaaaaagaataataataaaataaaggttagttcttttaggaatctatattctaatattttctctataaatgggaattgggaacatttggttacaaataatagggcaaaaaagccaacaaaagcctagcttttctttactcttgacacagagaatccagatctataacaagatctaggtgaaaagaaaagatttgactatccggtgttgaagtttaactgttgcggcttcaaagcactcagatggtcataataataaaactatttcaaaacaaaacgaaaacttaaaattgaaaactcaaaaacatatatgattgcagtgtatcataaattggaaatataaataaagggcaaaaccaacagagtaccgttgaagagacgccgacggcggactgaatgagagctacatcgaagcagagagcttcaaaccaccaccattacgtcagagcagagagcttcaaccaccaccgtgaggaagatgacgatcgaaagagaaatgggttcgagtggccggttttgaagaagacggtcagaagggtcgaaaggctggtttcagagaggacgatcgagaggctggtttcggagagcagtggccgagttcgaaggagtggaggggtggttttgccagagcattcgaacatttttagggctggttgtgtatgaacagtaggtgaaaatctgattagattttagggattttaatgtagttgcaaatctgttgctatctctaatgtattttgcgtcgtttttaaaacctcgctaatacaatagtcgagtactattaacagacgcaaaatgaaaagcaatttcttttacattttt

SEQ ID NO: 403761 - DNA, 515 bp, Cannabis indica
tgtatcattgtcatctcatctggccttggtagtttttagggtttaaattgtatctaggttcatactagggttcaggaaatatgtaggttgttttaagatatccaactccttaccttcgggtttgatataattctctccagggattgggactgcttttttcctgcaataatgtcccactctagttcaggaatatatcgtccagaagttttagagtttgagttccctacagaattaaccatcccgtataaacccaacccttcaaaaccgacctgcaaataagatttgaacgatgctagggttagggaacatgtagtgagaacccaacaggaagatattgctagtcgctacaggcgtttcttgcaagaaatctctgaaggtaaacgtcaattcttgcgagaagcagcctggccggaaccttccagcgtgtcctttattcctgtggcaaagcctttgtttttacctaacatcacgattgcttttgaaccaggtaaattggattttgaaattatgcctcc

SEQ ID NO: 403762 - DNA, 541 bp, Cannabis indica
tcatcgtagcgattataacagtgagcagcactatggtcatatctcccacatacttgacatgtgggttttgtattgccttgattcccgacctttgaatctacccgagcctctgcctcctcgagtttgattcgagttgccacgatttccttgtccatactgcccagagttgttagatctgttgcctgcaaaactaggatttcttgtagcagcaacattagcagaaggggaacctgagataggttgtttggaagatccagacaatgttgttaacctatctagcttgctgtcaaaactcaggagtatatcctgaagttcttgccaggaaatggataatctggcttcaacctgaagaacaatgggtaaatactcaatgtcaagacctgaaagaatattagagacgagttgtttttcaagataagggtctccagcaagagccaaaacgtctgcccattgacgtttttgacgaaggtaatccgccatagacatggttccctttctgtaggtctgtatcttagtgtgatattcatccatttttacacgc

SEQ ID NO: 403763 - DNA, 559 bp, Cannabis indica
ttatattctatactaattatggcctttttttttattgacgcgaactataggacgtgcctagggctcacccagcccgaacccaaacaaagagaaaatatcatctattcttatatttagggctcccaaaaaatttatttttcctaaggtccaacttaaggctgcaattaagatatgatacaatattattgaacgtattaataaacctaaaatataaatcgtttagttaacatgccatatatgaaacgacatgtttaccttgttgaataattagactgcgtgttttattcaaacatgtaattgacacgattagcttattgtgtatttaattttccttgaaaatattcaatgtagcataaatttaaaattaaatatttacttaaattaattagataagtcaatctaactcttttttggtgttacttccaagtctaacctaaataaaatgcataaatataatacatataattctttgtaaaatttaaacaaaatatctaaaattgattttttaaggattttttctcacaaacgttgttcttctacttacatttttttttttttt

SEQ ID NO: 403764 - DNA, 692 bp, Cannabis indica
cgcggtaagcacttgattcatttttgtcctcaatatttcatctaaggcatttgatctcactcttttctcctttttcagatttctgcggagactagccgcctctctaggaccatcgtcaatcatggcttcgtcctgtccgaattcggggccatagacgaggtcgtgaggattctgcgggacctgtccgctgagaggcgggtgatccaagaggaggctgagcgaaaggaggccctcgctaaggcgaagctcgaggaggaggccaaacagagggaagcccaggcggaggcgatgctccgagaggaggtcctgcggagggataggctggaggcgaggcaccgggaggcgttgagggcggagggcgaggccactgccaaggccaagcgcgagcttcgggaggctaaggaggccatagacgagatggccgccaaggtgaggtccttagaggagttgcaccaggcggacttgcagtccagggctaacttggccgtggagatgaaggagctaaaggacttcagagatcaagccttaaagaaggctaaaagagatgagctcctgtcccctgtctcctgtaagcgttgtgtcaagcgcttcgatgatggcgtctatatggcctggtcgacaaatggccagagtatcaagcttgacttctaccccaaacctgaggaggttattgccaaattccgagagaagaa

SEQ ID NO: 403765 - DNA, 577 bp, Cannabis indica
ggaacaaagctctaaagaatcaagctcacgacccagatcatgcgattctcagcttggctcaaagcttcctagaagactaccattcctcccagcggaccgctacatcctctcgccctagccagatgtcagccccttctacgtggactcctccggccacgggtcttctcaagctaaatgtggatgcagcaatatcacaagccacccggaaagcgggcttcggaggtatcattagaaacagcgatggactggtagttgccgccattgcccagcctcactccggaggaggctcggtcccaaccttggaagcaaaatctcttctttctgtgcttcagtggtgtatcaacgagcacttcttagtccatgaggtggaaacagattgcaaagccattactgatgctctttctggtcataaagaagatatttcggtttttggtgacattattaaacaaatcaagaatgctttatctcatttccctgctgctcggctctcccatatcaatcgcgaggctaacacactggctgataagctagctcaccgagctctagggttagatgaagtagccatttggattggaga

SEQ ID NO: 403766 - DNA, 548 bp, Cannabis indica
gcctcgttcattttgccttcttcatcttgggacttagttagcttgcaaagatgctttccgcctcatgtggttgagcagatcctctccattccccttcccctcaacccttgccccgatgagtacatttgggaatattcccaatctggtatctattctgccaaatcaggttaccatgtcagcctgtcttcctcaccccctccggatatcccctcctcctctaatccctctccttggtggaaaaatttgtggcatctttcccttcctgccaaagtaaaacattttgctttccgtgccacaaactccaccctctctacagccaaaaacctagctcataggaaaatcatcccttcctcgggttgtgaccgttgtggaggaatggaagagtcggtctctcatgcattgttttattgtcggagcattaaaagagtctggaaaggtacgcaattttacccttacatttttgctaattctttagaaatattatttcatgatgtcgttgatatgatttacacttctctgaccaaaaaagatgtagagatttttctttg

SEQ ID NO: 403767 - DNA, 551 bp, Cannabis indica
gaaacaaaatagagtcatcatttagtgaattaaatcacaaatgtagaggttataagttttaactcttctatggctagaagtggagagagtagcggagacttaaaattagagaagctttacatttacaaacctaatttaattatttttatatataacaagggaggagaaagataggcgtttaggagaaaaaaaaaagggtataaaaagaaatagagatgtgatagatagatgtttaagggcgcttggtaagtttttttttttttttgaaagaagtgttctttattaagtcgagcaatcgctctcaagaatagacatcaaatccataggaacactattaatagaaaacatgcgttcagcaagggaaatagagtgccaggcaacaaaatgtgcggcacaattcgcagaacgcttaacaaacaaaagcgaaacattaatcaaactttcaagaattttcttgcaatcttccaccactgaaccgaaagaagaaacaaacacctctgcactacgaatggcttcagcacaaacgaggctatctgtctcgacgatggcct

SEQ ID NO: 403768 - DNA, 791 bp, Cannabis indica
acagaaatgcacaactaattataataagattcataatttcaaataactctattgacaactacaataaagcataaaaacttgaaaaaaaaaacaaaaaaaataatagtttcttaataagggtatacttgttaataaaaatatcaccccatacacaatttttaataggataatttatatttttactctctaaattttaacatgtatcaaatcatgtctcttgaacttttcaagtcattaaaaattcttttcgaactattaagattattagatttaaggacttttatctaattttactaaagaaagtatgtcgtggatgaaaatttaagagacacaataaaattcaaggacatgattttataaatatcaaaattcgagggacccgatttagtatatggacaattaccgtgttagcaaaattgaatgaaactagacaaaaattcttaaatctaacaatctcaatagttagagaaaatttttaacgacctataaaatttacgagtatattttataaaatatcaaagttcggaataaaaaatatttttttaaaatattaagatatattaagcaccactttcatttttctccctctttttctttctcaatttcaagaatactggagcctaaccatattaattaattcaactaattatatagttaaataaatatagggtgattctacaatgcaccccttaaaaggggtgtattgatgcaccattaacttgtttcgacatctagaagaattttttagtctaattttttttcatatttatgtacgttatatctatttaaga

SEQ ID NO: 403769 - DNA, 589 bp, Cannabis indica
accatgtcccactagactaaagcatccacctaaaactggaaagtggcacacaccactccatcatttctagtgacgcacatgaagttcaaaattttggtgatcacccttagccactgctcggctttcataacgtccagacctcctagaaaaatcggaggtgcctgcttacggaacatttcatacagaggttccttcagattcactgcaactatagggtcggcctggacaacaggggcatttgccactgagatttctggaacaggcactgcaggagcaccctgctgtcttagctgccgaattacctcttcttgttcattaattttagttttcatttctgcaaatctattttcccaattttgggcttcttgagtagcttgggtagcctgggcaacctgtggttagttagcattgccccgaccacgtgccctgcccctacgacctctacctcggccccgagcatttgggggaaactgagctccctgaccttcatttgacccgaccgagttgccctgactcctggtatttttcctggcgtccatctagtcttaacagcccgcgtagccaagactagcatggtcatatcatggtc

SEQ ID NO: 403770 - DNA, 985 bp, Cannabis indica
aaaaattaattataaaagtataagtgataaaactccatttatactatattttattaaataataatttagatatattgtgtgtttgtaggagtgattatccaattccaattgatactttcagacctttgaacaatatattagtgttagttatattgaaaattagcattttaacaatttcagagtgctagacactatggtatcttttaaccattctcattgaaaatatgtgaccaaaattgaatataagatatctaataagataaattttgttccttagtaccttatatatgcttcttatatataaatattagtacgatgaatcttattatttagaatgtgagactcttaaataaagttaatagaggtgagaaagttggatgaatggcattggtaatggtagggatctaaaagggtataacttaagaatgtgctatttttcatatttgggtagttaagtttacatgaagatatttttttaagagtgaacggagttaacgaggggagctaggtttgtttaaaaaggtgggatttaatgataattgggtgaacttaaacaagccagctttttcatccttgacttcttccacctcacctcgaccaacaccccaccccacacccacactccttctttctctctttctttattattatttattccatctatttctctttcatatattcacatgcaacatcaaaacaacactacttcaaaaaattaaaaaatttcagatttcggagcccacagtatatccaaaagatatttcaactctttataataataaataaataattttaacttttttttttatttttgataaaatttttaagctaattagtaatttttccttcgaaattttgacatataacaaattatatcccctaaatctttttgtctgtttaaaattcccctgaactatagagattgataaatttaaagactttggtctaatttcattcaattttactgtttcagtgattgtttatg

SEQ ID NO: 403771 - DNA, 661 bp, Cannabis indica
ctcgatggagacagaaagggggatcaacttcaacttagtcacctcagaaggcgatttcacaagttctgcaaaaatttcaagaactgggagattgggcatgtcccacggaattgcaacttcatggctcataacattgctaaatgggcgagacagttcgggtcactgggctcattcgaagcacagaactggataaatcagtgctggatgactacgttgaatggaagaaacatgcaggttaatctaattcatcctatggggtaccaacggcagcatgtcaagctgtctgattctcctttttcttatttttcttcagttagttagtctaatgttttgttactgtctgtttttttttcagttttctttatggcctcttaggctttgttgttttttatggtttgaactctgtattatcttttccatttaatatattcctggggtgtgctaacacccccaacttcatacaaaaaaaaaaattgtttatcccaagagactaggaacttatatcttccattcaattaagctcttcgattgttagttcatgataagtggtcttgaaagcagggccgagcctgagggtaggcgggctaggcgtgcgccttgggtccccgaacgttcagagccccgaaattgtgaaaaaaaatattaatatatagattaaata

SEQ ID NO: 403772 - DNA, 1084 bp, Cannabis indica
ctcggtgttggagccttcgatgaggatagaagcgtcgcaaccacgaacaaaacaatcgtggaagtgcatcctcagaatgcccggggcaatccgaggatttgttttgaaatgagactcaactgttgatctaacaatagactcggccttagggcactttgttgagtaatacccaactttggttccttggccatgtgccaatgtggatgtcaaaccaagaaataacaaaaatattctcgtaacaaatattaatttgttaacttccattttatttttgggatgtaataatatacttgtgagtgtttattttggctgtgaattttgagtggaaagtatatgtgaatttatagggaatatgcatgaaaggtaaagagagagattgagaattgagaaagtaagcaaaattggctcactttctaaatgtgaggaatagtaaaagggatagcgatagtccaataatatgacaagtacaggagagtatattagtggacctttgtttgtcattatattatttattttggaatattatatttataatactagtggaagaataggctgctacgtaattttgaatatttcttatcattttattaaataattatatataattcatatgcactctttttttttttttttcaattcaaggatatatgtattttttgattaatttttatgttatagattgtatagttccaataaataaaattttatagtcaatgattcttttggagtttaattttagagaaatattaaaatttacttatggtgcttaatatttttgtgaagtgcagtgtaactcatttttagattttacttattttattttaataaatattataaagaatcactaactaattataaatgaatacttcattatggtgctagacaccattagtgtcttataacaatactcttaaaattaacatatatgtagtactaattgacttaattagatatgaacatatatatatatataaaataattattttatatatatttaggtgatgtttagttggaagaaataaaaatatagggataataataggaatgagaatagaaataagaatgtaatgaaataaaatttaaa

SEQ ID NO: 403773 - DNA, 611 bp, Cannabis indica
ttttgttgggtaatttggaaaaaaaaatcaaagcaattcacttttttacagaacttgatttcgattttatttgaattagttatgaattttttagaatcggaaaaatatcaggggtggtgtcacacccatacgcgcacggatccctcttttctcgggcgcatgcggctttggagacttaaccccaggcgctcgtggagaggctttggagactcaacctcaggggcgtatgttcgagttttcttggtctgttgggcgggattgtttgaaactcaaccccaggagcgcgcggagaggctccatgcagcctcctgcgccgtgctttcttggtcacgcagcccaatttgtgcgtgcagatggtatgcagcataccatccgtaccaaatgcaaatttttccaatttttccactttttcatgctttttcatggaaataatttaggattttttgtgtagttttgtatttagatttttatttttcatatttcaaatctacttatcagaattaaattaattaattttttttaaattaatttaagatattagagtaatttgaacttgaaaataggtaaaaatctaattttttgcttaattaattatcttatttttaaaattt

SEQ ID NO: 403774 - DNA, 735 bp, Cannabis indica
tattgaatacaacctgtcacattccattacaaagataattctatatactacacttgatttggatatcaaggtgttgagattaattaaaatgcactttcagttttatatcaatacaattgggagattgttgtgatttcattccctaaataaaactatcttaatataatttgatttaataattaataaaagatcaggaatcattttatattgcatggtttacatgattactttcatgattatatgtttaatatataaattctattaaatcctgaaattattgttattcgtgattatagttttgtctacatggtggaaaataatcatgattatatgcttcaaagtcttttctcccatgatttatcaaggcactgaatttacactggcgtgataatcagcgataaagtttacttacacattaatatgtggtgtgtccttttcatggcattagaaaatatactagtatcggatatattgagtatacatcggactcgaccgatattgatagtagaaaatatatcataaacttattattatgtcttttctaagtcaataatcacttactattagttgtgttctttgacttgttcattaaagctgacaaaatggattggcctaatactcacatcttgggaacatagtagtaaaattgagtgagagcgctaatcatagatatgaaatctatagcttctataactattagaagtgaaacgatgattttgttttagcttagcttaa

SEQ ID NO: 403775 - DNA, 686 bp, Cannabis indica
cttatttttgtaagatgttgaagtatttttctaatggataaatataaaggaagtcttttggtatcagtagggagaggtctcatgtatgcttcagtatacatagaccagacacctacagttgagtgggagttatgagtagctattagtttaatacaagaaagaaacattgaaagacaaccaaataaatcttaagatcaaagaaagacctacatgttagtcgataaaggtggtattttaatacccttaagctacaacaaatcaggtttctagacttccattaatgttagaaagtatacttatgagatggtggttactttgggagtggagaagtgatttttggaaaattgtaaaaactaatttggagtctctaactctaccagtgagactgaatgttaaagtggtccaaaatgctactagataattattcagcctatgaaaagttctatacagttttaggccttattgcagtcatggattaactactaatgttacttcctgttaacacagatatagttgcaaagtagcaaagtatccaataccctaagaggagtaaacatatagaaatgaatttcataatatcaatgattttgtgactaaggagatgtaattgtagaaaaggttgatattgaatacaacctgtcacatttcattacaaatataattctatatactacacttgatttgga

SEQ ID NO: 403776 - DNA, 893 bp, Cannabis indica
tcacaaacaaatacaaaatactttgtccaattccagacatttgatcctcttacaagagacgtgtggcttggacacgggccaacaaaattaaagctacatgtagcaaaactaacatatgaacagaattatagcaacccttttaagctgaactatcacgtttaaggtctccaattttatataattgacaaataatagtacgggtcttgacaatctttaaagttcaaaccattattactagtaaaaaatacacagcgtaattggattcccttgtttttaccataccaaattcaaagaagaaaagaaattgaaaagacagtaatgcaagagcaacaaacaccaacagaatcgttcatttttcgaaacaagcgagaattgatatacaacaaattcaaatccagcgatacaacatagagtgcgatcatcatttattcgaaccccccccccaaaaaaaaaaataaataaataaataaataaattgtaacaaaattagtaatgaaaatataaatatgaattatttttgcataaagaaacaaaaatgggtgagtgaagaaggggggatggaagtaccggatcgaagaacggagaagagagtggctgaatcctgatcgggaatgcgggaacagacccaatttcacattctcatttttattttggtttttgggattcgtcccaatcctttttagtacaaattaaacatttaacaccaaaaataaataaggaagaagagggagacacaaaaaaaaaatggatgtctttttattttattttattatttatttttgggggaattataatagagcattttacataaatgtatacatttttttaaataattacaaaaaatgtgcaaaaaaacacaattttaaaaatgcacatatttgaaaacatattta

SEQ ID NO: 403777 - DNA, 608 bp, Cannabis indica
atgcatcttacaattttaacatgttattagagcaaaagaaacaaaaaaaaatactctaacactaactgacccaaaaaacaagaaggagccaccaaaagtccaaaatgtagagctaaaaaaaagaagccactataaatctaaaaaataccgatccaaagtagagcaaagagtcacttgtgattagagatagtgagcaaaaaaaaagtcatttatgatcgagttgtccaagatggtgagcaaataaaatagctactatattgagaccatattgagggaggatgttagagagtttcacattactaatgttaggaaaaataataaaatatataagatccacgagctattctttttatagccaattaattttaagatagaacctcatgtttcttaatagtatatcatctttatgttttgtcaaataagtaatccacataagtaagtatcttccaaaatttaactattggaaatgatcttatggctgttacctctttaactgatttgtctaaatttaattggctagattgagaataaaacaggctatgtggacatagaatctgctttgggtcatgctaaaccaaaaattaatattgatgcattaatgtcatata

SEQ ID NO: 403778 - DNA, 749 bp, Cannabis indica
aagttattttccaagatgaatgtcacaaacttgtacactccatcttgaggggggcatatcaaatattaaataatatttagtgtttgggtatagagatatgttattcttagttgggttttggtgtctatcatagggttggatatcctccccctatataaagcatatttgttgtatcatttaataacaattcagaataataaaatcatttactttctccttttatctctctaataattaattagtattactatgccacttcttacaacagttggccatattttcataatagatataaattaaattacataaaacttaataattattatatattattatatgatagtttaagtagtactaaaaccactaatatttatgctttttgacatatctcttaattaaaactcaaaagagtttaattcgggtgcatagatcagattatgtatagagcaaatgaactgtaaggaaagaatatgaaatgaaaaataaaaaaataaagtacacgtataaaaaaaaaaaactaatgcagattaaacaaagactaaggctatgtttgttaggaaagatggagagttagtggaggatgtagaataaaagggagggagaagagagtagcaatccttttaagttgtttggtggaagggatgaaatgattaaaggatggagaatatttatttatgaaattattatattgtccttaaatgtaattttttaataatatattttgaaggtatatttgtaattttaaataa

SEQ ID NO: 403779 - DNA, 704 bp, Cannabis indica
ggaaattgtgtgagttggaaagtacaactacaaccagttgcagcattatccacaactgaatcagaatacattgcaactacagaagctattaaagaaagcatatgggttaaaggagtcctagaagagctaaaattactagactcaaaaccagtaatttactctgatagccagagttgtgtacacctatgcagaaaccctatgttccatgacagaaccaagcacatagaaataaagtatcactttatcagagacaaagtgacacagggacacataaatattgacaaggtacctacagaagagaatcctgcagacatggggactaaagtgatcaccctatctaagtttaaacattgtttaaacttaatagggttggatcaaggataatgtgatcctttggatcacagagctatgaccctcagatttgactcgaccactaatgtatcagctcagtgaaggcttaggtggaaattattggagtaaacctccacttacactgatatttaacttaatacaaggacagaaatgtaattacaagaaaatccctaatttggccttcggcctctagaatcctaacagaatagttagaatggattggtaatcacgcctaactaaatactgtaactaatctaactaacaaatagtagaagcaagagataaaaccctaacgatctatatatacctgcatctaaactcaaccagtacgg

SEQ ID NO: 403780 - DNA, 533 bp, Cannabis indica
aaataaattgtttaagtatatataaagagaaagattaccgatttttaggagatgaattaggaggacttgaaaacactaaagtcgcattggtgccgtcatgagaaagaaagagtcgatggcaagagcggaagcaaattattttgaggtacaataataagaaaatagtcttctttttttttgaaataataacaaaatattcctaaattaatgacttagcaaataatttgacaaaaattatggacataacgtttcttctaatggaaaagttgacgaaaaatatggacataacgtttcttctaatggaaaagttaacttctgttaaatttaacggaatattcttttatttttaaagtatattctgttaaaccaagaaaaatggttagatagacacttttaatatataaatatatatatattgattgtttatagtgtcccactaacattagtgtgacactatagactacaccaaatatatttttattactttttaatatttaaataatatatttttaagtaaactttttgtatttata

SEQ ID NO: 403781 - DNA, 551 bp, Cannabis indica
gacgaatgcttcaaagcccttagaaagtagaatataaaactaaatccctcaaagtgttcctttggagtcagtttgagaaagtttctgggcttcatcgtcaatggccaaggaattgaagccaatctagagaacattcaagccctcccggatatgaagtcgccaactaaaaaaaagaaagtgcaaagtttgactgcttggatcgccgcactcagcaggtttgtttcaaaatcaacagataagtgtgtcccattcttcaatatctgacgaggaaacaagcagttcgagtggatggagaaatgtgaataatctttccaagagctaaaagtgcaacttgcaaaacctcccatactctcaaaacctctatacggagaagaacttggaatatacttagctgtcacaaaacatgccgtaagtgccgtgctaatcagagaagagaacaacatacaaaacctagtctattacatcactaaaagactcattgaggccgtaggccgatacccattgatagagaaactcgcttactgccttattctggcaacaagaaagttaag

SEQ ID NO: 403782 - DNA, 1100 bp, Cannabis indica
cattactcatggtatattcattgggaatgcccaactttatggatacttacagatacacttgtacaatagttctggggatcaccccaccaaaaacactataaataccccctcaaagctcattaaatggggtcgagaatcttgggctgcataagagcaagaagagtaaatactcaccaagaacattctctgtatttataagagtgaaacactcaccaaatacattctctgtattaaatacatccataaataacaaagactcgtggactaaggctcattaacgccccaaccacgtaaaaatccttctctaattttcttacagctctataaacttataatattttattagttgccgaaaacctcggtcaacaattacaattgaagttaattgcctcaaaactttgatcattactattgaagttaattgcctctaaactttgatcattggtattttcttattattttatcactttatttttagtagaatataaacttttttcaaaaatcattgccaccagataattttaggaatttactagtttaatacttaattgcagtctttgtaggttcgacctccttgcgcgagcatattacttgtaactagagatgtgcagaaagtcattcgatctaattataacctatcgatccaattccaaccaatccaataaaattggatatccaatcataattggatcggatcagatgtaaattttgaaaatccaaccagattggatcgattgttggatggatatcagatccaatggataatcgaacgaaaccgatccaattatcattcaatggtcttctaattatatttatatatttttaaaatacatttataatttcatatatttaatacattttatttaaaaaatatatatattaattaattttattcttattgttcacttgcacaaatgaggttaaagaaaaaaatcttagatctaaaatattaattttcatcttcctaaacactaataacaagtttcataacaagtttttggcgccattactgggtactatatttagttaatattaaaacaactaaattattttctaatttggttctcttttcacattttttgctaattttattcttgaca

SEQ ID NO: 403783 - DNA, 1102 bp, Cannabis indica
tttgaggcagtcaccttggctaatttgacaggctcttttttctcatgctacacttattactcttcttcaccttcaccatcttgatatacataataatataatgaagagggagggccttacatgaagataagagtgtggatagtttgatagccaaggatgacttgcctgcattctttctctatcaacatagcttttcacacgtggaaggcaatgattggatgaatgttcaggcagtctccttggctactctaacgacctcttctctatcatgctaggcaatatatttctctctttctaattttcttcttcatacttatttcttagtgcatggctaaggctacgagcctatacgcatgggccattgggcattcatattaattattgaccaactagaaaagcgagcattgatatatatgagcagggtgaagattgcagcttaataaaaactatatgggttatatctacattggtccatatactttttgaggaaattatactacatacatcttttagctttatacttttaatttttatcctttttttcaaaatctattatgtttactcttttttttttcaatcattctgccaatgtcacccctatcacttcacgatagttttcattcttttatatttcaaaattttgtcttaactttcctacaaatctattatgtttgaaaattatgttttagttatgtgagtgtgtgaagataatttgggtacaatattcatgaaaagatgtatatttgaattaaattttatttgaaggtaaatttagttaatgtataaaaaaataagtattctttaacttctccgtatatatgaatcctgggtccatagctctaatgggatttacctgctcactacctatgacaaataggtctgggactttgcaatttgggcctcgacagatatgtgtgatccgtttgttccagtttgggaagctcaatttctttttaagtttagagtttttttttttattattttgtgggtattatatgaatatatagtggaataatttttttaatcttatggtgctgggtataataaataatttgtttaaaaaataaaataaaattaaaagttatgtcaatataaaatcatc

SEQ ID NO: 403784 - DNA, 505 bp, Cannabis indica
tgactaaggcaaattcctctacataattagaaacttcccagcaacagatatgtagaattccatcttattaggttgttgaacttcccttaacaatagaccatgcaagacttggaaatgaataatgtactctggaattcgaagaaagtgaccaaaaacagtttgggaaaagattttcaactgggttggggttaaaatagttttaatatcgttaatgattgaataatagcaagaagttattactttagaatgataatgttgtgaacgcctatatttacatgtccagtcctgagtaaataaatatgcaaatctatttcaaaataactcaaaaataacaccaaatcaactagaaaataataaaaaaaaagaaataattaaaaaaaagtccacacacctcaacaacaatatcatcaaaaggctcttcaaacccaaatttagtaggaatatttagaatagggaatttccccttcccctacagaaaaataaaagtaaaagaaagagaagaata

SEQ ID NO: 403785 - DNA, 605 bp, Cannabis indica
gattcgaattcggccaacctgctcggactcgacctggttaacccgtaaaattaaaaaaactcgttctgttcgggtgagtcgggtccaactcgatatatctttgggcggattcgcgggttggttttttataatcattgaatttcgagttgaacacgaagccgcccaccaacccgattactttttattttttatttttttattatatatataacatattaaaaataaaaaataaatcgcaatcataatccgtatagcaatacacatagaaaccacgacagaaattactttaaaaatctaaatcgtaaattaaaaaaaaaaattaaaaaaatagtatatgagtaatttcccttaaatattgagggtgtagttataattataaggggtgtaaatataactttttttttttttattggaaatcttattgaatcaagatcccataatatattaaaccaatccaaatgtgccaactcaactaaccacttaaatactattaactatgtagacagttttttttctttaaaatactcttaaataatggcatgtttactaatatgtaatgagaattaatggtacggtaatcattcccttacatttgtttacttaca

SEQ ID NO: 403786 - DNA, 515 bp, Cannabis indica
ttttgatgcagaatatggatttggctcaatgacatcaacaaaaggagatgtgtacagctttggaactttagtactcgagatggtgacgagaaaaagaccgacggacgacatgttcgggggcgagttgagcttgcataggtgggtgaagattcactaccatggaatggtggaaaaagttgtggactcttctttggtgagagctttaaaagatcaattgcctgaggtaatgaaaatgtgggaaatagcaattggagagttgattgagttaggcattgtatgcacacaagagtcaccctccactaggcctacaatgttggatgctgcacatgacttggataggcttaaaagatacctcaatggagatactaccacaacaacttttgcttcttctttggggatatcttcttccaccattagtgattagattactaacatctctttcttaaaaaaaaaaaattagtaaaaaaaatttgtggatattgcttttatgattatttctccattgaataataata

SEQ ID NO: 403787 - DNA, 1274 bp, Cannabis indica
atgtcccacaagaccagagcatcctcttagactaaaatgtggcacaagccaccatgtcattgccggtgatgcccatgaaattcaggattctagtaaccactgtcagtcactactcgactttcattacatcgggacctcccagaaagattggaggtgcctgcttgcggaacctttcatatagtggttccatatgattcactgcaacaactggtcctgcctgcacaataagggtaggaggtacctgtatttttggagtagggatcgcaggagcaccctgctgtctcaagcttctgatttcttcatcttactcattaattctagcttgcatttctgcaaacctatttgtccattcctgggcagcttgtggcgggttaacatcaccccgaccgcgtgctctgcctctagggcctctgcctcgaccacaaacatttgggggaatctgaactccctgaccgctactggatccgatcgaattactctaattcttggtgtttggcctggcatattactggaacagcctacgtaaccaagagctagtctggtcagattgcaatcaagaataacatactaattacggcttatttttcatatttaaaacatgcatctattcagcgatcaggctactaacatgcttcctataaggcttttcttaagtcatctattaaaataaactactaaagcaataaaggattactgaagtgtgagatgagttgatcgctgatgatgattgtacatgtcatgacgatctttgaaagacaacctcgtggctctgataccaaattgtaacaccctattagtttagaaatgttaatgtgattttttgtgcagctcgttactaatcaacgagtttattgaaaatcgtgattaattaaaattttacttaattaattataacactaaaataatatacttataataaactgggatcccgtttataaaagtaattacaaaagtttcacggtgcatatacaaaattttatcggttagcaactatacaaaataagccctgatgtcccaaaaaacgtacgctccagacctaactgttgggttttatgccctaaataaaactcattgcaatatattcagatttactgattaacatagatcagaaatgacatttaatgttgcatggttcacatgatttatttcatgattatatgtacataatgtatgaattcgtctgaaaccttttcacatacttgatctgtttattgtgctgtcaacacattggaaagtaaacatgactatgtgaataaagcttcctagatttatca

SEQ ID NO: 403788 - DNA, 846 bp, Cannabis indica
cttagggatgaagttatgttataaattgcatagcaatatgagattgaaaccagaagaaggatagcagaaatatattcaacatcgacatgctaccatacaatctctggcaatgatcattattatcaaagttacactcttgcatattcttctgtattagtatatatttgcatattctacctattaagtaacaaacaagagaatgatacttaacaagtttaaaaaatcttgtcctatttcttactttttatttatttatgtctctttattctatatttgtttatttattgggagttctatattatattattagaaaaaaaaattaaataattttaaaaattactctttaatttttttttaatttttttcttcacatgttaattttaatacttattttgattttttttctaaatcatgtatataatttttaatttttttaagaaaatttcatataatttttattttaatttttttattataatatttaaaatataattatttttatttaatagatatattttttaagaatatgaattagaaaaaaaaaattaatttagcacaattaaaaatttaaattttatatcatgtcaaaaaaaaattaaattttatataaaataaaagttttgaaatgggatgtattagaaatttttaaggtgtaaataaattttctcaatttattctgtctctttgttctaagtatttatttatgtaaaaaacaagtatgtagcttgcaatgtttatttttaaaaaaattcatttaaaatccataatattttttttttaatatttcttagcctaagtcccaacaattatttttactaaatattattataattaaaaaaaaaaatt

SEQ ID NO: 403789 - DNA, 930 bp, Cannabis indica
ttaaaatataataatatgtaatagtataagaattatataacttaatttaattattatatattctttttaaaaagtaatatgtagaaaatttatttttataatttttattagttaatttattatatttagtaatttcttaatttttttttaaaaaataaatatttactaacttaatttctaaatttaagactattttacatcttagttcaataaataatcttaatttataagcctatatattaacttattataaataaccacacaaaaatttaaaatggcagaaagaatttgggaaagagatttaatactcataattttgatgagtgttaatttagaactttttattatttggtagcattttaaatataaaaagtcaaatttcatttggaaattgagttgtgttgtgttgtccctctacaagcaagcattgatggttgatgatggtgcatggtggtgacaagattaggtgctttatattatatatatattattcttcctatatttgcgtattacccacgtcagaatcagacctaggatagaagaaaagaaaaaaatgccaaaattccttgcaccaacttgcacaaaatataacattaatgtataacatgggaaatgacaaactttattctaacttgatatataattgagatagtgtatatagttccatttttagttttttctggttgcatattgtaagtattatattatattatattgaaataatttaggaataacattgtacaaataataatgttatatatatagggacacgattttctcctgttagtgtactttcacagaatgtatttcgtgatgtacggtagccgttagatagggtagttatttgatctgagggttggggttgatctagaggtaattagagttaaaaaatggtaatgtaccctaacacccattattacgtactctgaa

SEQ ID NO: 403790 - DNA, 726 bp, Cannabis indica
tatgactataattttgttaataagaaaattttcaataatatttttctaatttccaatttttttttaaaaataggctgatccccagacgggggagcttcctagtgttgtggatacttttgtaaagttccactgcaaggacaacaaatggtgcgatgagcacacacaacaactgcatgtaagtatctttatatgtttaataaattagttttatattttaaatttctttcactctaacaatttcataaacttttttttccaggccaaaatggtttagattcgtgacactcaaccaacactagccaatgtcccgcgctagtacaatgtcaaccccacctaatttcctatagatatgcatgttatgacacaagtattgggtgagtggtcacgccacttaagaggagtgggccagtttccaagacttaggacgggggcaaaaagagaaactcccatgccaagtccattcgggcagcccactgtcactcaagaggagtatgaggcactgaagcgaagggtggaagagcaagaagcacggaatgagtggcaacaatagatgatgatcactcagaatcagatcatgagtgcgttccaacaataaatgatttaattggccagcgctgttctaggatttcacatgccggagatgcttccaattccaccgattccaccatttcagcctcctggccatgcagttggttcctcctcacagactgcccctcccggtgatga

SEQ ID NO: 403791 - DNA, 563 bp, Cannabis indica
ttaataaataatataaaaaacatctaaccacacacaacacacaatgagccacaagtgcctaaaagcaatgttgatatgactgcataatggctagtatatcaactttaaggaaaaacattttaggataagtctattgtgcaccactctaaaaggatattttggtatactaaatcgtgtatgttatagttatgttggtctacttgtaaatttttaaatttttttgaataatttaaaatgacaaaaataaaatttacatattttgttgcacacgcgactatttttcttatatgcgtggtaagtaactttttacaccttattttcgatactgtaaactattcaaatttataagtggccttaaataactatagcctatgcaatcatgaaaaaaatagactaaaaaattctcctaaatgccgaaacagataaaagatctaccaaaacgatcttttaaggggttcgactacataaatttctaacattttattttgattatcatttatcatattagtgccatttatttaggggattattttataaatatacaaaacttgacaaaattctta

SEQ ID NO: 403792 - DNA, 535 bp, Cannabis indica
tatatttaattaatttttgtaatattataatatactcataaaacttcataaaatttaatcataaatataatatttctaagtggttcatataagtttaaataattaggaagcaaccacacattcttaaattatataaaatatatggatcatataagtatttagacgttaatcttaatttaaagtgctaaataaattataaataaaattttaacatgcaaattagttaaaaaattagcacattaagtttcataaaatattcataatattttagattgaattaaatttatgaataatacataataattttgtggttgaacataaaaaaaatatgaaactgagacaaatgctcaaatctatgacgatttttaaggatcttcgaacaaccacactaggagcactactctatgtaatttctttgcgctataacaaaattattcttaggtgttatacccaaaattcaattatatacacgaggctgacaagtgtcctacagaaggaatgtgaatcaactttgataatataataatgatgtatc

SEQ ID NO: 403793 - DNA, 516 bp, Cannabis indica
cttaattccagggtattacacttggttatctttgctgcaaaggataaatcatggtgctatagccaaacgtcttcaactaacttcctacacattggctcgtggagctaggcattttcaaatttgaagcttctgtttgattatattttaccaggatctatatttactaccatatatgttatttaacatgctaaatatgaatttttaaaaaaatgtaatttaattacatataaagtttgagaaagcttacagtggttccagtagaattaaatgactccttccgcttagatctctaacccttgtatcctttctctagtagagtattaccaagatctgagcccgattctccttgtcttgaatttggattcttcacactataattgagtaccacttgatgtgtgtgggaactcactcttttcactttagggcttcggttttgaagagggaaagagagacagaaggtttcgaatagggagagtgaaggtggctcaaaattttactgaaggaaagtgtttgcat

SEQ ID NO: 403794 - DNA, 640 bp, Cannabis indica
caagataaagggaatgtgaatcgttgccatacctttttatggaataactcattaattgtgtaagtactagagtatatttgtaacccgctgactgtaaagtcttaggcgaggaatcaatgtacgaactggtacttagagtattaacgagaaaccatatgtcactaagggataatagggaggcaccagagaagagtaacacatacctcagcttgcaataagaagacagtataaaagtcaaactggctcaaaatacaagaatgcaagacggccatctcgctacgaggaaacttcctatagtttcatccaactaacagaagcgagactcacaaccctggaaagtctacagatttccttatatccgcgatcgacgcaagacacaccttgtcgatctaggaaagaagagtggttccaactcgccattgggatcactacaatcaagtttcaatcgagacatctccaaaatcaatcattaaagacgtgtttaatacacgataattctgacctagtaaaagcaagaaaatcacagtggtatgactttcaaaatcatgcaccgtgtttacatttagtaatatgtaatcagatcccatgatttaagggacaataactataattacattttggtcagtcttgtaattaactg

SEQ ID NO: 403795 - DNA, 573 bp, Cannabis indica
aaggtaaaaattaaataatcaatttcaaattcttaaaagaaaagcttagatagattagagcaaaaaggaagagccattagattctcttttaaaagactacctataagtttatcaaattaaataaaattagttaaaaaattttaaataaatatgatcacattaatattattaattaagaaaattacccataataaaatatgaatatcattaatattaataattaatactatagttgacaaaaaactaattaaaaccaaaatattaaataaacatatataattgtttccatgcataaaatgaaattaaataatattattattaaaacaaaattaaaataaaaataaaataaaataagttaaaaacttttaaataaatagccgacttttttttccttggagaaacctaatagcccttatacaatgaaatagagaaagtgaaaagttgacaaataaaaccattaagttaaaacatagaaaacacaaatttaagacaatataaatgaaaatatataaataaaaatatatcataagaaatcaatgatgattgaaaaccataaatcacatctaatattaa

SEQ ID NO: 403796 - DNA, 605 bp, Cannabis indica
ttgtgcttggatcttttgagtttgttttaggttaggtttggacagaatttaaaggattttacttgtgtttttattctgttattgagctctaaaatttgttgtttgaggcttgagttcttggcttgagtatgtaagaatttaaggtaggattttgtggaatttagctctatgatggagcttaatctttgtgttatttaatttgagttttgagagttttattgatggatttgatgcatgaaatttgtattttaactctctatataattattggaaaatctatttggtggttttaagttttggttaagatttgggttgatttgaaggtgattttagggctgaaattcgaagtttttgttggtttttctgggtttggaacccaggggtcgcggcccgcccttttctttctgaccagatccaaatgcaaaattcgaatagcaataactttgtgatccagactctgttttgggaaatctatataccgttggaaatcttgtttcgagctctatgtgaatatttgtgttttgaatgccaagtatatattttataaatgtggaattaaggattaattctatatgtgtaaatcccagaatttgtgactaggatta

SEQ ID NO: 403797 - DNA, 577 bp, Cannabis indica
ttttgctaaatgatttttggtgacctttgctcggtgtttggcaaacattactcctcgttatattagaaggttagtatgcttatagtatatgttttataatagtaaaatatagtttacttgaaaatacatattaatggagtttgaatatcttatatattcatccatagtgaagtaggttctgtgaaaaatatactgtggtcgggatggggtggcgaaaaattaatatgtatgtaaattattttggtattgtgtttgttatttttgtgtaggttttataaatttgggaatgatcaattgtaaagtgttatgctgtcgaattttcggtagcataacattttcaatttgataatagattttatttaaaatataattagaacatcactaatatcatagatatgataataagttaaatttaatatgcatgtaaactactttggtatggtgtttgtgatttttgtataggcgttataaatttgggaatgctcaattgtaaagtattatgctgtcgaattttcggtagcataacattttcaatttgataataggttatatttaaaaaataattagaacatcacta

SEQ ID NO: 403798 - DNA, 406 bp, Cannabis indica
agtctctatttactccttggtcacaaccatagaggtttttgtcatccctccagctatattcatagcagaagaggccttctttgtctccttgactatggaagaggtcttccttatcctcttggctgctagcacagcgaaggaggtcttcttcatctctttggttgtattaatagtagggaaggtcttcttggcaaatgtcaatgatgtgttataatattcgcgtgttgctctttagttgtcaaagagatgatcgataccaattgctatcgggaacttaacagataagtagtagatagatgagattgtttggaggtcatagagtgttgacattcttattattacattgtaaggatatttggtgtcatctactatgaaggtagtgttggatattattttaccaggatct

SEQ ID NO: 403799 - DNA, 836 bp, Cannabis indica
tgtgtttcaaactagtggagattttattagttgaaaatcacagctccaatccgtagtagcactttcaactacagaggtagaattcatggcaagcacagaggcattcaaagaagcaatatggctacacgaaattctgaaggagttgaaacttctagttggaaaggtaagggtatatcctgacagtcgatcctcgatttatttgtgcaagaatctagtttattacgagaagacaaaatacattgatattcaattattttggataagggagaagatagaagaagacgtaatcaagttggagaaagtgaagtcagaaaagaaccctgctgatattggcactaaggtgttacctgttaataagttcaagcatttcttggacttactcaaccttagttgctaagtagctacacatgaaaatactaccacctctattggacatatatacttagcttgttgggacttgaagaaataaggtgaaatttgtaatattattccttaaaatccaaccaacattcggttagttagttattcatcaactaatttaactttcaaatatgacaacaagtatcttaggtcctttgatctatataaagaggattacttatctcatttcacaagagaatatgaggaagaacaagaaagatacaacacagtagagagagaagttagagtgagaaattgagagagatgtttgagagagagaaagagctgggattgagaattgtattgaacaatgttgtcgattatgttggctcgggttagtgagttaataagtgttgagagattacaccatgaatgacttactatgattattttcttgtagctcctgaaattgatat

SEQ ID NO: 403800 - DNA, 452 bp, Cannabis indica
aatacattattaaataatatttcaaatataaatatttaaattttttcaaacaaaaaaatttgtaaatctttaaaaataaaataacattcaaaatcttaaaaaaactaaaaatcttaaaatgaaactagcaatacgtggctcggcacgtacattcacctagtagataataaaaaggggaattacctcatatactgttttttaacttttttttttctaaatttacggtttgaatttctaaagtggttgcagcgctagttgcaataggggaatctatacgattttttattgcaatttaggttacagcgctagttgcaataggagtttctatgtaaaatttcgtaaaaatacaaaaaaaactattttaaagtgtaaaaataaaaaaacctcaaatatatatatttaaaaaaagaacttcttaatcggattggtaaagttaattcaagttaactgtg

SEQ ID NO: 403801 - DNA, 559 bp, Cannabis indica
gtcttcatcttagacactaatctaaagaaattttatttatgcaagacaccaatctcaagaaatttttaatagacaccaacccacaaaaagagatagagagaaaaataaaaaacatatgtaaagccttggaattaatggagatcacgtggatgggtatttaacttttttaaatttaagtaaaaaaaaaattgtcaaaaaagtgatataagtcatcaatcagctaaacacatatataagtttttaaaaataggaccacatgctccacttaaaatttaaatttaagaaaaaaaataaaaaacaatcaaaaaattaaataaaaaacctgacatgaaagtgacataaaagtcatcaatcagtaaattaaataggtttgaataaaattaaaaaaaaaataatatacacagtaaaaatataataattattgtgaaacagtaaaaaaaagtaataaaatggaaaaaatcaatagggtgtaaatttctcttaataaattaagtaaagtgaattaatatatatatatgtgaaaaatttaatgtatatatttgagttagtaaagtctctc

SEQ ID NO: 403802 - DNA, 759 bp, Cannabis indica
ataggagcaatgctcacaatcataaagagttactttagtaatgttgctaaaaaaatcattcccaacccaatttggaaatattttgccaggatagtagataatctcgagctctttcaatgttttgttaggtgaaagcatttcaagcacaccctctccatgttttggatcaacaacatcctcattaacactccattccaacgtcaatttctcaagttgattcttttcttgtacatttacttgaaccggtgcttttgcaatattgaccacattttctaacttcttaatggaaagctttccgtgtagactatgaagtttttccaactcttctattttagccccactacccttccccacaacaaaagttgtcaatgtttggagattcgtcagtttacttatttgacatggcatctcaactaggctatttccactaataataagatgtctcaaattaatgagacgatgcatatctttgggtaaagcttcaagtcggtgacaattttctaatttcagtatttgtaaattgtataatacagttacagattcaggcagtgtcacaatctcggtgaaagaaacatctaaatagcgaagatgtttcagctcaccaattgaattagataaccaatccatatgatgaagatcacgaaaagataggactctcaaacatttcaacatcgatagcagattctgcactacttcgttagaaaaaattatttcagatgaacttgaacctaataatgttaaaaaggttcgcaaacgtgt

SEQ ID NO: 403803 - DNA, 1177 bp, Cannabis indica
gtgatagcacacagttgcgagatcaaattaaaaaatgtgaaaataaaaaatattgcctaggacaatgatcctattttcactgcacacacttatgtttgacaagtgtgtacaagttattctcttttgaaagcataacatgtatatttgtcatttgttatgaattttgattagttgcttgctttagaataccttatatttattgaggatttttttttaatttatttaaaattttcaaaaataaaaataaaaaaataaataaataaaagagagggaggcattggtgacttgaattgtgggctaagaaaattctgtgtcttgtttggtaagtgtcaatatttattctacattgatttcttttaataaattatcttttaaagtttgatatcatattcatagtattttgtccttgattttgaaggattttcttaaatggcctatttttagaaagtatcttggttattttagtttccttttatttttattttttttaaaataattttggaaaaagagtggggcggttttcttcggtgttcgtgggctggtagttactcaatttttgaaattggtttcctttagtgttcaactctcccgtgtttatttaaaccaatttttacttgtcatttattctcaccacctacccgatccctatttccttgtgttcttgttctttgtttttcattcttctttcagaaattcttggctaagactaagaacctagggcagccaagcaagatggtagaatccgatcaagctccctcgaatgctcctcctgctgctccaatcgtgttgcctgctgccacaactgcatcaaacccatgagattcatcgcttcctcagcgtgaatctcagcctgtgaagcccaagcctaaatgaattcccaagcaagttgcaaggaaatctgtgcatccccaaaatatttgcacttcatcatcttcttcgtcgaaggggtctctacctcttccaactacatctcctcctgctgcttcaagtaagggagttgctccctcaactccaacaggtccttccactagcactcgtgcccagcaggcgtctctcgagaaggaacttcgctctaaacgaagccatgacaaacccattcattctgccaagaagctgaaaatgaatcccccttcggcttcttcgagttctgaagaagaagaacctatggaggtctcct

SEQ ID NO: 403804 - DNA, 866 bp, Cannabis indica
agtcgtggtcagcgagaggggagagagaggttcgggatgaggcagtcatggatggatgatttgagtttttgattttttccaaatgggaggggtatttgtgggatattaggaatgtagtcatatatgactaatattattaagtatgtatttagggaaaaaaaattaagattttctaagtatagaaaatcaaatttccctagcctaccacataaaacaataagaatgaacatgtaaatatgggttttgcataattatacatatttttattttgaaaagggagagagtctaagaaatgagaaattgaggaagtgccgaagtggtagatggcaattgactaggtagatgcacacgtggaagatgggaaaccagcaattgcttaatactacaaaacttgttaccaaaggtacaaaataaacgacgttacttaacattaatgtacgccctataattttactttactaaatttttaattatatttaggttgattgtttacaaaatatatatatatatttagttgattcttttaattttcaactattatttaattgatactaataaattaaaattatcttatatatgtcctttaggaaaaatattttttaatatgaataaagctaatgtagttttttttttttttttttttttagttattttcaaaatacagttaaccaacaacattttatctcaaaaaaaaaacatcattttattcaaatttaacatttaatttaacaaactattcaaagtgcattcattctagcattttgctttcctttgaggtgttgcataattttaaaaggaaacaaaagggtgtaatggttttatggcattaaattaagagcattttacaattttgtatacattatttt

SEQ ID NO: 403805 - DNA, 922 bp, Cannabis indica
tcgtgactcgtggtatatgtgaaatcttgtgaataagaagaacatatgaagaactgaaggcatcacctatgaaattgtattgtgataacaaggctaccatctcgattgctcacaatcaacttcttcatgactgtacaaaacatgtgaaagtggataaacattttatcaaggagaagataaaagatggagtggttggtatcacttatgttcctatggaaaaacaagtagtagaaatcttcataaaagaattgttcaaaaagcaatttgatttctattggtagaaaactaatttaggaagctccctattttagaatgattcttgtaaagttgtaagatagctttaaaaactactattctcaggtttaggttcttgggaatggaaatgaaaaccaagcctatgtttggtatgattttagttgagaatttatgtttgtaagggtctcgtatttaaattaattttgggataatctaaaaatcttaaaatacttgagtttgagatccttttaatctcgatgcctcaactaaaacccaccaagtaaaattcttataccaaacacttaagtggcatttggttggaggtaatgaaatgaaatggaatacaaaggaaatgggaattaatggtaaggtaatcatttctttacacttgtttacttatattattaaaattaggaaaaggagaacttgattaaataagggagaaaagaaagggagaacgtctcccaccaattttataaggaatgccattaagggtaatggattttaattatttttattttattttttaatattaaatatataatgacaattttatcatttaaaatatatcttaaaaaataactaccatataatagtatagtttgactcaaaaaagcactttagtcaatttaagcattctgattacgtttcctaataaagtaaacaa

SEQ ID NO: 403806 - DNA, 814 bp, Cannabis indica
ggcagtaaataaaacatagtgtatgcattttcatcacttatcaaaaaatggaaaaaaaaaaatcaaagaaaagctcaaacctctttttctctcttccttttctctctttcggccttgagcaggctaggggttgggggggggggggaagttcttgtgtgttttctagctgattgtatcaagattcttgtgttttcaactcttggtaagtctcttttgcctttgttcttggtttcttggattttaaggaagtgaattttgcatgttttaagttgtacttgctgtggttgttgtagctatttattgttgaattcagaggtttgtttatgagttttcatgttgatttatgcttactttagtggctgttatgttgttggagcatgttttggagttttgaactcaaaacttggctcattagtgtggatttagtttctgtgcatgttgtttgagtttgggaatgttttctgcagctattttatgcttgattgagtagtttaaacttaggtttggatgcatgttagtggtgtttaaccaagtttgagtttggaactcaaagcttggagctttaatggtgatttttgattttatgcatgaagcttggttttcttgctttgaaaatatttattgggatatttagaacaggtctggaaggttcggtatgaattgtgtttgatttgagtgagttatggaattttgtgtgtttcctgcgaggaaccggaattccggatggtgttctaggattcccagaagcggaattccggttgcagaaccggtctgccagttgggggatttttgggaaccctagtttttccccttt

SEQ ID NO: 403807 - DNA, 527 bp, Cannabis indica
tccgtgaggtatcctaaccaggggacgcagactgatgaagatcctgaacgatgcaatcctcacagtcgaccatcaagagacaatgacgtagaatcagcctcttcgtcatcgcatggtcgtacaccaagtagatatacaaggtccggttctctagaaatgtagcaggggggacgctatcaggtacatcgaggtgatctgtgtgatcacctcaatgtagtttttagagcgcgttctcgcgcccctcataacgaggaaacactccgtgatccccatgtggacgatcagggtgtcaacgctcacaataacccacctaccgcaccgattgcgactactgggatcaccgtcccagcgaacctcgccccagtagttgcgactcccgcagtcgcagcggtcccgactcctgcgactggagggattgatcaaagcatgcttctgcaagctttgaaaatgctcgagcagcaacgaaagcccatatacaagttgcatgggacctcacccttcactacggaagtgcgacaagcccaact

SEQ ID NO: 403808 - DNA, 710 bp, Cannabis indica
ccaaaataactaactcaatccacatttttgttgattggatcaaaaatattaaatctacacttagtacgaatttgatgaattgtaaacaaaatagtatggattaaattggacttaatgcctctaaacgatgtattacaaaatacacatttaaataattggtaacataatttgaagaaagaaaaaaaatataataaacaacagttattaatgtttatctttgcataacaatacatcaaatgactctgtggcccaatggataaggcgctggtctacggaaccagagattctgggttcgatccccagcagagtcgtatgccatttatctattatatttttaacttttgaaaataatagtaataagaaaaataaaactaaataaattcacaataaaactcaaagtattaatcttgtttttggttcttttcctaatttgtttcattttttaaagggaaatttacactctttactaactttttcatttttatttcaattatactgttgtacggtaatcttaacgtttttactttttttttgactgattgggacatgggctcaagttatttatttatttttttattttaatggatgtaaaaattattatttattatttttaatatttaataattattattttttgagataatttaataattattattttgattaaaaagttgatgggatgtgtcataaaagtgacatgttttactttt

SEQ ID NO: 403809 - DNA, 506 bp, Cannabis indica
aatgtttttttttactaattttgaaagtattattattttttttgtaaataagggtctaaaaatattttttttttctatgatccattatatttcaaggcggatctgagagacaaccatcggaggaactttcatcctaattttttttttttttttttttgttaaaatataaaatcgtatatatcaatattccttacatattatgccaaacctcaaaaacaaaataaatttatattccttacctttttctagaaatcttctcgcataaaaacgatatgttatccccttcaaaaataaaaataaaaataaaaaaagtgatgttgttcatcttcaatttattcgtattattttgatgttgtattaagttatattatattaaattttgtaatttttttatatagtaatatatggaggagttttcaatggttacatttttatagtaaccatcatggttatattttttaagccattgaattactattaaatggttgtgattaatttggaaatta

SEQ ID NO: 403810 - DNA, 1082 bp, Cannabis indica
aacatctattagggatgaatctcattaaaataagaactatgtagaaccaacaacagagatcaaatgtccttatatttaaagctcattatttaaaataatgtattgttatctaactatttattttaatctatatattttaataataaaattacttaatttaagttggtttaaaaaattaattaaaaaaattaattttcgactttaaattaattttcaaggttaattttgaaaaatctatatatgtaaaatattatatatatatatataatttcaaaataaataaaatataataaaataaatacttgaaaatatttattttaagttgttccaaaataatttaattttcaacttaaataatttttaaaaatttaattaaataataaattaagtgtcttgaactaatcaccttaaaaaatattcaattttaagttgatctaaaattaacaattttttcaacttaaaaatatttttaaagaatatttgaataactaatttcctagaaaaatctacttaattagtaatttcaaaaaaaatattttaatttcagttgatccaaaattaatttgaaaagttaattttcaacttaaatatattttctaagaaaattcaaataattaagtatctagaaaatatctaattagttataacttcttcatttaattaaatatcagaaaaatacatatagtttatcttgaattaatttcattaaactaagtgtatttttttaaattaattttaaaataatctaatgaaaaaaaaaaatcgtatattttgaaaattaaatatgttgctagtcaatttcaattaggttaaactagtataattaacctattacaattatttaaataaagtaaatgggccttcacagtagggttgtacaaaaaaatttataaaccgcccaaactgaaccgaaaaaaacgataaaaattacaaaccgaaataacccgaaaaaattaacaacctcccaatctgttaattgggcgggttaaaaatagttccaacccgcccaattaaaccgaccaacccgattttgcaccttaatttttttttaacttttagtttttattatatataacataaat

SEQ ID NO: 403811 - DNA, 467 bp, Cannabis indica
gacaccatagatttcttgttgcttttccttcgtcgttgtcaatccacttagtaccatcgatcaacgctgacccccagctctcaactttcatgtaagttttctggacactttgtgcctattaccgtttgtttgcatgttaggatagaacttcttggttgagtgctggatttctgggaagtaactttgactgaatctattgtgtgatgcatagaatcttctttatttgtgtctttgttattttcctcccttcttctttagaatcaacccctctgtcgaaagactgtttagggcatggggtgatttttgttcctacattctgcgtttttcgcttttcttctgctttcgctgcctttgggatttttgcactcgatgtttgctaaggaaaatcctttgagtttccatttttggcaaacatccggagggggcctctttccagcggttaggggacccccattcccttttttaac

SEQ ID NO: 403812 - DNA, 950 bp, Cannabis indica
tattcttgtgcatctccatcagaaagatagttcaagtcaagttgtccttaacaaaacacatgtcagcatgaaattcaaaaaaaacaattattatcatgggcaaactttgagacactgattagattttttgtgatttctggcacatgtaacaaattgtgaagaacaagatgctgtatagaatttttggaaaaaaaagaaagattgaccaatatgctttatagaaaaacctgagctgtaatatcccggaaaataaataatatttaaatagacatattttattaaatatgtaattattttggtaacgaagtaagattatgatcttgcttagggtaattattgagaatttactcaatgaaataaatagcgtaatttattaattacggagattatattgggatatgtgagtaccgaggatatcaatttcgaaaataaaatatttttttgggcccggcaattgtggaaatttagcgatgtggtcagaaatgtcacgacgttaatggaagaattattttgggaatattccggaataggttagaaattttagaatgtcgttttaatggaattagcaaaattacaaaaatgcccttaggttattttggagattatttagctttgagggtaatttaattattatttaaataattaatcttttattcttttttttattttatttaggggctgtgatatttttaaaaaaaaaaataaatagaaagaaagaaaaagaagagaaattttgttatttaagttacttggaggctaagtaacttctccatcttcaacttctctccttctctctctcgtgcaagcttgagccagccattaggggacttcttttcttcagcaaacctaccatttcaaagctgaactcaacccccaagccaacctagaaccttgaggtaagttcctcctcatgttttggtgaattcctaggtttctaaagctaggttttt

SEQ ID NO: 403813 - DNA, 532 bp, Cannabis indica
atgacacatactaaggaatatgaatgagggttaatctctttcccatcttcatcaacctttgttaatgcaagcctaacactataaaaaaaaattattttcagtgacaactttttagccacaatataaattttttataactaaatgtaacttttagccacaacaaaaaatcatttgtggctaaaacataatatttagaaataaattgtcactaatttagttttagtcacaacaaatattgtgagtatattgtgagtaaaaatatatttagtcacaacaaattgtgatctttataactaatacctttagccatagaccttttagtcacaacatagaaataattatttataatttgaaaaattaaatttttgtaaatgtcaataataaatacgaaaatataaaattgtatacggctgtagaagcagaatgtaattctgttactgcagaaacctgttttgcaatgacaaaacagaacagacataatataaaataattgcagaaaattaaatcacttgacacaagagatttgtacgtg

SEQ ID NO: 403814 - DNA, 827 bp, Cannabis indica
  modified_base (106)..(106): a, c, t, g, unknown or other
aaaaataaaacaaaaaccataactacatccatctttttaacagcaattatactaataaatctcatatagttatttttagaacaaaaaaaaaaaaaaaaaaaaattntaaagggtaacacgttaggttagttattttttaagttttgtctttagtttttatttcgactttttttttttttctttcggggaaaagtatatatattattttatttgtagatggtcaatttgccatttaatataatttattttttggtatttattttgtggtggtttttaagtgttacaagttaaaaagctctagctcttctatattatttcagaaacaattttcttccatgtaactctcttatttttgtagctcataatttatcaaaacatgtcctttaattaaataacaagttattctggtttaaaaaaaattcctacgcgaattataaatgtcaacgtaaaatctttagtaattttaatcattataatatatatatatatataaatagttatttctaaaattaaatagcaataaataaaaaaagttggtggtagtggtgacaaatgtcatttgtttattgaatttgaacgaagtagatctaaacaaacatactattgttattgtattattggtgctcaatacccattatattttatagatggtggcttatgattagttattgatgttgtttaaatatgattttattaagttatatgagatctaatattttattatacgaataacaatataacaccaaagaaaatagaaaaatttacaaaaatattaaaatttgggttaatttttataaaaatactgtcacagagaattatttctaaaa

SEQ ID NO: 403815 - DNA, 512 bp, Cannabis indica
aagaaagaaaagaaaagaaaagctaacaatgttttaactaaaactaaaattgagaaaaaagtagaattacatagagaacaattgtgtatttgtactatacgtaaaggttaactttgtattgatttattattataaaaattaagagcattttaacatattattatttgctcaaaatcatgtttaaaggttcatttaatatattttgcaagacaaataatctattttatcatttcgtagagcaaaattaagagtcaaatcaatatatataaataaaggaaagcacaaaagatcttaggtggcatcttataattctctctttctatttttctaattttgtgaggctttcttatggttggtgaagaattgtttgtttaaatatttttactacattaatagtgaaacttattcttcaattaattaaagataaattgtattcttttgtatatttatgagactttttattatcacaaaacttttcaactttctttcacaaaaaaaaagaaaaaaaaaaa

SEQ ID NO: 403816 - DNA, 653 bp, Cannabis indica
ttgcattttacgaaaattgataaaacactagtttttttttagatagatgatatataaagcatatataattttttttatattttgtagaaacccaactgatttgggacacctttatagaagatgaataaagaataagtgctaaaatttgatgttgtagagtaaaatttaggccaccaaatttacttactgcaatcaatcatgcattgcagatccaactaactaacccctataaatagtctgatcattatcttagtacttctctggtggctgctgggttggtttgggaagagatggcatgggaccaatccaaagacaatgtgtagttaggtatcaacatcacattcacaaccattaatcctagggaccatagggggatatggtatgttgtatgtggactaaactgtaccaaaccacccaagattccacaacaaactcttgacctgtggttcattgaagctccaaccatttcatttcatctaaaagtgtttacactattatcttactagttgtggcccaatcccatcaatccctaccttttaggtaagtttttccaggtataaagcatcatgctctttttcattaaatatattggctaataatttttcccccgaaattttcacatataccaaatcatgccctctgaatttttttgg

SEQ ID NO: 403817 - DNA, 598 bp, Cannabis indica
tatatgtgaacgaggaaatatatcataatacatgagtttcaatcctaatttaattttgcattggtaattggacttctatgcactattcaaaaagaatttagtgttcgcacagaaatgagcgaggagatcgagactgatactttatatttataggtgagatattttattagtatttacgccacattaattgtcagaatattttagcgaggagatcgagactgatactttatatttataagtgagatattttattagtatttacgccacattaattgtcaaaatattttaataattaattcagaaaatgaaatcaagaaatgaatgattctgtaaatcaaagactgactatattcaaaatgtccaaacttattacatattaatttgtgatcaaatacagtcagcagcgagataatgcaaaattaatttgaatgattttgtactattattagaaatattctaatattttcccacttgatcaatatttagatttaccacttaaactcaatgttagcaataggtcctcattatatgatgagtatcatcttctatgtattacgatataatcattatataacaatatactttatgtggcaatgta

SEQ ID NO: 403818 - DNA, 1277 bp, Cannabis indica
atactaatggaaaaaaaaaataaaaatatattagaaaataaaaatttttatattaacatattttatttttatatatattatatttgtgattataatgaactagattaaatattatcattatataatagaattttacaatcctagcactttaaattattatttaccaaacattcagatcaattttttctacagttctgcacaactgcttttccttacagcacagctacagctgctttttcccacaacataattgtgtcaaactggcccttaaatataataatttgtatggaatatcgttaatcaatcgcaaagcactacttttaggtagtactaagtaacactggtacagaataacaatcctctaatgaatattataagagaaatttgagtttccatacttaattgaggcgtgtggcccaaagttatctcctcaaaaagggaaatttgcggcaaaagtccctaaaaagttcaatttgatgtaaataagtctccaacgtttaaaaatagcgacaataatcctcaaggtgacatttttcgtaagtccgttagtccttttttttaaactgagtcgttactcattgaaaaatgccagatgttaaaattttattggtccaaattatactttaattaaaataattttaaaatacaaaatatattatttaaaaatcataaaaaaaaactaattttttgatctttttttttctttttctttttttctttccctttttcttcttcaccttctgaactgtagaatcgagccgacccgaattcttttccccaagatgaaaaccccaaaccgagacttcggtacaagtagaatgatagttgagagggtttggtcgtaaaaaactcattttttaatataagtttatttactgtttaacatgctagtgatatgattaaacaaggtataaaaatttgatttggttatttagacacaaggaaaatatcctctaaagataaacctactgttaatgttgtgaacagtagtgttctcttgagctttagttgtattagtgatgtaatattgttgtttgatttaatgagaattcatctacttttaccaaacaaaaaatgtctttattattagagtaaatgctattttggaccttgtattttgcaaaatttactaattggactctctgttttgttaaatggcaaaatggaccatgtaatttccaaactagtaaaaataggaccatgagcttaatttttgacaattttattttttttaaataaaaccaacttgaagataattcataatagaacaaatacag

SEQ ID NO: 403819 - DNA, 640 bp, Cannabis indica
agggggaaacttatctaagaattcatattcagagatatcattgtaagagctctaagaaaagggatcattacattccttgttcttaagtcaatacaaagcaagaggattagactattaccggattgctcggggctgaacctctataaaattcttgtatctttatttactttattatattacatataccttatactacttttcgcttacaatctagactcattgttgttggccaaaagcgaggtcaacacctttccagggcaaagtaagcttgggtgggatgtatggagtatgcatcagaagggaccgatattgaacttggactagacatgataaatttaccgtaatatctattcaattcaatatcacctagttgatcctagatcaaatgatcttaatcctaacaaaattaggttcgatctcaagagatgtgttctttgatttgttagttaagcctaccttttggtcacggtgatacatacattttggagacatgatagtacaattgagtgggagcgctaatcatagatatgtaatctaaagcttctatccagacatagaatacgaaacgatgatttccttcgagcttggctaaatagagataaatgatagagcactcattttagtgattatattagttaac

SEQ ID NO: 403820 - DNA, 728 bp, Cannabis indica
aacaatgagcaaacacaattaagaattgcttcgtcatccttatcatcatctgaatcccacatgcatgggaaatcattaacacaacaaagttctctaacttgttgcccagtgaagcattgtcccgtctgtccatgtagacatgcagcagaaaaggcttctatgaaagaatcatatcgacatattttgattgtggaatctgaattagggtttttcttcgtagcatcttcgtagctactataaataccttcgttcgggccattgaaaacaacccagtgaggaccaaaactcatatttgatatattgtaatgatatgaataactaaattacaagttaatttgctatataaaattgatgatggattgcaacacctctcaagtgtgttatataatgtcccaaggataagttatagtacgtttttaacttagctgtactccattggccacatctgatgtgtcaaaaaaaatggtgataaaatctatgaattccaaatttaatacacgtgtacatgtagagggttttcttcaatactactgcggtatttttgtaaagtacaagaattgttgaattcattaaaagatgttggtataggcccattaatataagcccaatggatttaaatgggaccaactacccatactactcaaaaatctaagtactttaaactcattaattaaatttccttattttcttgacttattttttttcaaaaacaaaaagtacaatgtttc

SEQ ID NO: 403821 - DNA, 653 bp, Cannabis indica
gggaaaagaaatcttcatccccaactcaagttctaaattcagcatggactacacttgaccactggcgttctgctcaagataaatctagtttattatcattgtctctcttacaacatgataataacattgagcgttggaccaaatccgattcagatacagtcaagttaaatgttgatggagctttgcttgagaaggaaaatgcatacggctttggtattgtggctcgtgattcgctgggtcgccttgttaatctaaaagctaaatatcatgggggcaattatccagcggaggtggttgaagctcttggtatcaaggaagcacttagctggttaaaagacaaggaatggaatcaagttgaaatagagactaatagcatgataacggtccaaacaatctttagtaatcaacacatgacttctgcttttggtttgattgttaatgagttgtaaaagtttattatcagttttaaataatgtaaatgttcgttttattagacgatcagcaaaccaagttactcactttgttgctaggcgctctcgatttttctctgattgtagcattcataggaatgattttcctaatgagcttcatgctctcttgtatgatgaatgctaaatttcaatcaagttgatattttatttttttaaaaaaaa

SEQ ID NO: 403822 - DNA, 489 bp, Cannabis indica
attttgtttattttattttagtttgtgttttcacattttaaattgttaaataattaattttacactaaattttacttgcaatcccaataacagaatcttactgatcatataggtaataatcttactcatatagttacattacctacttttgtgattatatatattaattttcataccaatagttcctcactcgaatatggatgaagcataaagaaacattacaaaatactgctactttattagtaacaaatttttagtaataatataatttttttgtgacttaatgtgatttttagtcacaataaaatattacttgtgactaaaacatagtatttagttacaagttgtcactaatttagttttagtcacaacaagtattatgactaaaaatacatttagtcacaacaagttgtaatttttgggactaatacttttagtcacggaccttctagtcacaacatagaaaaaataatttataattagtcacaa

SEQ ID NO: 403823 - DNA, 1057 bp, Cannabis indica
ttattatttaaaaaaagattgtttaattttttggtttaattattgggtttatttatttgttaacgtttaacgttaacagtctgttaagttaatcgtgtaaggctaaaataaaataagaatcgttaaaccaagaatcgttaaaccaagaattgccgttagatagacacttttaatatataaagataaagatatccgatcttatcaaatataaatgtgtccaacataataataatattcaaaatctcaaccaatactaatttttggttagaatttaccagtttcagataactatgttttgtttttctttcatttttatattagttataacattaatcttagaatataattgttaattttgtaaactataaaatcaaccgtcacttaatgataatatctcacctagaaacctcaaaagtttggcttctcaattctcataatatatagtaatatatcttacttaaatagtgttcaacttccttttcaagaaaataaaaatagtgttctacttaaaaaaatctataagagtgttcttggtttagttcgaatttttattttttttaaactaaataaaaaatatgtaaatcaaatcagacacgtcgccgccatgactgtttggaggtaatttctttctcactcactcactctttctccttttttttttttttttaattttaatcgtttatatattatacaatgcataacttgggatacgaacacaggacctccaacacacacgcaccctcctatggccacttgagctaacctcaagtggtactctttctcctttgatgtctctctctttcacctacggtctctctctttctcctccaacctccctctctctctttctcatctaggctctctctctcactctctgaattttttttgcatgtggtataggcatgcggtggtggttcgattcgatgggttgttgtggtggttcgatggggtgtggtggcagtatttgttgttgctgatgggttgttgtggtggtccgatggggtgtggtggtggtggcggttcataattttttatttttttgcttcggttcataacc

SEQ ID NO: 403824 - DNA, 634 bp, Cannabis indica
tattatttatataatataaaaatcatatacagttaatcatcatattttttttattttcattaaaacttaaaaataaaatcaataattaaaacaaaaaaatatccatctcttctttaatatcgattaaatcatagcataccacacttatgattcatcaggcattgcttcacagctcattcgattggtagtgaccaattcttcattaattgtgatatatatcaagtatatatctcctccacttattaggatagtatttatttaaatgcccaattgttattcataaaagtattatatatcatcaaaatataacaaattcattaagaatttaataataaaaaaaaaaaaaaagaagtaaagcaaatctaaaacattagatagtattaagattaatacattaaattcatctaattttttttatttctctaattcatctatttctatgtaggtctaagaattaaattcaagcgaaatagatgaatagtttgtttatgtgtatgaagttatttatgtgtaccttccaccaacgttagaatacaaggtttatgtgcgtttttttttaaatggaagaatttaattcaattaaaatcgtattcaactgaggtacattttcacatttagtatatcatatatttat

SEQ ID NO: 403825 - DNA, 694 bp, Cannabis indica
gttttttttttaattttttacattaatttaatagaatattccaattaattaacaaattattttttttattaatttaataatattattatatatatttaaattaaaaaaaaataatgtaaatatattttatattaaaaaaaattattttattatatatattaaaaaataaaaatcacatctatgtataataacttttatataaaaaagatatatatttaatagtttatacattttattataatcactctcctaactacaaatttagaatatatttatcaatatcattatttttttaaatatatatttgaacgtaaaatataaaatatattttaaaagtaattaattctccaatcaaactcaaattttttcaaattttttcgaatataatcattatatgtagagatatcaatacaaaatacgtataacaataaaattcattcttttattcttttattgtacataaaaaatatatatataattacatctaaagagcacatcaattaaccgcaatagttaagaaaaattctcaaagattaaaaatctcaaaacctatttcaaaaattaaaaaataaaaatacattacctaataaaaaaaaaattgaacatatatgtattgcactcatagccgacccaaaggctgtataaaccagatcaattgcaaagggcccactgaatttttgctttttttttttag

SEQ ID NO: 403826 - DNA, 685 bp, Cannabis indica
aaccgaaactggtgcagaaaagtggagacttaataaataatattgttacaagaacgttaccagtagctccggtgtaaaatgccaactgcctatgacaagaaaaagtgtatcaatgaaacgaactacttaacttgacagtgcaaattcttaagacataattaaaagaaaacgaaagagaggtacttactctgtagcataccctaaacgctcggccaaaggtgtaatacccaacaagcttaggaaaaaaacccaaccctgatatttccacaagaaaattagaaaaatataatcatataaaaagaacaggtatttgaattgcagtaatgcttaaagggagaggttgaactcactccatggtcggtaaacttattgacgagaatcgctaaaggcccaaaaagcattagcaaattcaacttatttgaaaaaattacaatctttacgctcctatatacagcattcccgaagattttcttaacaaaatgagcttgagaacatccaagacgcaacatttgttctgctgctagagatgaatgaggcttctgagatacattttcttgactgaaaatagtctcatcttcaaaatcatttgctgatccgttttccaatgaacccatctagaacagcatttaaagtcatattcaaatggctcttcctcatccatataatcatgaatttttactaagca

SEQ ID NO: 403827 - DNA, 346 bp, Cannabis indica
ctaactcaaggtttcctacttgagaatttttaatcctttctaacatattagactgaagtgttaaaatgctaagttttccaaacaaaaactcaatgccagccctaaccattttggtttctaaccgacgagagatcatcttcgtactaaaaaaatatgtctaggacctttcctactcaaggcatctgctaccacattagctttcccagggcgatagaagatctcataatcataatcctcgactaactctaaccaccgtctttacctcatattcataattttttgataaagaaatatttgagactcttgtggtcagtgtaaatctcacattgctctccatagagataat

SEQ ID NO: 403828 - DNA, 363 bp, Cannabis indica
gaaggatttgggggtcttcaagtatttcttaggagttgaagtcactcagagcaaacaaggtattttgttatcacaatagaagtatgtacttgatttgataactgagacaggaaaattaggagcaaaacctagtagtgctccaatgaatccaattgtgcatctaacacgtgatgggaaaccatttaaagatccagagaaatatcactgattaattggaaagttgaattatcttactgtgacctgtctagatattgcactctcaattagtgttgccagtcagtttatgtcatccccagcaattcatcattgggcagccttacagcaaattttgtgttacttgaaaggaacactcagacaaggtat

SEQ ID NO: 403829 - DNA, 957 bp, Cannabis indica
gccaacacaactttatcatcatcaatttcaaggtggcttaacccatcgaaaaaatcgtccccctttaatttggactcattggccttaaactcctcaacatccttagccctctcatcactgcctcaaacggcctcagatggattcacatccaaagcaggaacatcattaacaacattatcagcatcatcggtattaccaccatctttaaccaactcatcaccatcatctgagtcagaatcaatattttcaggatcaggcagtttcttctcatcatcctcagcatcatcatcatcatcataatcatcatcatcatcatcatcatcatcatcatcatcatcatcatcagaatcttgagttactaactcatcagatgactttccctgattcaaacaacacaaatgcaacttaaataaaacagtaaagaaactaaaaacaaagcatgaaaaaatagaaacaataaactatgattaaatacctcatcagaaggacgacgatgaatggtattaaccttctgctgaatatccttaattacagtcattacatatttgaaattaagatcaacaaaacacctgaaggatatgaagtcttcagccaatgatgcctgattcgaaatgaccaacttagatttcatcaaatcaatatcctctgaatcagacttctttgaagatgaaccactctcaaatgtttgcttcgttataccacggtcatcaatagattcatcaagaaataaaccttcaagttgaagcttctgcctctcttcatcagtaggacacatgtttttgatctttaactgaacatcatatcaaacacaataaaaaatgaaaaaaaaaaacagttaaataaccaaatattaacaaaagcacaaaacagaaaaaacagtaaagaaactgaatttaccttgttcaacggcaaataaaaaaacttgccctacaagtctctaagagttggatttttggt

SEQ ID NO: 403830 - DNA, 521 bp, Cannabis indica
gaaaggaaagaatttacgaaaatattttgtatagccttactagtctagaaatcttgttcacatctatattaacaaaataatatcatagtatacttaattttcgagtttcgacatatataacaagcggatgaaaggtaccatatggtcccacttaaaatattatattgctatttttataattaagtatcggatcaaaaaatttaatatagtaataaaattttattaactattcacaaagcgttacttcgtgatcgtacttgacactactaatgtctaatatcaattatcatttatataaggaaattttattaattgaccctaataatacaacccatatcaaaaattggacccctttattttttgtacaaattgataccactaattcaaaaagattcctaaaatacccctaaaataaaatttcactcattttctctgactttccctctctctctctctaacttcctcttcacgaaccagaaccaccgtcgaccatctccaccacgaaccacggaacccgtaaa

SEQ ID NO: 403831 - DNA, 652 bp, Cannabis indica
atctgatcctgtgtcagagaaaggtataaccgttgctagggcgatctgggtctctcttcatggtagacgtctgccttcttttgggcggttagtgtctgtgacaggcccttccagtagcctttcaggtgtcgcttggacataccctgggcctagctttctctaaattttgaaagggtagtaaggcttccaaatcttggatggcaaggtgatgctaggcagatctccgtatcccggtctaattagagcttatttagtgaccttttgaggctgtacttttcttttcatgccacgtgtctctcattcgaaaacacggataacacatatatactatatataaacatacatacaaatatacatacattggtatacataatatatatacacatacacacatattacatatacatacacatacaaatgcacatacaaatattacataaatacacacccatacatccatacatacatatatatataatatacaaatacaaatacaatacacatatacatacacatgcacatactgttggtttttatgccctaaataaaactccatttcaatataatctattttatttaacatcaataaagaaacagaagtatttttcattcatttgtgtatgttttgattcactttatcaattgcttgtct

SEQ ID NO: 403832 - DNA, 507 bp, Cannabis indica
cacaccaacacatataatgtactaaaacgaacatttttaacgtaaaatatgaactcatacaaacactctttacgtgaaatctcactaaaataccatttattaacaaaatatacaaatatgtaattatttaccaaaatcagaagctagcatatatcttaatcatttatacagattataaaacatatttaatctatctagaaacacgtacaatttattatccatatttatgtactaatttacacttaaaactgtatataaaatactaattatttaaataaataaaataacaaaacatctcaacctagtcttaaatttatttcatagactagaattatattgtaacatcatattgacagttcccaaacagtgaacacaatttttaatattactctatttcaaactcaattaaatagctaattagtcacaaataattgtaataaatacctacaacaactaataaattataaaaatctttttatttcgtaccatagatagtaaatagcatta

SEQ ID NO: 403833 - DNA, 733 bp, Cannabis indica
tagtaataattgaaatttaaaagcataatagtgatttaaataaaaaaaaattactattatactttgtaatagtaattaaaaaaaaattattattcgtcctaaatttattttcggaattaataaaaatactcatctggttaaactatcaaaacattcaaatttaatttaaaataatatttaaaatttaactaattctaaatattaaaatttgaaaataatttttaataaaaaaataaacaatatcaacaaatttattattaattggaacactttaagtggattaattatatttaggtgtttttattttatatagaatagatatatgatgatttggagtagattaaaaaaattaattaaaaaaattgctataaacgtgtgagccataaacgtgtgtgatgaatgatgatatagacttgaaattatgattttttttttttttaaaaaaaaaaagaaattaagagaattaaagctaaaaccgtgtgatgatatctttatatattaaaagtgcctatctaacggcaattcttggtttaacggtgttttattttctattttgttaaatttaacagttctgttaactctcacgttaacttcaaacaaattgaaattaaacccttaaagcccttttgccaaccgcaacttcctaaccatgcctacgtttgggataagcttgattagtctttctccttttggagaactggaattccaaaaactgtggcattttgaaatcgac

SEQ ID NO: 403834 - DNA, 547 bp, Cannabis indica
atgaacaacaggtggaggaacaatagttgttcaagaatgattttcagcgaaagttgtttatggtggaagagccatgtgcgcttcgactctagaaggatcatcaaaggttgtagctgaactcgtggcccgttattgttttacattagttttttttgttgttttagtagtttttttgttctaattttttaagattgggcttgcaaatataactgctattgcattgggcattgaagctgtgtagaattttttagttttttttaatcatgttttctttttttttttgtttaatttattttagtgttgttttataattgttttactgttattttaccgtgattatttatttgacgtcgattttactttttttttctcattctcaccggaattaatggttattttttgattgttttggtgtttccgtagtggttctgtccgtgggtgtgaaagatggagacctcatttttttagtgtttaaaaaaagaaaattggccaagacagtataaaaaaaaaaaaaaaattggccatgacagtataaaagtaatttcta

SEQ ID NO: 403835 - DNA, 722 bp, Cannabis indica
atattagtacactctcctaaaagggtattttggtagactctctatttattttggtatatagaagagctttttaagtaattttttatgatcctatataccatagttatttagaaatacttgtaaatttttataaaattttgagtagtttacaatgtcaaaaataaaattcatacattttattatacgtgcgacaattttttttatacacctgataagtagatacttatatttaatttttaacactgtaaattattcgaaattttttgaaaaattaaaaataatcttaaataggtataacttacaccattaaaaaagacaattggactaaacaaatttttaatgccaaactatataaaaaaaaatctacaaccctttaaaaaagggtctactacatactagggccgacccaagcattttaggggtcttgtgcaaaattttaaaattgagctctttaaaaaaaattgtgtatattaaaactaaaattctattaatagtttttttttttaagattcgttcataaatttttaattataaattttttatttatgtatgtataatagggaaataaaaaagaaaaaaaaataagtcttttcttaaaaaaaaaaatggccttaaaaaaatggaggtcttgtgcaatgtcccaagctgcccaatgcttgggccggtcctgctacatacaaattttcaaaacattttttttatttacataatattatatatac

SEQ ID NO: 403836 - DNA, 767 bp, Cannabis indica
tacattttactatatattattatagggtaatattattttagattgtaaaagttacagattggacctctattttgttaaatgacaaaatagatcctgtattttttaaaatagtattaaataagctcaattttcgataattttttttagttattaaccaacttgaagataattcttaatacaaataaatataaaattttaactagttttgttataacatctctaggtcagattattattaggttttattttgacaagaaattattttagggtcctatttatatactattttagaaaatataggatccattttgtcatgatttaataaaatagagagttcaatctgtaacttttgttaaaacacaagatccaaaataatatttaccctgtgtgaataaataaatgttttgaatttaaagcaaaaatattaaattaatgagatcatgaatatgataatcaaatgaaaattattatatatataaactacaaatatgaacatttaattgcatgccaatgctatacgagaatatatatatatatatatataattacaagcactgacaaaaaaatgttatttttagtgattaatttttagtcaaagcattaatttttttgaataaatgtgacttttagtcacaataaaatattacttgtgactaaacatagtatttagttataagttgtcactaatttagttttaatcacaacaagtattgtgactaaaatacatttagtcacaataaattgtaatttctgtgactaatactttt

SEQ ID NO: 403837 - DNA, 773 bp, Cannabis indica
gacttaatatttaacggtcaagtacttcagaattcaaaaaatataacttaagtattattactgcgaaaaattaaatttaaatatttatttataattgaaaattaaatgacacaaattactctttattttaattgatattattttattaataaaagatttcttttttaattaatacatagatttttttattaatattttaaataatatggaattggaggtagatagttaaacaacaatactacctacctctcattcattaattaataaagttgtgccacctacccatcaccactttaatttaactccagtatttattcaatttaatccgaattattttatttatagtgtatttgattcacactaagagcttgtttgtacatcttttggaaaaactaaaaattaccatttaaaaaagttgtgataaaaatatatttggtaagcagttaaaaaatagcttttaaaagaatttttaaaaaagttacagctaaaagttaaagctgctccaacctaacttttgaaaaaaattattttgattaaaagactataataaatttacttgtactaaaatcatattcacttatttattatatattagaaaaataaaaagggataattgcggcaaaagtctccaaaaacttggagttgatacatattagtctccaacctcgaaaattggcggtaatagtcaccaaggtcacttttttgtaagtctgttagtctctctttctaacagatccgttaaatcaaaataaatgacacgtgtcaatttttta

SEQ ID NO: 403838 - DNA, 678 bp, Cannabis indica
aaaatataaaaaaaaaataaaatcactactacaaagtgggtttttagcttcatttttttcaacccattttataaaaagggaagctaaagggtgtaaaaattcccggttattgaaaattgacctttagaggcggttttttttataaaaaaccgtaggtatagaattgcattataccatttagagtcggttgggagttgaacgacattgggatatattgaattaacctatggcgtcggttcctatataagaaccgatggcatagggtgcacatttatttgacacgtgtaccctatgtcgtcggttcttatgtccataggatcgtccaaagtataacccagcaaacccaaaaccagcagagagcaaaaccctctcacaaccgatgaagagaagagttagtcttttgacgatgcggcaagacgattggctgattggttttcattgatgaataacgaccaccatatgtgctttattccttggagtatcgggtaaactctatttaattctttagtgctaattgttcatttctatattatgacttcaaattatttttatactatcttacttatattccaatataattttgtagtgcgcattggacactagaggtcgttacgctaaagaaaattatccatttagactctgtacgtggccgcccaattcccgaagaaattactcaaa

SEQ ID NO: 403839 - DNA, 755 bp, Cannabis indica
tatttttaaaaaatattatttttctcaagtattgacctacatgatgtcacatattgtctaactaattaaattacttaatttatttaaaaatatatatattaattcaagttttaataataaagaataattaaattataaaattgacatagctatattatatattatatatatatatataaatattagtgtggagtacgtgttactggcacgtaatcccacttaaaatatgtgagttataattatatatcttactttcattaattttgtttgaaaaaaattaaaataaaaaaaaatatttttaaacaagaacatagtgtgatataggttcatttattgaagctaaaatgttagtcgttatatctaaatataagctcatgtgatttactctagtattacctactaataaccaaagtttataagtaaaataaaataataattaacaaaaataaactataggaaaacctcacctaagcgctgtgtaacaagtaaaaaacagaacttataaagttatgtataattggaaaaaatgagttaacattctaattaaagtgaataaaaatatgtacatattaagaacatcttcaatagagagctaaaattgtagtttatatattttagttcatcttgataaaggtaaacttcaatgttggtgtataatgttagagatattattacaatggaagaaaatcaaaatattacagctctattataatacaatacaaggaccaacaagagattaaataaatgttataaca

SEQ ID NO: 403840 - DNA, 760 bp, Cannabis indica
aacaacaataaaccctaaaaaaaacacatttaaaatttaaaaataactaataagaaaacccaaactgacaaaaagaaaaatagtgtaatttggttaaatgatgctaaaaactatttaaaagcagtaacaaaaaaaaataaaaaaacaaaaatgaagaaaacaaaaacaaaatgaaaaataacggttgattaaaaatttcaacttaaaaaaatgaaaaaattcaaggtaaacaacccttgggtttaactttaggcttcacttccaaatcaggaacttcatcctcgaagtcaaaatcggagagaacctaaaacattatggagaaaaaaattgaaacacaaaacagcaaacgaaaaacaaaacaacaagaaaaaaactaaaaaaaaatcgaaaaacaacccaacttacatccttgacaaatctcgaagatttggttctctttgccttacgagattcaatcttagctggaaaaaatctttttttagaaccagatggctctgcagcatcacccattcccttcttcgcaatgtctttcaaacccattttaggatcgtagcatagatgggaggttgaaattcgtgggttagggcttcacaggagatgatagtgggttatggaaaaaaaaaaaaaaaaaaaaaataaaagaaaaattaaaaaaaaaattaaacaaaaaaaaaagaatgaaagaaaagaaggtgaaggagatggagtgtaataatggagatgaaagagaagaaggtggcaaaatataatattgaaaaat

SEQ ID NO: 403841 - DNA, 559 bp, Cannabis indica
gaacattgggcatgcacttattatgcaacatggtgtgaaaatatacaaattagataggagaatcagaaaaagaaaaataaaagcttaaaattttgaaagaaaaaaaaaaattaaaaaaataacagaatctaaacaacattataaatagggtaaatagtggcataagtacccaaagttttagatttgtaagcggcataaacccaatgattttttttagtggcataagtacccaatgtttataaaactgtaattttcttccagtttcatcagaacagactctgttattgtcttaatcaggacgcatataagacccaaattttagattatttggtctggacgaaaaatatgtagtatcagttacttctaaatctttttttaataaatttaaaagggagcatgtactaacgaaaatagagaaaaattacagttttacaaacattaggtacttatgccactaaaaaaaatcattggtttatgccgcttacaaactcaaaactttggatacttatgccgctatttacccttacaaatatatgtatatatatatatatatagtgaa

SEQ ID NO: 403842 - DNA, 419 bp, Cannabis indica
tttagctagcaagccattggacgaagactctaggcaagaagcttccatggggggatccgcgagagcagctcgcctctcacctatggagcgacccttcggtgacccacccgaagagcgggccatttgagggccagctgaaacatcaccccctacaccaacagttcaatcctcttctgccacgatgtcatcaccaatttcttttggaggagcctggttaagaccattatcaccatcagctgctacctcagccttcggggctacctccctttccgtcgggagaagcggtatgacgtacaatttcttaggctttaacccagcattctctgagaccaacccacattcaatcaggttaggcaaagttagaagatagtggcagagcttgctttcatatttagctttaattagttttggcatttaaa

SEQ ID NO: 403843 - DNA, 547 bp, Cannabis indica
ataaatatatttttagttttttttggcggtttttccatccttgtaatttagaagaggattgtaaaaagggcatagaattcaatttgagttctttgtttctacagctgtggctcctctcgcgaggtttgtaaaattagaggttgctagttatcattagatttttttcttcccttaaatggaacacttgattgcattcatggacaagtcaatttccttttagtgactttttattctcaagaattttgttgtaatttggtaattagataaatgatatgagtaattaaaatataaaaaattaaaattgaagggttttatattgggataattacataaaatattatttttttgtaaattttttatatttttatgttttaaagatttttttttgttttttactatttacggttctttttatattaatattacaaaaataacaagaaaattatataaaagtgataggaaaataatatttaaatattaaaacaataaaaataatatatagataataaaaaattaataataaattaacaagagtataacatagaaa

SEQ ID NO: 403844 - DNA, 574 bp, Cannabis indica
acccgtatcgatagtgtcaggtgagggcaataaagaataaagaaaagccaaacaaataatttaactaacattaatctaattatacattaattttcatgtacaagtaaacatatttataagtttctagataattaattatattttatattgtaatttcttgctaattatttaagattattttaaatttattacacgtaccaatcgccctctaatagtcatgacttgaaaatacacaaacttatattttaaattttcaattttcattttctttttaaataattatgaattatgatggtatatctcatccgaaacaccaattatattaaacagtattaaaataataataataaagtagtagaagaagaagataggttggtattgtgaaaattaaaaaaaaaaacaataggagagagagaggtctttggtgtattgttgttgtaaagagcacgacttcaatgattgcagccacaacccaatcattcgatttaaggcacaatataatggagatggagagtacgtttcgttgccaagtacgttttcatgttgtatgtatggactacacacgtgcttctct

SEQ ID NO: 403845 - DNA, 640 bp, Cannabis indica
cgcaggtccgagtcgcgagtctaggtcaaggttgggtcctgggtttgagttcgggtttggatcggagattgaggttgaccaaaatttttggtcgtaataattaatctaatgcattactttatctaaacataatattatttattattcaatacgaaccaaacaagcccttaaagtagagtaagggccggtcctaaggtatatagaaccttttgtcccttgaagttacacactattttcgatttcattgggattgttgctatcattatgcttgagtgttttttttctccttcttcttttttcagatgtgtatcttgtttaagttgttcattggctctaaatttgaatattcacttgtgttaatcatattctgttaggataaagccctacattactgtactacattgctattgttatggtagtagggctttatccattcatgctaggagattttagtcttgtttcttttttaaacattgagggaatatcaattgggccaaagcttgtttgttcgtgttagtagtgtgactatccttgtccatgtttatatttaagatattctcatatttttattggccttatagtttatggtgcgattgtttgttacgacttttatcgttatagttgattatttgattatttc

SEQ ID NO: 403846 - DNA, 803 bp, Cannabis indica
atatagaaatatagatatatatatacatataaaaaaaagataaatatagatatatagatatataaatagatagatactataaatttatataaatattaattaaatatataaaaaagatatgccgtgcactgtaaaaaaaaaattaatggtacactaattactgtttccttggagcataattacagcaataattcgttttagtgactcttggtctaacaacaattgtggacttctttttcttttgtttttgcaaaagcaatttataaaggggaataaacaaaaatgcataaaaacttaaactcttttttttaagaaaatatggcacatgttaaaaatacaaaaaaaaaaaaaatagtacaaatacatgaagaggcaaagtataatacttttaatataagtttttacttaaaagatataaagtattggacattctactgcgatatttgagattgccatcaattcctcggcatcgatttgggataatcctttgtttttagattttttttttttttgtcaataaaaaacacgaaacatatattagacattttagaaataaaaaaatatttattttttattattaacaaaccacatcaatttaaattttcttataaattataatttttttacaaatgataaaaatataatttatgaaaaaaaattataatttactaaaatgataaaaatataatttgtaaaaaaattataatttaaaaatattataatttattttatcaaaagcatattaatctatattatgaaaaaaaatatatatttaaaaatatataaaaataaaaattttatat

SEQ ID NO: 403847 - DNA, 560 bp, Cannabis indica
ataaaaaaaaaaaaaaactataggtagtaataattttcaagaaaattaagcatactagttaaaaggaattattacatgaaaaatataaactgacactttatttacaaaaatatctccataaagtgtggacaacgtttataccttttatgtgcttttaattactaaagtaccttttacactatcacgtacacaatcagatgatggttgttgggtagttgatgggtggttggccgaaggtggcatcagacgaaggtttctgggtggttggccgaaggttgcatcagacgaaggtttcaatcagacgaaatagttgttagtaaatgtttatgcaactgttatgaaatactaaaaattagaacagtatttccacgtacgtaactttatctacatgtctcttcatgatttaatatgaacaaattcaccattagaaattttgaaaataacgaaaaatacactaggataaatattttactatagtattgatgtaattttctttggattatacttgagttggattgtttgggaactccagattagctttttgagatatgcatttcata

SEQ ID NO: 403848 - DNA, 708 bp, Cannabis indica
tctaataaattgaaataataaaaaaaaataattattgatgactttataaaaagcttatcatatgattcgtaaaaccgttgtcatcacaacatcttatttgtagtcatcactacattcaaagtcaatatcattaattactgtatttttcaatagattttctactatacataaaataaattaaataataagtttagtcactgatacacttttataatataaagtgtaatctaaaatattatttttttttaaaaaaaaataaaaattactaaataaaatctattaattagtaataagaaaatagataattgaatctaataatcaaatttaaattcaaatagtatgttttaaatatttttaattaacttatttaattttaattttttatataatcacttaataaaagagctatcttcaaatgttatagtgaataaaagattaaaaattgaaagaggtataccatcatatgattacaaaaccgctctcatcaccgtatcttacttgtaatcctacactaacataccaaagtaacaatttgaaaaaaaaaaaacaaaaaaattaataaaattaagttaaaaatgacaaaaaaaaaaataataacaactacgaaaaattatgtgtaagacaatgttataatttattttaataaattattttataaatccctacaatgaaaatttgacaatttagaacacaaaacctattcatgat

SEQ ID NO: 403849 - DNA, 777 bp, Cannabis indica
acttttaaagatgatatcctcatcaaaccccttatgttaatgcaaattatgtgctagacttaagtagagagtgagggtatattgggcaacccactcaaaaaagtgggtatagttttaaaaaatataatatgagggtatttttaattaataaaaacaaaaaagatgatttttcaacttatcccttcacaaaccaatagggaaatttgactttttatgcttacaaatacttaatatttttttcctaaacacataacatgtaatatttgtgggatacgacacattttacaatatccctaaaatatccccatttacattatccctatcccctctcttcttctctctttcttcatacccatcggggtccccatcggacctgtcggacccaattggggtcgccatcagacccgtcccctctcttcttctctctttcttcatacccatcagacccccatcggggtatattttttcgcacatacatcggaccccatcgggccattggcttcctcaaattgcgatttacccaaattgcaaatatgaaccttggacattgttgggcaccgttcgggtctcctccgtgacgcggtgatgagggtcggaatggtgggtgtgggtctcggtcggggtggtcagtcgaagtgggttgtgtggggggttgtgcgatgtgggttcgggcgaagggcagtgatgtgggtcgaaatggtcggtgtgggtctcggtcggagtggtcagtcggagtgggttgtgtggggggttgtgtgatgtgggttcgggcgaagg

SEQ ID NO: 403850 - DNA, 520 bp, Cannabis indica
actcaagattcaaaccaaattatgagttttttgtggctaaagtctcttaactatcactcaacttgtacttaatcctccaagctcatattttaatagtaaaacccttcaaaactagtagcaaattcaagttattctttatttttatttatgtttatgtgcctatttctcaattatattgatatatataatgtttgattcaattataaaacaactattacataatcggtctaattattaattcaaaaatataattagagaaattatttgaatctttttattaatgtgttatgcataacacatattaatcaactattgaacattcaaatcattttgcctcacacattcaaattttatatctattttttataaagaataaatagaagtcaatagtaataactacgatgctatcgagatttgcaaatttatgaacatcttttattgtttatcgatgtataacaaaaaaacaacagaaaaacatcaaaggggatgtagctcacatggtagagcgctcgctttgcat

SEQ ID NO: 403851 - DNA, 1020 bp, Cannabis indica
tttgtctcctaatttttttggtaacttatgtattcaatctttcatataaatggtgagaccaatgccctattcggggaccttcctttttacgcactttgagtgaaaaaaacactctgaaatatttgtaactttttttgagagatattgagaaactcacttggccaaaccttgtgatctcgatatacttttataaaagcacactacaaaataatgccacttttagtgacacctttttagtcacaacaacaacaacaaaattctggctaaatgtgacttttagtcagaacaaaaatgttatactagtgactaaacatattatttagatacaaattgtcactaatttaattttagtcacaataagtattgtgactactaaaaatacatttagtcaccacaaattgtaatttttgtgactaatacttttagccacagactttttcgtcacaaagtaagaataataatttataattattcacaattttttcactttgtgacgaaaagtaaaaatttttgtagtgacaatacaacaaaaacgaaagtagactattaccgctataaatgggctgaaccactgtaaatttcttatgttatttataagtatttattattatttaattattatataatctctttagtagactcaatgtcgttggctaaaaatgaagccaacaacatgtatagctgccaataaattagaggtcattagaccatcaagcaaagggttgaatcctaagctttcaaagagccaaaactctacaaaattgtaaaatccatttaatgtcataaccatgtaaaaaatacttatattaaattatatatatttttttagctttaaatcatactcttaaatttagtaatagatttgaagtccctaggatgggtttaaagggtggattgttgctgttatggatggtgaatgtagatgtaactcttaattcttactcaatgaaccactttgatatttttgtttcgtcggataattgccaccaatttcatttcacagccttttatgacgcttct

SEQ ID NO: 403852 - DNA, 632 bp, Cannabis indica
ttcagtcagaggtgccaatggcgtgtctacccttggaggaagggcctgccacttggatccaccgggatgcttgaattactctagccactatagattcctgtcaggtaatcctggccgactatagacctacaagggaggtctggccgcccaaggtgtgcaggacctagtaggtcaagggttgcaggacttggtaggtcaagggctgcaggacttggtaggttaatggctgcaggacctgccaggtcattatagctctatctagaggaggccaaacttgtggcaccggttgtggtgacaagattcaccacatctgcagtgttcatcgagattccaattgtgactaaaacttcagtatctggatctacagtctgtgggtcttgagggagacctaaagatgcagatggtgcgataggttgttattctcgtgttaaccacgacattttatctgatacgaaatccacactctcaatgaaaccaccaaactattgacctttaaaaatgatctactgacagctgggtcgtatagatttgatgttggccacatgtcacacaaatagaatgaaagaggaataaacacgcagatttgttatagaggttcgacccccttgtggtagcgggtaatgacctactcc

SEQ ID NO: 403853 - DNA, 374 bp, Cannabis indica
gcacttttagtaatatttttttaattaatttctatttttaaattagaaaagtgaatatatttttcaaattgtactttataaaactgtttttacttttggtggcggacccagaatttaaagtgaggggggcgtaattttttattgtaaaaggagggagggcataaataaatttaaaaagaaaaacataaagtgtagttagtgggaattgaacctttaccctctaacctattaaccatctaccttaaccattacaccaagcttactattatgcctacaaatatcatcttttaatacaaatatatgttgtaactaatttaaatacatatacatttttttctcgatttttttttttcagggggggcgattgccccccc

SEQ ID NO: 403854 - DNA, 728 bp, Cannabis indica
tttgaaatgctatatatgttcaacttcccacttacccacaatcaccaccattcactcctctctcatttttctcaaaagtctaatctttttcaagtgtgagagtgtatttgattttctagggtttcaaagaaaaatgacaaaaacaaaaatgatcaaccgtccaagaggccctttcgtggctttgctgctgcatctgcttccacttctgctcctacaagaatggctgaattcaacttgcgtttgggaagaatggagacaagtcaagctttgtttctcaggaagatggacaacatcatgaaatacttttgatccaatgatgatgaataagttgttcaattttctatctcttgctttttatttatgtgtgcttaaactattatgactttgttcaatattttttttttgttatctttggactccttgatagacaaaaagggggagtagtatttttttttttttgattctactgttacaaatctggacccttgattttagggggagttggtggtttcggtttgtaagattttccgtccaaaaacgttatatgtttcatgtgttagagtgctttcatgcaggcggagtattttctatactcttttatcttaaaaagctagttgatttggtttctaacacttgatgcaggttatctcataataaaatattttgtcaatcaaattgccagagggggagattgttaattccatttttggcatatttaattgacaaaa

SEQ ID NO: 403855 - DNA, 564 bp, Cannabis indica
tctaaactttatgagcgtcaccagcaatgatagagtcgcctgtgccacattccagttccaagaagacgctctagtatggtgggacataatggtgtctgtaacgtcctaatgttaaggcacgctacagtgacttttcaattgcagtgctatctttgccaatcaaagaactttcttgaaaattgtgtcaaattaaaacttttatattacatattaaactttacataatcttttacaagtttcgggatcccgtttctaaatatttatacaaaatacacaaattacaaaaccaggtcgcacagcgactcaaaataacaaccccagatctcctgagaccaaacactccaggtcgcgccgccatgacatgtacaacctcatcccagctcaggctcactcctgttcagcttttgcatttcctttatctacacatggaagcagaactgtgagtcgacagactcagtagaaaagcatataacatatcatataataccgacttgtatgtaggcgcccatacacctatttacaaggcttaacagatgagtaggaacgttccatactagggcacaa

SEQ ID NO: 403856 - DNA, 556 bp, Cannabis indica
aaattaatcacatttttcactaaaaccctttttgtaatgccctaatctatagggatgccacgtgtgtgattttataaactagtttaataccaatatattaattaattattaaaaaccgtgataatattaaaaacttgactaaaataaaacactaaaaatagataatataacggcataaaaagcgtattgtggggatccttgttataaaaagttttacaaaagaactaaatacgacgatgcctcaaaagcataaaaccaaaatacatagtagatacagcccaaaacaattcctagcaacctcatgattcataggtcaatatgtacattgctggagaagactgtcacctcatgattgatctaatttttctttgcctttacctgtaccatatagcacccatgagtcataaggatttagaaagaaaagtaataatattaatcatatattttattattcgaatattatcattcatacacaatcaaaatcaaactatcacacattgttcataagatgaaatccaaatcactactggcatctgccacgaataagcatcagtat

SEQ ID NO: 403857 - DNA, 621 bp, Cannabis indica
aactcaggacctaaatctggaccaacatcttaacctaaacccaaacttggacacgcatctgggaccctaactcgaactcggacccaaacccagactaagactaagatccagacctggacccaaacccggacacaaactcggatagggactcagaccccgacccaaacctgaacccagacacaaaatccgagtgtgggtctgtgtccgagtttgggtcttggtccggttacagttttgattcttggtctaggtcctagtcctggtcctgttcttgggtcccgatttgcttttggtttcggttccagtttcaagtcacgaggtacagatcaagtctaagcatcgagtcccaaatcctaagtccagaggtgggtcctaggtccaggtttgggtctaaggtcaggtcctgaatcgcgatcaatgttctgaggccgtttttgtgtcggcttgggggcctaattcccaagttttagtcccccatctatgttcgagtcctaggttccggttcgggtccaattttgtgttcccatttgggttcaggtctcgggtcttgatccgagtctaggtcccgctttgggttcgggtctgagttctggtcccaatcccaatctggttcaaggtttc

SEQ ID NO: 403858 - DNA, 1192 bp, Cannabis indica
gttggagatagccttggaacactccaagtaactgtttcggcatctaaagcgtgttgctcgtttatcgggtgagcttaaatatatagtgactataaaattaatacgtttagctaaggtatacatggtgagtttattaatccattttattctgttattttattccctttctatataaaatgttattttattacttttctactttttagtcattacatgacacatatataatattagagaattttattatatacatctctttaaaatatgtacacttatatatttttatttatttcgctatttagttcaatattcttttataatcgtatacattataattatttaagatatttgataaaatttcaaaaaatttagaaaatttaacacgttgaaaacaagattcaataagtctgttacacgcgtgacttcattattttatacgcatgtaaaataaattgtaacatcaatttctatattataaattattttaaatttttacaaaatatcttaattaactttaacgtatacgattataaaaaattaaactaaaaaattcttatagataccgaagtagttagaaattacaatagtacacctatattttagtaaaatgcattataagagtaacttataatatatattattttaagaaaatacaacactaaagatatcacttttgtctttattgagtctctacttttagagagaaattgtatctaaaattttcttgtacaactatgtacattatagtgatggtagacatttttatctcttttcaaaaagataaattaatataatttatagacaaaaacaagatttaaatattcacttatgcacgttctaaaagaaacaagtaaacgcgcaattaaatttttagactattggagaatattgtcccacatggattaaatgtgaaagtattgagccatatataagaacatgggctactccactcatcgccaattggttttgagatggaaccccatgattctcaacatggtatcagagccatatccctagcgggctttcgatccacacctatcaaagagttagccagccgcaagcgagcaaaatggtactcccagccgcgaacaagaataagcgagcaaatggaactcccagccgcaaaacaaaaaaaataagcgagcaaataacacttcttatgataaggtgattcaagattggtgagcaaaaa

SEQ ID NO: 403859 - DNA, 569 bp, Cannabis indica
tctatgagtcgaaatcatcaaaccagattcttcaaaaacttgtgatttcgccctatacagaagatttggcgggtttttctgcactactcattgacagtgattcatctcacttatgatcataaagtgagctcatgcttgagcaccaagcacactataaataacccactacacctcatcagtggtctatatcagtcacatcggataactataacatataaacttcaaagtttttcaccacaatcactaagagatcaacgttgggggcaagagtagtcatactcagacagtgtcaaaaaaatttcaaacatcaaggcaacaaatgtgatggttaataatcaagcatcactaactgttctaatcaaaccgaaccctcaaaaaagtgggtcactccctaagagatccgaagccatgcaagcagctcatgtatggttttaggtgagccaacattgctccctgtggtagaattagatcaccactcacagtcaaaactgccctgtgtaaacatcaatatgattaccttcatagtgatcaacaccaagtctccttggaaggtcaacacccaacgacct

SEQ ID NO: 403860 - DNA, 665 bp, Cannabis indica
cttttttttaaaaaagaaaaatcatatataaatataaaaagcataacataaaatttaaatttcttgacaaaataaaaatttaacactaaatttaaaaacaacaaaattataattaaacaatctaacatgaaatttaagataaacaaaatttaaaaataactcataaaataacaattgttgtaatgtgcactaattagggttgagcataagttaggttggccgggttgagagtattttgatgacctaacccaatgacatcggcctagaaattttcaacccattcacatcctaaattttttataacccaacccattttttcttttgcgggttgggttgggttgggttataacccttatctcattatttaaaaaataaatatgattccaattttatcaaaatcatatataaattaaaagaaaaattaaaagttctaacataaacatatcgatccaaaattacaaatcattcaagatcaaatattacagtcatctatcatctaaagtctgaaactattaagattgtccaaaacaaactcaaacaaaataaaatcagtttcgatatcggcctcactcaataatctcatcgtcaattgttgatgattccttgaccttaattagattttttgttctactattataaaagcacagtgttagtcaaattattat

SEQ ID NO: 403861 - DNA, 700 bp, Cannabis indica
tctctcttaatttcgaaaattaatatgtcagggaagtgttctaatttttcatatcaagcttctatttatagtagttaaaaaacctctaattaaatcatattaaattatttaaataaataaatatctataactgaatttggttactgatatttatgagagaatctctcaactacttgagagaacatctcaacaaccttgaaatatctataaccacttttcaaattagatatttacctaattgaattaattaaataattaattagcccaaaagacaaactctatagggacatgatatatgctagccgcctacccttgttgtttaggacaaggatgccttgtgtcctgacaacttttgtcttaataatttttatcttttccctatttaattaatttgagaaagtatttatttattacaaaaataaatatttactatttttccaattcaaaatagatttttgcgaatgatattatacacctctttatcacaatccttggcagtgttttaaggtggtgattcggggacaatagacctataattctaagctccaataaactagattatttattgagtctcatcaactaaatagtccttgtttattaatttcatgattactctactataaatatggaattgaactcttagtaattatagaattatatttattgagtttaactgcaatgttcattgatataatcaatt

SEQ ID NO: 403862 - DNA, 369 bp, Cannabis indica
ttaacactaaaatcacaaacaaagtcaataaaaacaaataaaaaatggtggtggtgcttcggtggtggtgcgtcgtgggtatcgtgggttggtagtggtgcgccgtgggtatcgtgggttggtggtggtgcttcgatggtcggtgggggagcgccgtgggtcggtgggtctcatccgtgcgtgtgtggccagcgtttggggttttagctggggttgggagggctgggttgggacagttgggttgggacgaacagagagaatagaaggaaggagagagaatgggtgtaggattttgagaggggtaattttagaatttaggtaaagggggcatattctaacaagggaaattttatttacacctcaaaattt

SEQ ID NO: 403863 - DNA, 538 bp, Cannabis indica
attatttatatatgtataaaattggttactattgtaatagatttataaaataatttgtaaataaatttaatagtgtctgaaacatcatatgagtttctttaaaaaaaaaagtggcctcaaggtatcttaaacaacaaaataacataatatagcctaaaaatatacaaaaataaacaaaaaaattacttttaatattagtcgtctttctttggagacagaaaaatatatgtttctcaaatagtaaattgattattttattatttatatatgtataaaattctgaaataattttttttaatgaaaaagtaaccaattgatatcttattcacatcaaaaacaactaaatggttgcttattttcaaaactcccaaaaagtaaaaaatttggaaacgatttttttccaatttttccatattcgataattattttgaatttcggtatgtatgctgacgtggcacatcggtatttgtgcaaataattttcttaaaggtatttttataaataaaatcaattttaggtataatattgaaaaaaaccc

SEQ ID NO: 403864 - DNA, 875 bp, Cannabis indica
ttgggtctgcttatcaaagactttagttactaaaaaagctcacaattctgcttcaactagactttatactcacaaaagctaagccgataactattgatcactaataatatgtgctaacacaacaaagataccaaaaaaaaaaattttaataaaaccaataaaagttaatgtaaacccaaataaaaatctaatattctcccacttgagctacattaattttaatacatatatattatatatcaaaataattttatttaaaaatgactcatgggttgaacaacaaaaaatatttgtggtccctttaaaaataatttttctttgatagcatgtcaacatgtcggtctaatttaacctttaatattgaactataacaatcatattatttttaaatcaataaaagacatttataattacaaataccaaagtattaaatcgacatggtcaataagtctagtagtgtggtaaggaactatgttcaacatgtgatcaattaaataacataagtcctcaacttcactgataccgcaatgcttaataattaagctagtgaaattaaccttatactacttaataataagttagtgtcactaaacatgcttaaaaagataagccaataaaatatcattatcattaagcaattaaacttaaaagacaataatcactacaaataaactacatgtttttaattcaatcattctccaaaatataacaaaatataattaaaatcataaacatccaataacaaaaattattggcccacaaaacaaaccaagtagttcataacatcaataagaaaattaattatatataaatgtaatctaaaataatagaacatgtaactcccattaacccaaaggaacaaaagattataaaat

SEQ ID NO: 403865 - DNA, 541 bp, Cannabis indica
gagcattgttattaggcactactggtgccttgcacctttgcgacatgtcgcgttgctattagctagcgatactccctaaaagctattatattaaattatataaaacccgatacttagttggaccaatagcaatattaacacataaaatggtactaagcaccactggtgctctttaacatttctcataatataatatagaaaagctaacaaatgtttatgattatatagtttcgaaaagatgaagttaaagaagaagatgagattccttacaagtatgagtttttccacctagtattctccttgggagccatgtattttgcaatgttattcatcagttggaatctcaacaattcagccagaaggtaaagcaattcatactctaatatcttttaattaatatttatgcatatatataaggcttgttcggtaactattttgttttttgtttttctttattcaccttaacaaaattttataatttgttcttagtttctgattaattaaacagaaaactgattttttaatggttaccgaacactac

SEQ ID NO: 403866 - DNA, 600 bp, Cannabis indica
gttaaatttgatttatttcaccattagctttgggtggggtgaagtgactatattagagttagtcttatattactaatgtgtggaaataaattattatatgtaagataaatgcaggtgctcctcccattatctattagttttgagatagaacctcatgcattttaatcataccttagccactttcattccaaattctaacatgataccagggtcatttgttataagctcaaagtgccatcggtctaaaaaggcgagccattgaaagagttgtttgtgatccgttgtgcgtccaaagtcgtcggtccaaaaaaataagccaaacttaaaaaacttccactgtctccccctttaactttcattcggggacctttcggtcaatgtgtgccagttttcaatattggggtctttgacctgtttcaaaaatctacaaatttcctaacgtgtacactcacaaatttctcaatatttgaccttgtgggattctttcaaatgtcacgttcgaccttgtagtctcttaaggttgtccgttatacctatacttttcaggctcaaatgtgaagaggtgtattagagttaatcctacattactaatgtgtggaa

SEQ ID NO: 403867 - DNA, 553 bp, Cannabis indica
taagataggcagacttggttgaaaacaagccattaggttcctttgtccagacccatctatcccttctctggctgctcggattaccgcctcttaagatgtttctaatagtttcctggtcaaaaagattttgcagcttagaaatgtcccaattcccgtcgggtaaaagtaattccgacaccttctttaaactcagatgttggcgatcattgggcttagggtgaaaagccgtaccatggataacccaaggatcatcccaaatacttgtctctctcccatcagatattagcttgcatgccccttttcttaaaatctctttagatcgcaccacatttctccaaaaccaggaatcggagctcttaacctcacagtcaagaaactgcttacccttaggtacttagctctgaggacattacagcacagcgattgttctttagtgagcagagcccagccccacttggctaacacgcttggttcgtctccacagtcttcctaaattccaagccctccccgggatttggggaggcacactggtcccaggctttaagacagatgc

SEQ ID NO: 403868 - DNA, 1068 bp, Cannabis indica
gctcaaaagcttgcccgactaccgggcgaagaccgaaatattatccagttgacctccgaggataattttgtgaggtatgggctctatcccaaggactttattcctaagtccgtgacggggaccaagaggaaatctagtgctggacggaccaaacgagctcatccaaagaatgaactcattcaacttaagcgtgaagctaagttgaagggaggtgcaagggccaagcagtgtgctcaggagcccttgaatcctgaagatgaggctggggaagagtaggtgacttcattgaagaggaagaagaaactcccggccccgcccaggcctgttgaacatgtgattcccataagagagcccatttcacctgttcggccatcccctcccatgctcgaaaaaggggaagctcttatgtccgaaataagagcgatgtcaggtgatgatagacttctgagtcttttttgggcagtcaccttacatactactttatcttgtttttgagcttcttgattattatgtcttatgtttctgatgtcttttttctctaaccatattgtttttctttctgtacagacatgtctcgacagatgcttgacgctctgaagaagagtatgggcggaagctctagcgcctctcctccggccaagaggtctaaaggcggcgaggggtcatcttctaagaaaaagaggcctgctgcgaaggtcattgatctttttgaggacctaactgctgcaaacccctctactccaaaagctgctaagtccaaggagtctcggggaggaagcttggacaggtctgaaccaccgaagggtgggtttgagctggtcagaagtgaacccgaacaggtgcgggcacctactctacctttgtcagtgcttccagaggccaagaagggcaaagagatactggcccactatatgaaccggcttgttcttgaggttagtgagtaattggctggtgctgacaatgacttttctttggagctgctggcgggcggagtcttgaaagagttcaccagggtaagtctttcttgacacttccctttaatcttctgtacttagctcaaatgctaaa

SEQ ID NO: 403869 - DNA, 507 bp, Cannabis indica
tttccttagtcagctcctcaacggggatgttagcagtaaggagatttttgttcacttccctgagctccttcctcacgtcctgaactttctttttagctgcatccacctctctctgcaatgtgttggtggtggcaaggttcttggtagcagtgcacttggctcgggaataggcgtaagccatcttcagattgacctacacgagaaaatgttaaaattcaagctacaaaaaagagaataaaaacaaagaaggaaatatttacccgtacagcttccttcaagactcctcccaatactagttccaaagacagctcattgtccccggaacagctcatcgctcactttaggaagtgatcaatttaggtaatactggtgcatgtccttgcccttcttagccttcgtgctcagcgccacagtcgttgaaggggtccgtactctgattagacccgttcgagttcccccctctaaaaacctctttaaactttcgagaccttctggactggagggtcc

SEQ ID NO: 403870 - DNA, 1141 bp, Cannabis indica
aaccgtcaatcgatacaactgattcttacaagggatttccgatagtgagcatcgctctttgtaaatggtggtctgatctgaattcgtttttttttaccactgttgcttcattgatcttttatctttgtctatacaggcatggacgtagattttgagagcatgttcaaaagtcctccccgagctaacaagaaatccaagaagaaggtaacccaagttgatgaggtcatggattccactaaagaacccaaacggctcaagaccaaagcttacacaaggaaatatttgagcctgccaatcactggtgttgataaatttcctaaggctgggaatgaggtctcagcagcagggaatgaggtctctactgcaggaaatgggatcttttgatgcgaggaaaaaagatcttctgatgcgaggaaatgggatcttcttatgcgaggaagtccctactgtagagaatgagatctttgcagcgaggatcgtagagggacatcttactgagtcagtacatgaggtcgagtccttttgcttggagccaacctttctcgagctttcctgtcctttataatgaaccttgtattctttgtttaggcaaatggcttaatggtctgctcctggtagcatttttgtaaagagaagtttgcaaaccacttagctttttccttatcttaaatgccttgtacttttacattcgaaattaatatttatgtttgcttatgatttcattcacaatgtaaacaactatattttaatcaaatgcagagtacttttggtctttccattgctcgtaattttcctatttaattaattagtaatcaactatgtgcgcgggcagtttattatctaccagacttttgatctacgagcacttatcaactgtgccttacaataactgttataatctgtcttaagaaaacttgaatatacttttaatgatctcatcactttgtacatttttgattgcttatatgaatagtttgatcgcctattcatacattaggtttaagtacttttatcgagacaccttgatgtctcctttaatactttcttatattgtacgagccattaaaattcagttttgtacgcaagttatgagttatatctcatttaaaaattttgattttcctttctcgtcagacaggtt

SEQ ID NO: 403871 - DNA, 867 bp, Cannabis indica
catcactatatgcacttgtaattgccattactacaaataaatcattgagttagctatgttatttttagacataatctgaattattcaatcaataaaaataatagaatcaataaatcaattagaaaactcatgcaatatttataaatattattactatttaatttgtttgactcttaattaagatgaagagtatgaattgacatcatatctagtatttgactattattttaacccattctgtagtgcttgatgtaaataactaaattcataaaataaaattaaattaaatagttacttaaagtaaatagttgtaaattatagatatttttatgttaaaattttaaataatcgtatatatgatttttttggaaaaaaaatctgtcaaaaaatcttaatactcatatatagctcaaaataattaagcaaaaaaaaaaagttttcatcttttcaaaaatctataatcgaaattataatgtagaattttttgattattaatatttatgaattaaaataaataaaagatttttttaaaaaataagttatttatataaataaattatcaataaatgtataaatattattttcgtaaattatatattaaaataaataaaattttaaaaaaatatttgcagaaagatacagctaactatacatatatttctatttttttataattttattccataaaaattactaaagtaccacaaattactaactatacatatatttctaacgtatttaatgttaggtcatcctacaatgcacccgcttaaaaggatgtactgatgcacccctacttgtttcgggattcaaaaaaaaaaaatttagtcttaatttttttttcatattcatgtacgttatagttat

SEQ ID NO: 403872 - DNA, 584 bp, Cannabis indica
ggttattgagaaccatggagattgaagtaaaaaatagtataatattttattcctgaaggatgggtaacctaagaagatcaatggaatattagaaacatgctgtgggcatagttgataaaggttaaattatcttagaataatctcttcccctgacgaagtgtttgtctaaaactaataattaaatgtaccattggttaggtactttaatattagagaaatattagacacatgttcactggagtaacacaggtgagaaaagacacgatggaccgaaaagacccaaggaacttataaaatcatagagtgaatttgagttgtatgctcacttcattgagtacacagaagagctatgtagatttaaagcataggaatatcgagttccaaataggagattgtgtgtttctccaagtattgtctatgaagagatacgtagagagggaagttaaaccctaaattcattagactttttgatactggagtaagtaggttaggtagcctatcaactaaccttgactcttgcattgttcaaagtgtataatgtgtttcatatctccatgctaagaaaatatgtattagactcgacc

SEQ ID NO: 403873 - DNA, 543 bp, Cannabis indica
aagccttcaccagcaacatttgtcgaatctaatgtgtccttgcaatcttgattcctcattgcttcaagatgcttagtcaactcttcacaattccgcctaacatgtccctttttgtgacaatagtagcactccacttctcttgaaaagcgtgaatgagtgcggttatctcttttgtcatcatatcttcctctcgatgtactcctaccacgacttgattctgatcttgtcacaagagcttgatcagaccacttggttgcttgatactttctgtctccaaaagagcagttgacacctcatctacagttaaagtagtctttccaaccaaaagtgttgtcactaatgtctcatatgattttggtaatgatgccaacaaaataatagcttgatcctcttcatcaattttgacctctacacttaacaattgagttatgcacttattaaatttatttatatggtccctaacatcttgtccttcaaccatttttaactcatataactgcttctttaaatataatctatttgttagagattttgacatataaa

SEQ ID NO: 403874 - DNA, 892 bp, Cannabis indica
agaattaaaatattatcattattatataatagaatcttaacaactcgcagctactttaaatttgatctttaaagttttctaatttttttattttaattttaaaaaaatattatatattttatattttatattttttattgtttacaaaaaaatatcaacatataaagttttcttaaaaaactacaatttttttctttataaagtgaataaaaatataaatttaaaaatattaaaaattatttttatcaaatgtatataaatttataatatagaaaaaaatttaaaaatatgtagaaaataaattttatataacatatgtttatatataaatttgtggttacctatggtgactgaatttgaaggttaataaagtttgattttcctttcaaaatatatatatgtggttataatgaattagattaaaatattattattattataatcgaatcttaacaactcgcagcacttaaaatttattttaatattaatatctaagtgtgtaattggatatccaattacaaaactgattcaatccaattagtaattaaattggaatgaattttaaggtctaataattggattagattgtatgatgatttttcgaatccaattactaattagattggatcagatggagagaaaaatattggattggatcggatgcccacccctaacctaatattgaattgaatttttctcttaaatgtaatatatgtgaacacttggagagatagaattgaaggcgaagattaacaattttatctacatcttgtaacatatatgacacttagagtttgtttggcacaccgtattacaccttattgtattgtataatattatattaaattgtatttcattgcaatattttatgtaaaactataagtggtattaa

SEQ ID NO: 403875 - DNA, 715 bp, Cannabis indica
attcaaacagcaccacatacatatgacaaaaatactaattttaatttacaatattttcatatataagtaactcatatgcttacaaagttcaagtgatatacaattaaatttaagaaacatccataaaaattattctcattttttatattttttgttaacatattattattgatatatatataatatgtaatatatatgcatattatataatttttaagagacaattcaatacaataatttaattagtatatatgttgtgacgttaaaagtttgatagatattttttttttcttgtttaatagttgaaactttattagattattaatttttaaatttttaataatttaatgtttgataataataacagtgtaaatcgctataaactgcaccgcactataccgtatttttgcggtgtagtttttacgttttaaagatcttgtgaggcagttgcagtttgatcaataattgtaaaaaccccatatgcagtttgatttgaaaaaaatagcctaaactcccactacttacactgcaaaagtatccttaattaaaagtcgatcatactttatatttaaaggatattaagctaaattttcctattcatatttatataaatttcatattttgttttgatcgatgatcaactgtgtggaatattggatcgaaccaattcttatttatttcttttctttcactatcttataaaatgggcgcacta

SEQ ID NO: 403876 - DNA, 550 bp, Cannabis indica
ttatttatttatttttttattgtaacctgacttaataggctcattatcattgttattttgtaagctaaattttctacataaactttatttgatttacttactaaggggatgtttggaaggttaatgtcagcaagagaatgataatgtgaagcattactttgtttgttttgaggatttagccttagaatattatttccttaataatataactactcttgaggagagtaatgttgataccttaaaaaaggtatatataattgaattattatcttccattataaacaatatttttgaattaataaataaatttaaataccaataatattatcatttattataaataaaatattacgatatatatttaatctgtgagatcagttatttttaattgagttatttttatattattagtaataacttatatgtatattcattatacataaattttatgcggatgacgtacataaataataaaaccaacaaaaataaataacataatgataaaatatataaaaaatttcattttaattaataaaaaatataataaaat

SEQ ID NO: 403877 - DNA, 2630 bp, Cannabis indica
attaaataattagggtttaagtaagagattttattatatttataaaagtacatattatgggaaatttatttgagttcgtatatgtttattatgctatttatgttaatttctcaatttctgtgattgtgtttggaagctgtggaaatcgacgttgggcctttagagagtcgtattttatattatctagagttatatcgggatttgaaatgaccaaattatccttaggttgtttaatctttgattttaattgaatgggtaaataggtcattttaccaagtattcttttggcttttagtgggtattagaagttgccttttattaagcttatccttagttaatattaataatattagaagaagaaggaaagaaaggaaaaaaggatagattgaagtaacttagaagcatctctctcttcctctctctttcgtgcaacccaaagaaccagcaagggaagggattttgttgctgaaattgtagtgttgtaacctgtttaaggagattcaatctaaggtattaactcctagcctttcctatttgattttagtaagcaaaagttaggtttaaagcttgattttgggaattttggtgctgtgagtataattgtcattctaattgaagttctgaaccttattggtaatagattaagttgtttgcagctatctttgtggattgttttaaggtttttggcaaggattgagtttgataactcaaacctagctctctaatggtgttttagaaattggtgtgaattgttgagttctgttggttgggttgagtttatttgggtatatacaggtactctagagaaaattatgaagtttgggattgaattgaggtgtgggggacggatttttggttaccagttcagaactggaattccggtgcctgggagcctgtggcaaccggtcgaccggttggtgccaggaaccggacttccggttgggaaccggtctgccggttggggttttttcccgagccttagtttttctcgtttttgcgtagtttagggtattagcatcctatttatcgatagggttattcttagtttcaattttaaatccccgataagtgttttagcgtgtctctcatcgaattctgaacattatggtttagggccctgtaaagcgtcgagctgcgatttccactcaggctgaccggcacactgacttgagcacggaacgaggtaagatagcataagaatatatatatatatatgaatatatgcttgttttagatgtttgcactactagcactagtatgaatgtgacttatagagtgttagtatagtgttgtatattagtgtggttacggtgttaccaacacgagtaccaggggtacgtcgtgcatgtggtacaacacttagtaattctcgggagtacagttatggctctaccaacacgagtacagggttggtactttagtgcatttggtacagtggtcgtacttcccttaagaacgttcttatccatttggtgagcttaattattgagctcagggcggcttaatcacaaagccgacatcgcattacttatatatatgttttgcatatcttactgagtctgttgactcatcagtttgctaccttgtgtaggtaagggaaaagcaaagctggaggaacagtgagatggagctcgacagtgattgtacatatcgcggcagtgcaacctggagggtttcggtcttttattattttgagtctctattttgaagttccatgttcgcaagtttaaaaaaaaatattatatgtacatattagtaaaatactttgtaattgtattttgatactcgggatcccgacccatataagtataaagttatcttttggatttaaaaatatttaaatacgggcgttacaccgccataatcccttggattgtaaaaacggacaggggtactgcaacattatagcacagtcttgcctctccttggttaccccagaccgttcctatcccagccttgtgagtgggaaacttgaggcacaagtgcttgatggaagtgaccgctccaaagtcaactaaggctggtcggcgcagaagggtgttgtaagcagtggggcaatctactaccacaaaggtacaatacttgaacgtactttgtggagtgtccagacatatagtaacggggagtctaacctttcccataggaacgagtgtagtcctgttaaatcctgtgagttttgaaccgcttggggagaggtctcgatcagtgaacccgatggccgcgaaagcctccttaaacaacaagttcaccaaactctcgttgtccaccaatattttggccacaattttgttcgcaattagggtttcaatgactaaggggtcatgatgcaggaacgtaccagcttagcatcttcctccatgaaggtgatgggttgatcaataagtctcagtctttgggccaaaagttgactaacttcccatatctccccatcatactctagagccttagcatagcgcttcaactcatttctcgtggtccctcctatgtgaggacctcctaagatcatagcgacccttccattcgtccagggaggttgtctgggcacctgctaatggggcatacccccaagaggtatttgtgttaggttttatgccctaaataaaactccatttcaatgtaatctattttat

SEQ ID NO: 403878 - DNA, 519 bp, Cannabis indica
ttttttaaagaaaaatagaagttaaactcaacaaatattatgtttacttaaataaatttaaatttttagaaaaaaataactcaaatttatttttataaaatttaatttttaccaaaaattaaattgttaatatatatttgttatatatgaatggattttttaaattacttaataagttataaaattttaatttttttaataattcaaaataaattttttaagatttaaattaatttttttacaaaaaatattgaaactttcttatttttattttgagggatactatttaatagttgtcaaaatttaaagaacaaaattgctaatttataaagaaaaatgttagcatttaaatgaaataatgagacataacttaagagaatgattaaatttctgtaaatataaaattttaaggtaatttttaacaagttttatattttaggaataattgcataagacacaatttttataaaataattacatttttacgtttaaagaatattttttttacattttacggtt

SEQ ID NO: 403879 - DNA, 651 bp, Cannabis indica
caaagaaaaccacgcgtctggtctacgcttcagatcctcaagtcgctcagcttgccaccctgcccagcgccgaacatgattcgaccgtcccgatggaggaggatcgcgagggggacgctaaggtccaggaggttgaggagctggacgatgctcgtctgggcattgcttccgaggcggagggagaggaagaggttgaacccccaaactacggggagtacaatgaggctgggcagccagtcgatcctgacggagacgtcctggttgagggcgtggactatgtcagtgaggagcttgcttcggcagttcctcataggaggcaaggtgctttgggcgccaggtgggtaagtcctccgtccaagatttcggaggcgcgccttcgaactctcgaccaggatgggtacctgggcgagctggactgctacattcctgcccacgacaatcgtgccacaaaccctgataagggaatgtgcgactggtcgaaggctcacggccagcaaggggcactgatgcccttgcacaagtacttcatagatgtggcagacttctttggtctctgccggacccggatcactcccaagggaatcaagtatttatctgccctcttcgtcctctacccttcccaaggatgggatgctccttctccccacgagg

SEQ ID NO: 403880 - DNA, 637 bp, Cannabis indica
attaaacaggatgaaaaatattagctttctttttcctcagtacgataggatgtctgaaagtaaaaaattatataaacaccaaatatgcaaatggatccttccaaataaagagggcattgattccatcacaaccgagagaagctctattccatatataatcagagtgttttcgaagaaatcaattcaactactattattcggtcctacatatatatatataattttatcatggtataatttttatcatcttttcaattctcttattaattaaataaatcctaaaaataaatataaaccctaaaattttaaaaacagttttagaccaaagtaagatttcttacgaaactatgaatgttttggtgaaataattcatcaataacgaaaaaaaataaaataagaaaaaactgaatggcatggagatgtataacatacctagaaggaaggagcgtagtaagcctctaaacccgatggcatacggttgttctgatcctgtacgaggccttcaatctcggacagacaacgaaagtttgagatcggagctggcctggatgggtggagcagcggcgacaaattgagagggaaaccagagattggggctcgggagagaaaaaaaagaaaaaatggagagagagagaga

SEQ ID NO: 403881 - DNA, 744 bp, Cannabis indica
tatatataaatatgtgtatgtgtaatatatatgcatgctaattatgattcatatactaccaatactagtacggtagcagtactgagtgcattggtacaatatatgatgttcaaatagtacgatctagtgttatcaacactagtacggttaagtacgtagtgcatgtggtacaacactcagtagtgctcagggtacggttccgtcctaccaacactagtacgagacgagtacttggtgcatgtggtacagaggttgtacttctggtaagaacgttcttgctcatttattaagcattgtggttaggtgtatgggcgcctaaatacaagttgataatattatatattatatacttttcttaatgagtctattgacttagagatattgctttcatgtgtaggtaaggggaaggctaaagctgaacaatagtgagttctgagcttggggatgattgttcatgtcgagacggtgcgacctggagagttcggtcttgggacgacttgggcttcattttgtggtcgctgtgcaacatgtctataaaagttattttgaatgttaagtttaaaaatgggatcccagttttgtatataaatataggctaattagtaacttttctcctccgaactttgacatgtactaaatcatgttctctgaacttttttggccgttaaaaattccccctgaactattaagattgttaaatttaaagacttttgtctaattttagtaaaaaaaatctaacatgaa

SEQ ID NO: 403882 - DNA, 644 bp, Cannabis indica
tctcttctctcgatcgcagctactttggcgaacaagttagcatagtcttgagccaacgaggaaacttgttgttgtgtcgcagttggccctgagttttgattattaggggctagatccctgaccctctcgtccaggccatctaattcccctatgcgcctctcaagctcttgaatcctttgggtgttgctcaccattatgtcgtgttactaagcttccctttctcttggctctgataccaactgtcacgggccgcctatttggacacccccaaataggtgggacgtgcggcacatgctagcacaccgagctagttagtcagcctaaacgcgcctgcaggcaaacaagttcaaaggttaggcaagatacatgtctcgcacatgttgagtgcaaacaagaagcctgagcaagcaaacacaaagcgtccccaaggaccaatctcacacaacccacaagcaaacatatagacaaatggcacacaatggcccaacaaaggcaacaaataggcatcacaaagaccatatataagcatacacaagaagcatggataaacatcgttttattaatatatggccttgatagggcaagggagtacacagctggcccctatcatgctggtgacaaggtgcttcataagtcacctggtc

SEQ ID NO: 403883 - DNA, 1453 bp, Cannabis indica
gtaataaactttacatatcaatattgaattggtctagatcaataggcaaaggttcgtggtaaatggtcttgccacaccagtgaaccccacaaagctgtaaattattggtacgtgtgatattggtaggtaaagatcccattcattgtggtaaaatttattaatttgtcaattttaacaagtgaaagaggtttaattatcatagaattggatctataagcaaggcatgaacagtttctttggtcccttttccaactttagtaaaaccatcaccatttttgaagacaagatccataaaccttgaaagattaagagcacgatctaatataggtgaagctacataagttggcttgagaaagtagtcttcgtttatttctttccatgaatcgaaaactctcttattgagttcatcgtatgcttcttcttctgaaactctatattgtttcatataacattccactgatagttcttcatatttctctttctcgaactgtttaaatcaaagtaattgatatagttatgaactgatcatactttttctttaatcaaatctataaatatgttcttttggcacatattttgtgcattaattcttatatttttgtatacacttgacacaataactatttattatatacttacctatatatataattaacaacaaattttgaatattaattttatcaataatatgattttttcctcccttttttcagtctaacttgcctttatttataatcacatagtaggatgttaattacagagttgactgtaatctttacaacaattctcccctgaaatcatggggtttgataacatatcacgtaaaataaatgcggttattatttgaatatcacatagatgtgattagtctgcttttactgggtcaaaattgataaacgtgtgttaaatacgttgtaaaccgtattgttttgggacgtctcgctggaaatagagcagtggtaaccttgatagcgagttggagcttttcttatttctttccaaggttgataatgtaattttcgtcgcttttactcttgaaacataacaccctatctgacaatcgcagtttttggtgacgaggtgatctttttcgcgtgcatgtcttcctatggcgaggtggacacctcgctgtcacttgctttggttcatccgcctattatacgtagtttatatattgcatactatacgctagtgtcttcacagtcagtatatctcatccacgtaatcgaggttagtgcctcgtcttatacacctgaagttacatggtttctcgttgatgcgcaaggcaacagtttgtatatctttatctcgcataagaccattcagacagccgatcgagttgtaaataaactctgtcaattatgcttttaacgagttattccacctcaaatgtaattataattatcttcctagcttgacacgtgttttcctctgatgtgttagccgaatttcg

SEQ ID NO: 403884 - DNA, 1768 bp, Cannabis indica
ctgcaaatggtcagccgccaaattcccggtaacgagttccacttgtgggcctagcggtaggcaggcagaccttgtctaggaattcatgaggagaggtcatacctgatatttccaaccaggttaacgatgtcattccacctgtcaaccaagcaaatcaatcactaagacagccaggtgcttctgtattcaaaaggttggggacgactcatgacctaaggagtgacctgaatagaaggagaggaataggcgatcagattgtcgcgacgatcgtgtagcccgaaacccgtgctcaaattcctgctcagaaggatactgatgtgattcacattgaccagaatgccaagcaggttagcccagccgtacaggcacaactagacgaactaaaaaatatgttccaaggcatggctggacaaagaaataatgatctcgagctagaccgagcacgcggaactcctttctctcccgagatcaatcttctggcgttgcgccacaagtttaaaatgccaacataagatcctctttcccacctcaagtatttcgaaatgcaaatggatttacaaggggtacgaggggacgtgtgttgcagaatctttcctgctaccctgtcggaagccgcccagcaatggtatttcaagttggccgctagaaagttcagttcatggaaatccttctctttggaattccatgcacagttctcatcctctcgccaacttccgttgcatctgggagacctgtttgaagtcaagcaaagaccaagcgaacctctccgagcatgcatcaacagattcatcacggaggcgaccaaagtttcacgggtaactgaagatggaaagttatccgcgatactggggggcattgaagtcctcggtgaactttggaaggatacaggaaaaatggaccggtagactcaatcaatgagtgatttttcttgaatgtcgaaggcttcatcaagctcgaagaagccattcaacgagcagaaggtgagcaaaagcctagcaagtcgaaagctccttctattggaacgaccgcccaactccctcattacccaaataattcaaactcaagtggtaaatgttccaacaacaaccacaagcaaggaaatgggaagaagggaaagtttgcccgcaaatgtaaacaagctccccgggagaatcaagcaaagtacaccgcattcactatcttgactaaagacgtggaaagtgtttacatgacaactcagtcataggccccatataagaagcccagacccattaagaaagatgtcagtaagagggacatgacaaagttttgttgatttcacggagactacgaccatgacactaatgaatgcaacaacttgaagcaggaaattgaattcctgataaggaaaaacaacccacacctgcagaagtatgtcaggaccgattagggtcagagaaacgacaataaccaagaattactacctccaccggtagatggacatctgcaagtcatcattggaggcctgcatatttctgaagatacgggcaaggctcgggagaggtatgcccgaatagcgcagcacgaacaagaagaagttatcctggccatgaaagaaaggaagcccaaagttccacgagtaggagggcctaccataactttcaacgatgaagatgttgtaaaaattatttccgcacaacgacccgctggtcgtggaagaacagatagccaataaaattgtggccagaaccatgattgataatggagcctcttccaatatcttgttcaaaactacttatgaaaagatggg

SEQ ID NO: 403885 - DNA, 1055 bp, Cannabis indica
tgtggcttacgacacgcatcagggcctcctagaaagattgaaggttcttgcttgtggaacctttcgtacaacggttccatccgattcactccaacaatcagcccttcttgcacaacaggggcaggagccacctgcatttctagagcaccctgcttccccaagcgtctgatctcttcctcttgttcattgattctggcttgcattgctacaaacctgttttcccaattttgggtaaccggcggtagattaacatctccttgagtgcgtgccttgcctctaggagcctcttcatcggccacgtctattcgggggaaactaactccctgaatctgaccattcctcttggcttctcgcgttttgcctgacgttcattctaatagaacaacccgcgaaaccaagaactagcctggtcagatcacggtcaataataatttactaattaccccttattttagaaattaaaacatgcgcctattcggctatcagggtactaacatgcttcctatcatgcttttcttataacatactaataaaataaacttctaaagcaataaaggcttactcaaccgtgagtcgaactgattgctaatgatgattgtacatgtcgtgatgatcttcggaagaaaacttagcgactctgatatcaaattgtaaaaccctactagtttaagcgtgttatcgtgattttaacttaattgtgaagctcgttgctaatcaacgagtttattaaaaatcgtaaataattaaaactttatttaattatttataaattccaaaataaataacacatatatataattgggatcccgtttataaaatatttacaaatattacgtagtgcataaaacaaaagttgtcgcctagcgactatacaaaatatgtccagttgtccccaagaccgtacgctccaagcctaactgccccgacatatacaatcttcatccgctcgctctcacggctgttcaaccttagctttgccctaacctacacatgcaaacaatatttgtgagtcgacagactcagtaaaaaaagcataatcataacatagatataaa

SEQ ID NO: 403886 - DNA, 843 bp, Cannabis indica
agcttattttattgtataaaatatcgtcaatttttatgtatcaatatagacacgtataccgagagacatctctctatttattttacttttattttattgttctgtttattttttttttgacgtgttctcttagttttattagtgattaactttatatatataatatatatatttttacatattttactttttttaatgtcaaaaaactttaaaaagtttttctggttatactggtaattatttggtcttaaaagctgcaccataacgatctacattttaagatgatcattttaatatgtgggaagtatatattttttcgctatcacttaagaagataatagcaataagtaactttatagtttcttttctatttaattatccaataaataaatatttttataaattaaacaaaactcattaattagttttataagttactaaaaagtattttattatttaatatttaaaagataataaattgtattttacatagtttttatttttatttttttttatatatagaataatttttacaagtttttaaaataatttaccacatagtatcttaaaaattaatacaaaccccataaattactctaaaatttttgttattttttacttaaaaattattaaatgatatatttagaacaaatctaattaattaatagaattattttaatatatttttaacaaaacttataaagcagccaaaaaatatcttaaacattataaaattaattatattataaaaactactacacctaaaaatttcattaataagttatatgataagtacacatagtttatacacatagtttattgtatcttaccataaaattactc

SEQ ID NO: 403887 - DNA, 924 bp, Cannabis indica
tattttatttataattttacatcttaataatttttaattgtaaacataccaatgtaaaattttaaaattacaaaaatatattttatttaaaagtaaaaaatgaaattaaaaagtaacgaaaaaattatccttacgacaattataaattatcaaccagtaaaataatcttatgacaattataatacaactataaatacactataaaaaactattaattatttttattggaaatatatgtttgtaaataaaaaagctgagtgagtaaaaatgaaattttttctatattgttgatgtatttttgtaaaattttaaattttttaatctattacataaattttttattattattattagacactagtaatatttaatattatatgactaagatgatattttatatgtcgttagcattttttatagtaattattaaaataaaaaatatatatttatttttaaatttgaagaaaaaaaatatgcagaatttaaaaataaaaaatacaaaaatatgggtaaccataattatttttctataaataaaatttacacatttataatagagaaatgctaaaaggcacccgtggtgccaactatcctcctatgtatcaatatcgctattggtctaatttagtatcgggtcccataaagttgatagcttttagggagtatcgctagccaatcgtaaggcgacacgtcttaagagtgttaggcaccactgtcgctcaatagcaatgctttttataatatgtgttttgtaactaaaagtttaaaaatttagaaccatatattacggttttgtatacaatatttactattggagaatattatcccacatggattaaatgtgaaagtattgagccatatataagaacatgggctactccactcattgccaattggttttgagatggaaccccatgattctca

SEQ ID NO: 403888 - DNA, 605 bp, Cannabis indica
tatcataattatatttttaatataaccattaaatagtctcatgcaataagaaagaatactccaaaaaaatatatttgttcagctaaaattattgacctactctagttgggaaatttgaaattgtatacttaataaataataaaattggatacctaatacaatagtagacataatttgtaaagtgggatacattttactaaaacccaattttacccccctcatttgaaaagtcactctctctctcttcgtcccctattctctcaaaccaaatttcgcccaaacgcacggatgagcagacccgacccctctccacctcgtacgaccgaagccccagccccctctccaccgcgcagcaccaaatctccagcccccctccacggcgtacgaaggtccagccaccctccaccgcgtacgacccaaacggaaatggccaaggtatgttcgaccgacctctttttttatttttgttattgttttgagtgattatgacatagagtattgattttagggtttgatttgaacggatttgttagatttaggggttgatttaggctaagaaatcggtttggaagacaatggcccgatgggacccccgatgggtccga

SEQ ID NO: 403889 - DNA, 500 bp, Cannabis indica
accgtagatagacagtagctacggcgtcctacaataattaatgaatacatttcttttatttgttaatatatattaatagttatattacataaagtgtaatagtgaacaataaaataacacatgcaataataataatcaaataaaaatttttgtcaaataaaaatgcataataaatagatgaaaagttttacactaaaaaatatctgaacgatcttgattactgttgatcttatctaaatttgtgttgtgctaaaatcagatatacgcaagtgcacgtagtcacaaacaagtaatataatgataagtaaaagagtatcgtctccataggaattgattagaaattaattaagtaaaaatcaatactaaacaatttaggtaaaacaaacaagaagtgctgatgatttgaactaggctaaaaactaaacaagagagtaaataaaatgagaaagaaaaatgagcaaaatgatgagctagaacaatcaaatccacttagaatgcaa

SEQ ID NO: 403890 - DNA, 572 bp, Cannabis indica
tttatatttatgagtatttttttatgtttttctccatttggttaattgataaaactggttttaattattttcattgtatatcatttttgttttgttttcataatctttattattgttgtgtgacgaaactagttccttgatgaagaaactactttcttggcgaaaaaaccggtttcttgatgaataaaccactttcttggtgattttttcggtatttttgctggcgcaatgccaattctaacgactttttcgacaccgtcagtaactccgacgaaatttctgacactggcagctactccggcgactttttcgacaccgaaaacaaactccagaatagtcgtcaaaattggcattgtcgccggtaaaacagaaaaatcaacaagaagctgatttcttcattaagaaaccgctttcttcatcaataaacctctttcttcatcaagaaaccgatttcttggtaatttttcctgttatttttccagtaataatgctaattttgatgactttgtcagggccggtgacaactccggtgacttttctggcaccggtaactactccgacgacttttctgg

SEQ ID NO: 403891 - DNA, 527 bp, Cannabis indica
ttgatgtggaaggatcggttattggcataggagcaattgttttagattactttggagatgtgattactgcttttttgaaacctctatggggttgtttttcctacaaaagagatggaagctaatgccattattctcagtttatgaaatacctcccgccattaatttttatgagttccagtttcacactttagatctgcaaaagaaaaaaaaagctgattggtgtgggtatagtagacttccaaactctctctactctctttaggtagacataatgtgttttacataattagtagtgagcttggatatcgatatcctatatttatataggtaagaccttttattaagatctctactacaattaattgtaaaaatattttgataattaattaataaattaaatttaataattaacatgatattgataatgatcattaatcaaatattttgtccataaaatattgatttaacataccaaatcaatctattataattaattaattatatataatgtgataaaaaaaataatt

SEQ ID NO: 403892 - DNA, 569 bp, Cannabis indica
tatgccactagtccaaccttctcttgaatctcaaaaggtcctttaaacgtagggacataatttgcctcttttcccgaaacatttgatcctcttcattggagacactcgtaggaatacatgatatcctacctgaaattccacacttttgtgttttggatctgcataactcttttgcctactctgagaagcaagcattctggccttaatcttttctatagcttcattagttcgttgcactgcttctggacccagatatttcttttctcctgtttcatcccagtgaatgggagacctacacttcctgccatataacaactcatagggaaccatccctattatactctggtagctgttattgtacgagaactctatcagtggcaggtacttgctccaggatccttcgaaacccataacacaggctcgtaacatgtcttccagtatctaaattgtccttctggactgtccatcagtctgaggatggaaagttgtactgaatttcagtttggtacccctagctcactgaagactctgccaaatttagaagtaaacttcggatctctatccgatat

SEQ ID NO: 403893 - DNA, 795 bp, Cannabis indica
acaccaaatgaacttttactacatactatatcattaaataaacaagacttggatttagaaatattatagcaaccatgtaaggttacaaatacattgttttatgctgtgttttctttttttttttctttttaaattaattaatttatttggcttgagctttttgaacaagataaaatatacacgtaagaattttcatagtcctttctaaagcgaataaaaaatgttagtcaaaacatacctaacaagttcgactagatctagcttattacgttcataatattaatcgacgatcactgttggtgttttcttcccgcgtacgtgacttttaacataactagctcttaccggaactcttctttatatccccacacactttctagatgggtacaaatagtcaacggtgactatcggttttagttattgaatttcgattataaagtcaacatttacttgtatctctttcatactaaaccatttaccagtatacttactctgaaataattacaacttactaccaataattcttataaatttatgtatttattatgtaatatattctgagttagcagaactgctacgtcgtgaaattagaatcaacaaatctctcctcatcacatgtttggacacagaaggcaccttatgtgtaaatctctctttagacaccgtcaaaatgacctagaaaataaacttccccacctatacaattattttggggaagcaaatggattgtttttagattttaaaattgcgctcttagaaaattttgtaacacgtgtatgcttttataaactaatt

SEQ ID NO: 403894 - DNA, 759 bp, Cannabis indica
aagggttgatcagttaatacttttagtgggtgcgcctgaaagtaaggtcataacttgcgagacgcttggataaggcataaagcaagtttttcaagaggggtgtacctcgactatgaccctagtaaccttttactggcatagtaaataggttgtaggtgcttaccctcttctcgcactatagctacactaatcgcgtcttccgagatagccaaatagaggagtaacatttctccagttattagttttgccaaaactagaggcatcgctaaatgccttttgatgctctaaaaggcgtcttcacaatcttctgtccactcgaatttcttgttgccttacaatacatagaagaatggctaacacttatcagttgacttcgaaatgaatttattaagtgcagccatccttcctgttagggcttgtacttctttaggctttgttggtgatggcatatctatcaaagccttgatttttttttcagggtttgcttcaatacccctcgcgttgactatgaatttcagaaattttcctgaggaaactccaaaggaacactttttcgtgtttagcttcatattgtacttctttaatatttcgaagcattttgcaaggtctgtggtatgactcccacttttcacagactttaccaacatatcatcgacgtaaacctcaatgtttcctccgatctgatttgcaaacatcttgttcaccaatcgttgatatgtcaccccaacattcttcagcccaaatggcatgaccttgtag

SEQ ID NO: 403895 - DNA, 646 bp, Cannabis indica
attttttttccctataaaattatgtctctgagatttgttaaattttaatgacttttgtctaatttcattttaattttactatttctagtaatttgtttatgtactaaaccatgctccttagactttgatatctagcaagttatgctcctcgaactttgacgtgaattaaattatgactcctgaactttcatccatgttagaatttttcttactaaaattgaacaaaagttcttaaattcaacaatctcaatagttcaggaggtatttttaacgacctaaaaagttcatgagacataatttgctacatgtcaaagtttagggaaaagaaatcctaattagcctttaatttaataaatattataaggaattgttaatgaattataaagacgtgatatcatagagatactaaattaagagtacacccacgtagaagtgaggtgaagcagtcgctcctttagaaaaacttggagatatatttataataaatgagatatttataagcataatagtataatgaataagctaaattgtaaatagactagatgttagactatctctaatggaagatctaaaatgtacgctaaatttgacacaaaaaaaagagttagttgctatttttagctcattatttacaattgtgctccaa

SEQ ID NO: 403896 - DNA, 1000 bp, Cannabis indica
agtttgcagtggctcgtctttctgcaattcatcgagtgattcagctaggggtacgtcattggtatcttgattgtacattcatcttctgtgggaaggtggctcgagttctacaggcagcataacttcatatccgtacaccattgcgaatggtgtctatccggttgccgtcttctcaattgtccgatatgaccatagaacttcaggaagctcttctggccaatttcctttggcatcttcgagttttttcttcaatgtatccttcaaggtcttgttgactgcttcaacttgatcattcgctggaggatgggccactgttgagaaacttttgatgataccatggttcgcacaaaagtcagtgaatgattcgctgtcgaaatatttaccattgtctgaaactatcttgtacggaagtctgaaccggtagattatgttcttcacaataaagtgttgaactttctttgatgtaatggttgcgagtggttcgacttatgtccacttagtgaagtaatcaaccgctaccactgcatactacactcctcctttacctttgggtaactgtccgatcaggtcaattccccaaatggaaaagggccatggactctgcatctgagttaactcgttaggtggggcttgaggtacctttgaaaatttctggcatttgtcacacttcttaacataggcttttgaatcttcaatcatcgttggccagaagtaaccttgccttagaattttcttagataagctttgcctggcggcatgatttccataaaattcgtcgtgtacttcagatagtagtcatgcagcttcttcttgggtaacacatctgagcaatggcattgagaatcctcctctgtacataattcactctactatgatataccgtgcagctttccttctcattttttgagcttcatttcgattatctgggagtttccagagttgaggtaggctactattggtgtcatccagtttggggaagtatcaatcatttcaatctctt

SEQ ID NO: 403897 - DNA, 551 bp, Cannabis indica
ccagtctggtccgagtttcgggtactaggtgttagtcaagttcttggctcctgggttcggccctagtttttgggtctaggttttgatctgtatctaggtcccagtcttggcttaggtcccaggtcacaagtcgcgatctcggtccaagtcccggtatgggttttggtctgagtttgggtttaggttttggccctgttacggtccaatatctgggttctagtcccagacctggtctgattccagtttcgggtccgagattaggtcagacttgaacctgggacccgatcccagacccaaacacggacctagacatggatctggatacgaacctagacttgaacccagacccagacccatacccactgggatcgaaacttgggagtgggattcggaccgagatctagacccaaacctggacccgtacccaagacttggaccacctggactcaaacccagatccagataggcatctggacttggaccaagacccaaccctagactcgaactaggactcaaaccccgacctagacggagacccagacccaaacccg

SEQ ID NO: 403898 - DNA, 694 bp, Cannabis indica
gatctacataaccaccatgcgatctcaagacacggacactcagatatgatactcttaattttactttttttccataaatgtttctacaattcgttattactcttttttgtttttctcatttgatttaacatagagttttgatcttatcaatttttctcttatctatgtgtttcgtttttttttttttttttactgtctttttctttgttctgtatattttatttttctagaggtacttatatactacaatttgaaatagtgtcagtcctttacaatatttcttgactgctattttcatcttgggttcaatcaaactcctttttctatctctggattccctaccattaacaccatatcgccacttttctgtatgttgatctgaatggagatttcagtgctgatccaacaatgtctttccaacttatgttttatcattattattattataataataataatttttaaatactcatttttaaaatatttttttttttgttgtgtgaccaaatcactatgcgactgtcaaatttttggtagtttttatttgtcactaatgatcaggggtgattactcatgcagcagtttcttatggctggttgggtggtttgttgaaagtggtgtagattttcttggttacttttttacgtgcctaattaattttaatttttttaacagaattattggtagttattaa

SEQ ID NO: 403899 - DNA, 641 bp, Cannabis indica
tatatgtgtatagatatattctaattcttagtagtaaatgataacaagagaatgatatcgatccaaagctatgcttgtaatattcaaatatatacatatataaataattataatattcgtatacatagattttgaagggagtgtaggtagtgtggcgccctggctttcatttaaaaattaattaatgatctcggaaagaaaaagaaaagagaattagaccaccattgaagtatatatatatatatacatattgctggctatgacaataaatatagggtcgttttagtataaatatatgattgtgttatatatatatatatatatattaattatatttggtatgatcatgagtactaaaagtaaatattttgaaatgaaatttcaatgactcttgacaaattgaagagctattagcaatgtgtcgatcatgcaggttcgttgaacatttccctagaaataatattgctattctggccctctattatttattattatacattatatatactttacttgtataatattatttaaaataaaataaaaataataataactatgttctatctcatctttgcaccttttttcacatattactaatactatgtacagtagaacttctattcaagaatacacttgggacc

SEQ ID NO: 403900 - DNA, 508 bp, Cannabis indica
gtacaatatttagtaataaattgtaacgattttccaattgtaaatcgtgtgttgaaaaaagaacttaatttttcttttcaacaaatatataatggtattatatattattgagaaaattatatgatatacccattttaatttatttgttttaatttttacctctatttttatattattctttaacatatacccacttttatagatgatatccctattagaccctttaggttaatataaattatatactatacttaagtagagagtgacggtatattggataatctactcaaaaaagtaggtacattttaataaaatataatataaaactatttttaattaatggataaaaaaaaaatatttctctaacttactcctatattatttgtaggggtgttcatccgatccaatccgcacttttttggtcaaacaacatccaatccgcacaaagtgcggatttcatattttggatccaatccgatccgcataagagtttaaatccaatccaatc

SEQ ID NO: 403901 - DNA, 734 bp, Cannabis indica
  modified_base (263)..(263): a, c, t, g, unknown or other
acaacaacgtcacaaagggttcgcattcttctttgtttctaatcttaactctctcattcttcttctacttctgcaaccattttcacataacaaaaaacaaaggaagccccgattgattattgtgtagatatgaggaagtggaaaacgacccacgaaacaataaatgtttgtgacgaggttgaatatatgagacagaggagagagaatcgtggatagacacaaattcagatacagacagagagtcttggtttttttttttttcnctctctcgagaagatgaagatgaatttgggaagaagaagaaaataaaaatggagtctttgggatttgatgtgaacgcgctttaaaacgtcgacacttgtctttatgtttctggttttgggttttgattggggcactcccttttttgtttggtttggattttggaggacgatttagcatttttgtccactgaattatgtttatgcgataatttgagaaataattcttttttattcattaataaaatattcttatgttatattttattaaaatatatttatttttttttgagtagatttctcaatatactctcactctccacttaagtttattatatattttacatcatcaataaaaatgaatatatcttaaaataaaacaggtatacaatacaattttatattattgtgattggtattttgttaagttttgtcacacgtgataaattggtattctgttaagttttgtcacac

SEQ ID NO: 403902 - DNA, 1069 bp, Cannabis indica
tacaacaaaatggagttataagaacacctgaatcaagacttgtttcagagacaaatcactccagacaaaatcccagtctcactttccatgttcttcaaccactgcttgaacaaagatgaaatctaatggcgttacctagagagtgaatcaaaaaggaaaatcagaataataagaaataacaataataaataaataaatcaagcaaaaaatccccatctttcattttttatttctccaattttttcagaatgggtatacgagaaaggagatttggaaaaccagaattccgaatcggagaccccaggagcggcgacaatttgaacgggctgagctagttgagaagccagagaaatagagtgagtaagagttgacgagttggccgacattttcgcgcggaaggtggcggaggagggagtgtagaaggggtttaaaattagaggagaaagaagggaaaaggttttggttttggagagagagtggagatgccatggcggacgcatcgcagcttggagaagctgactcggcatctctgacttcttttattgggacactcccactaaaaattggagaaaattagtgcataaatcccaaaaacttatgctgtttttttctttttggatgaaagcccaaaaacttatgctccatgcataagagaagtgaacacttaagctactcttattaagtgatgataagaggatgcttgtgttgaagttctaaagtttgaatctttgattatacaatataatatataaagggaaattttactcaaattttatacctcttactaatttgtacaaaataattccactattttcaaattctatccaaaataccccttacatttaattttcccactctctatttccctctctctctctctgtctttccatttctctctccgaattttcctcttcgtccctgcccaaaaacaaaagaatcgaacaacgaaacccaacccgacgacgacgaccacgcatacgccgaacccaacaaccctcttcttcccactctatttttccctctctctctctatctatctttgttttcctctttctctctctctcggtcg

SEQ ID NO: 403903 - DNA, 530 bp, Cannabis indica
cgatttatgatactaattacacataaccaattcaattacatacgaatcaaataaatccaaatctaattataaaaaaaaatggatattaaattaccattggattggattgaattgagagtagttggataaaaatcagttttttaaaaaaattttaaaatctaattaaaaattgatctaatctattacatgtaatacatattaaaaacatatttttcttattcatatataatatgaaaaatatttaaatttatttttatttgttgtttataaacttaactaaagaaattcctaaaaaaaccctaaaacctgtatagtttagtttttatgtatttttctagtcaatattaaaactcaagcgttgaatagaaataatattcatgatgcccatccataatctaaaccatctattttttactaaggtgccaaatagccaaataaattatgaataaattaaattactataataattctaaatttcgattttgatatttttttttagctaattatgaaaattattattcttatttaaa

SEQ ID NO: 403904 - DNA, 539 bp, Cannabis indica
atagttcttgaacatacttgccttaaaaagttgcacaatttagaaatagttgttgatatatcttttgggagaaatttgcagacacggactgacaatagtcgttacattattacatgacagtcatgacacttcaactcaagaatatttgtaaaatcattgttcactttcttcttcaaatttgagcaaaatccatcatgaaacttcacatccttgataaattgataaaatttaagtttttatcaggtttgagaacgtaagcggcgtgcgacttcatcaacttaccattgtcattttcatatatccatagccattcctttactcccaacttcttcaaatcatgtcttgcgttagttgtgtcttttgatttatcgttatgtaggattgtgcccaagagactatcacacatattcttctcaatatgcataacataaatattgtgtttcaaagtgtttgtacaacaataatcaagctcatagaagatacttcttttcctccaattttgatcttctacaacctgtctacgttacacgcctccaaac

SEQ ID NO: 403905 - DNA, 732 bp, Cannabis indica
ttaattaatgagtaaatgcaatattaattgtgaataaacctaataatgatataacagtttcttggtcaaatataaggaaagtatagttgtcaatgactaagccatgagataatcccacatatatccctatcatatttttttgtaactgttgtggtattttcaacacgcaagtatatgtaacaagtaacagactaacaaagagtgaggtcgatcccataggaatgatagttaagtactttaaaattaaattcttacttctatatggttaaataaaattaagagatcattaagcaaataaataagtaaggaaattaacagttaataaaaattagagtttcgatttcaattgtatctattgaatatggcttaatatgattatcttcctcttatcaatttctatgaaatatcatgtttactaaggtaatttgtcttctcaaatatataaatctcaattacatgcaaattttctatcgtgataaatcaaacatgtaacagacattaaacacagaaatcctataagctatttaaaccatacatgtactcccgtcctatatcgaaattcaattcttttttactatagcataatcgaaactcacttctcaaatctcgcatcgaaatcataaaacaattaattgatggccagaaaattaaaagtaattaagtacgaatgaaatagaatacatagaaactggaggaaaataaattaatcatattaaaaccataaagcaatgt

SEQ ID NO: 403906 - DNA, 525 bp, Cannabis indica
ttttatgcgacattatgcgattactgggcgattttagtgcgatgttaactgacaggatcttgattttttagtttgttttgttctgtattttttggcgatattatgcgattaatgtgcgatttttatgcgattcttaccagaatcatttttcaagatgtcatcatttcccatagttaccgttataacaataagacaggtatttatcaaaaataaaaaaaataaagaaattgatacaagcaacaatttaaatagctttaaatttacttgatatatataattttggtgagattataatacaattacaaaagtttgtgtgtataagaataacattacaaaaacctacaaaaaactaccatgttaagttctggtaaaataagtccacacaccacctatgtctaaaggtgagcatgttaccatcattaacatgctctaacgaccggtccagcatgcagtgctcaatgtactccatggcatacactccacaattgccactacaaataaaaaaattactaaatattagcaaca

SEQ ID NO: 403907 - DNA, 723 bp, Cannabis indica
aaaaatgacaaattggaacaaactttcttacatgagatcttaccctttttgtagcttactggagaatttgcttatgcagacgacatctttgcagcagcaaatcttgaatttgcagtagcaggtaaattgccggaacactagattttacaatttttttacataactgtcaataccatttgacccaagaccagcgaagcctcttcgacctgtatttttaacttcctcaaaaatagaagatctagggttaagtatttgaaaatttttcttgaaatttttaagttcattccttacttgaataattttttcatattttaaacaaaaatcagtctcatattctttaattttcaattcaagagattcaatttaatgagaaaatcgtttatgaaaaaccgtttttttgcaaatgtcagttgtatataagaaaatattaaaactgtaaacgtttgcagcagcagaaagtaattctgctacagcaaaacagaacaggcagaatataaaatatttgcagaaaaataaataacttgacacaagagatttatacgtggtatcagtgtctcacgacactcctagtccacggggccacgcccagagaatgaaatcaattaataaagtatcaaaattacaaagacaattgacttaaacaagtttagactccctctaaagtattgtcgcaatcctttgtaatccactttaagaatctgacttcttgtaaacaccttcaag

SEQ ID NO: 403908 - DNA, 803 bp, Cannabis indica
ttgaacttcctttgtttatttttcgtttttttttttttttttttttcattttttggttaaagaaaaatgaccctatttttttaacaccctacttacttgattgatgccattatggggcattgggatcaataatttgcttccctttttgtttcttctaattattgttgaagaacataacattacaatcgaattgactagctcttcctatgacaaaactactttttatatttatctctttttgaggtctaaccattttcaaaagtacctctttttaatcatttgtagaaaacgaccacttgctaaaatatacacttcaattgggattgggcctttatgaagggtctattgggcctcaactttcggagaagtttgtgattagttgtccaaatttcactttgatcaattttgcaaattatttcttttcagtaaagttcaagattagtgcaatgaaaaatgagccaacaaggattaattatgagtaatataatacatcatatggtattgacaccctttaacagtttttttgttttacttttttgggcaaaccttaagtattacaatggctgaaattatatggaaagtcatatataataatttcaggaaattataaattttatgagtttttatacaatttgtgcaaaaaatatagttttattttattttcaaaaatgttatattatgaaaaaaaaatataagaaaaaggtaaaaaaaaaaaaataggaaaactaaataaggataaccatgtacatttaaggtaaacagttaccttatactatttttctcatatttttttaactttttct

SEQ ID NO: 403909 - DNA, 311 bp, Cannabis indica
gagagagagagagagagagtgagaggaaatgagggtgtttgttatgttaggttatgtattagtagggttttttaaaatgggtcgaaacccaattttgtaatttttttaaagtaattagcgttagttgtgcaccgacgcaaaactggtgtcagttgtgtaccaatgcaaaattagcgtcgattgtgcaccgacacaaaatttacgtcgctacataactgatgctagaagctacgtttgaggaaaattgacacaaaattcgagagggagagaaggagggagaggagagatagagggagacattctccctccaa

SEQ ID NO: 403910 - DNA, 605 bp, Cannabis indica
tgactattaaatcactattttaccttgatcacatcgtttaaattatgttaacccctgagtatagtagtactaattttgtatacaattgtttgtatgttctgtactaattaatttatttttttttgcagaagagaaagtttgggatacaagggagtgactattttttgcatgggccaaaatcaattagtacaaattacattaacagttgtgcatcttattatcttttcatgaaaagtgagatatattttgtataaatattgactgaattgaatataaaaatgacagtgaatatatatgaatatatgtatataaaaagttttcttaagctatatgaatttattcctgttagtaattttagattgctgtctgtgaaaatttgaggtcatgttgtaagttttaaaatttacgattttgataagaatgagaggtcattgctacgctttacttatgctaggagagaggtaataaacaatagactttggtaaactgtttttgaaagtgagtactgaaactatctttattatgactcctaccttgcataagtaaagcgtaacatactcaattattttttttttctaaaaacataaagctacagactaatttca

SEQ ID NO: 403911 - DNA, 1278 bp, Cannabis indica
ctctttctctctcgctctctctcatcccctagagaagctagggtttggtgtgttcttctttaattcaaggggtttacaacaagatcttagtgatttcaagctcaaggtgagtttctagcatctccctctttggttttcttaagttttaagttgtgaattatgcatgaggttgagtttttgggttctttagttattgttgttgtttgtagttgttttctggagttagattatggtttattatgttgatttgagttgatattggtggctgttattagatttgagcaagctttgagttttagaactcaagcttggctctttaatggtgaatctggattctgagcttgtttagttgttttgttgcttggaatatgtttattggggtataatatgcaggtctggaaagttcggtaaggtttggagtcgaattggttaggtttttgaaattttttggtcacttggtgtaaaatcggttaaccagttttacaggctctgtaaaatcggttaaccggatcagaatccgttttcctgcactttttgtgttttcgattcgtgttagttttagagatttggttggttgattccctattaagttagggtatttccatgttaactttcagtaggtagatttttggatttaaaacctaagtccccagttgtgattagcgtgtcacttatccatgttatgaacgatgtgatttaggggcctataattcgccgagcagttgttccactcagataggccggcacatgtgatcaattcgaaaataaggtaagatttgtataatgatatgcatatatgtatacatgtttagcgtacatgttagttgccgtcagaataacatatcagggtatcaatgaggtgtacatagagttgcaccaagataccaacatatttatgttagacaaatatatagagccatcagattagcatatcagggcatcggtgaggtgtacatagagttgcactgagattctaacatatatatgctagactatcagatagtatgagttatttgctaccacatcagtaagactagagtactgagtataggctggatttgtagttagtcatagtttatcgtatgaacgttctagactcagcaccgtgttggacacggggatagggttatggttgggtgttatgtccttttcacggtactggcaaagtttaccagtatcagatgtatgaagtacacactggaagggaccgatattgatcttggataagctatcataaacttactgttatgtctttctaagtcaatatcaatggttgat

SEQ ID NO: 403912 - DNA, 1058 bp, Cannabis indica
tttacacgataataatattcattttttttactttttgtcactcattaatataattaactttttacatttttatttggagagatttcaattgttacatacaaatttataaccatgatgattacatttatttttagccattaaattacaattgagtggtgtgatatatttataaatttaataaaaataaataataaatagtttgtaaccttatagtaacttgatactttatttcattataaaattttaattaagattaattgtatttcaaaattaaattaattataattattaattaattttttgtaatttttactaaataattatcatttagcaattaaattttttatacttaaattattaaaatacttatagcaaaacctcttataattttaattataacacatatgatctcataacttaaaatttattacacatataatcttaattgaagattattacacttaattatttatttattttgtttaaaaattttaaaaataaaaattcatttggaatcgttgaatgcattttctcaaaaaaaaaaaaaaaaggttgaatgagaaataaatttctcagagtcctcctgcctttgcccctctcaattaagatatatgtggatttagtttagatgaaagtattttttggtattcatcttcactgcttgcttctgaattaagacatatgtggaagtctaattttatataaataaaaaatagtttttaaatgatttaactgttaaaaaaattataatagggacttgtatataaaaataaaattatttataaatattaattgctaaaaaagtcatgttaaatattcaaattaaatattagtcatttaaaaaaattattaatttaattccgaaaaatgaatttttacatattggtaacctgctgttacatgtcaaaaaagtgtaatcatcgtagttacaataaaaatataactattaagtaggcaccctttttatttatatatttgatatagtttttttttatactttaaataaatttactcttttgtcactcattaatataattaaccttttatatttttattta

SEQ ID NO: 403913 - DNA, 655 bp, Cannabis indica
atcagatttttagagtgaaaaattaatacacgtcattttgttgttacttttgttttattattttggtttacttattttagtgacaaaaatgagtaaactagagtagtaatattagtgaggttagagtgtagcatttgtacttcttattttaattattggtattggttcttttatacttcatctccatatctcatttattaaattattcttcatcttctaatttttcttccaaagttaatagtatcttttatataagttcagtcatgtttttcttatgtaagttaggatattaatattttggtatatttattatattatatattgtttactgcattctgtcaatagtggtattttgtcgatttatgatatataatatgatatgttgtcaagttagaggtaagattcaatttatgcaagattaattaatttgcgcttttattatttacatcttccagttgtaaataatagtctagaattgcaactgtgttttgaattaatatcggtattagaataggatttgcataattacatttctaccttaccaagctctttatcagatcactccctttctctcatcattttatttttaactcattccaatttccaccatattctatttatactaatctttagtggtaatttgcctccctgtgga

SEQ ID NO: 403914 - DNA, 869 bp, Cannabis indica
taatatatagtaaaattataaatctatatcttatttaataatattattaataattttatttattcaaaactaaatgtataattttattaattattatttagaaagtttaaaatttattatatgtaatattttaaattactttgttaaaagaaattaattttataaaaatacatatatagggtggtatagaaaaaaattacgttgttccccataacacattattgaggacattatagtgcatttatttcatcaatattatttttcttttacttatcaaaatagcttttatatgtatttcattttttctaaatttatcttctccaacttcaccctcattttcactgtcaccatctacacttttgctacatgttgtcatttctctcaacacctataatttattgacgatcaattaaattaggacattatttcaaaaaaaaaaaaaactcaactaggacatttagaaattttacttttttatttgaacttttaatttatgagggaggtttacaatctccatcttagatcactccaatcaaatttatatctcattctctaaaatataaaaaaaagtgataaaagtgactttccatcaaatgagctaaatttgagctattacagcatctctaatagagagctataaatgtagtatatttgtttttttttttttgaaatgaaatgtagtatattgttattttataaagtattttattaaaatttaacttcaataataatgtaaaatgtgtgtcaaatttagcccaaactaaaaatacatcatattttgtttttttgttcaaaattctcccaattaatttagtaatttgatactttgatgtgttttgaatttgttgaattcatttgtatatgttttc

SEQ ID NO: 403915 - DNA, 903 bp, Cannabis indica
atggtggtcatccgaccaaagtacttgagaactttatccaaacctttgggcgtggtccacccagcaggccattcacttaacaacaaatgttcttttgtttcgtacttgatatggtcatctcacctggtacttctattggtagtattttctttaacgttcccattccaataccttggtatcagtatgagttgcatttttttcatcatacttacctaatttgtatgcccctgattctagaacttcgaccacctgatatggtccttcccagttaggtctgagcacacctgtcgtattgtctttggtgtttaaaaatactctgcataggaccatatctcccacaaagaattttcgagtcttcacttgtttgttgaaatactgaactactttttgctgatgagccatcagttttaggtttgttgtggttcgcttctcttcaatttcatcaagtgattcagcaaggagtacatgattggcttcttggctatatgtcaatcttctgtggggtggtggttcgagttctacaggcaacatagattcatatccatatgccatggcaaatggagtctatccggttgtcgttttctcagttgttcggtacgaccatagaactttaggtagttcctccggccagtttcctttagcatcctcaagtattttatttagggtgtcttttaatgtcttgttgactgcttcaacttgaccatttgcttggggatgtgccactgcggagaaacttttgatgataccatggttcgtacagaaatcagtaaaggattggctgtcaaactgcttgccattgtccgaaactattttgtacggcaatccgaaccgacaaattatgctcttcacaatgaagtcttgcacttttttggatgtgatggttgctaatggcttggcttctgt

SEQ ID NO: 403916 - DNA, 588 bp, Cannabis indica
tgttaccaaacaacatcttaatttattattcaagtatattagattattactaatctaactcatctaacattctaaatatagaatttctaaaacaataatgtaaagcatataaagagtttataaaaattcttacattggttgcagcggaattctcctttctgttgcagggtgatcaagaacttaacttgaattctccttcagttgacaaacagactacacattcttcctcactaacctgagtattgcattgatatgtgtaggcagttacttaacactcaaagtacttgaaaataagagaagaagaacaaaagaatttcaaaaattgtatgtagaatataatagctctctctttgattctatttgtctgataaaatgagtcaaaagtgttatggtaatcaaaagctatcatattatatttatggtgttacaactaggcttagaattaaaattaaatagaagtcaaaaaaaaaagtttaattaaatttcttggccgaattatacaatgaagcccatgggtttgaattttatcattttattgaaacttatcttttcttcaaaatatttttttttttctattctaattgttaa

SEQ ID NO: 403917 - DNA, 571 bp, Cannabis indica
ccgcaaccagccatgaaaattctaaactggaatgcgcgtggcttgggaaatcctagcgcattcagacaactctgtttgcttgtcaaagagataactcctcgtgtattatttattatggaaactaaattagattgtaatgtagttactcgttatcgtcaagctttacgtttactaatggtttagaagtacctagggtcgggttaagtgggggtttacttttgttatggaaagacaatgttgatgtaactcttcttaattataatataaatatttttgactgctacatgaagtgtgataatgggcaatcctggcatttctctgccttttatggcgcacctgaaacttacaaacgaatccatacttggaaactccttgagagatgtaaggatgttgcacctttgatgccttggctagtgattggtgatttcaatgaaattctttctaaccaaaacaagcttggtagggctttacgaaacgagcaacaaatggacaagttcagatcagtgttggattcttgttatctttatgagcaacctttcgaaggtgatccattcacttggattaaagggcg

SEQ ID NO: 403918 - DNA, 801 bp, Cannabis indica
taaattttttaatattttagtagatatttatcatgaaattcaaattatatataataaacaatttttattaatatctcttaaatttaattaactccaatattttctttattttctatgtgtaaaaaataaaaaaaaaaaaaataattaattaattaattaatgtgattaaaattgttacaatataagaaaaaattatattttagctatgtaaattgaaaaataaaaataagtttaaaagtactgtatcttactagtacttgtcactatattcaaagttattttcattaccgtatctcacttgtagtcgtcactacttttaacgttattatcatcagtatcgcatctcactcatagtctccacactatcaaactcattgtaattaccgtatctcacttgtagttgtcactatgttgaaaattgttatcatcaccatatttcacttgtagtcatcactacatttaaagtcaaaattttcagtaccacatcccacttatagttgcaactacatttaatatcaatgtcattagcaaaaaaaattattaaaattaatagaaaaaaaattaataaaaattgtttgaatcaatcttttgattatatatatattaaaataaagggggctattatagtagggattgggtattttacctatgaatagaaatagtaatttatagtcattgatttaatccaatggctcaaattaattcttgaaaactacaccactaataatatatatttttattatttataattaatcttgaatattattaatcgtaggtccaactaacaaactccaaacttat

SEQ ID NO: 403919 - DNA, 918 bp, Cannabis indica
gctcttacatggtatcagattgctcctgattactgtctcctatggatcctcataatcttgaaactcaacctcgttactcaaatcacacagccaccactgctgctcaagctccggccaatcctccatggaatccgttccaaaattcccttcactcctctctcaccgtgaaattggatcgctccaatttcctcgcctggaaatctcaagttataccaactgttattggtcacggtctcgatgacatacttcttggaggtaactctccacctgaaagattggttaatggccaacccaaccctgaatgcactacctggaagagaaaggatcagcttctcctcagttggcttcgctcgtcgatgtctgaatctgttcttggatctcttgctcaattccaaagctcctactctgcatggcgcgcattagaacagagatacgccagtcaatccaaagcccgcattttacagatcaagtcacaactctctacaatccagaaaggtaatctttccatttcggactaccttgacaaggtaaggattcttgttgattctctttcagttgctggtactcctatggacgaaaatgatttaatcatgcacttgctcaatagattaggccctgaatttgatcctgttgttgttcatgttactagccttgttgatgatctttcctttgaatctattcaatctttattactaatgagagcagattggaaagacactacattatagctgattccagcaccaagatctcagcaaatcttgttgtcggtcctaccagatcagcaaatgggacactaaatcgatacaatacatcaagcagaagctcaaattctcaatataataatcgtgtccctcccagaaactttggccgaggtgcttcccccacaccaagattgatctgtcaagtttgtcacaaact

SEQ ID NO: 403920 - DNA, 791 bp, Cannabis indica
tattatagtatttataaattatgccaattctatattttacgttttttagaatatatattttttgtgctaattatgaaatggcaatatatatatataagcttatatatttttcatattctctttcagtggcatatgtaagatagattttatattcacttacaccgttttatttccttatattttttatcttattaaattaactatgatacgtttaagttacatcaataagataaaataagtccactttaatctttgaaatttatcatgaattatggttgacctctaacgatcatactaaaattatagtgaaatatatattttacttgtaagactgtgtagaaactcaaatgtatcttgattttaaacaaataatagataaaaattttgagcacaaagctcaatacaatttatgtacaatcttacttttcaagtttagcaataaaattcaaaaatgaagagaaaaaaaaaagtttgagtataaattcagtaaagttgtgaaaaatcaaaatttatgttgttaagatacttttaaaaacagtatcagtgttctttttcaaattaaaacaataatttaaataaatataaacaattttgataaataaaaatcaaattgtatttatatttaaatttaaactatataagatatttttcaaatatatataatattatatatatttttttctcaaactgttgtaacaactttaagatatatatatatatatatattttcacgtataaatatattttcaattagttatgcttttaattttttttttaaatacgtatgctat

SEQ ID NO: 403921 - DNA, 567 bp, Cannabis indica
gaaaccctagctctacctctctaataattctacacacccaaggctctctctctcacttgagatttgcctacttaattctcatattgtaatcttaagagacccaatttaaattccacaacccttgtgatgtgagtggccttatctctggtattaataaaactaaaaggggagtaggtcattacctgctaactaaggggaccgaacctctataaaagtattgtgtctcttttactttcttgttcttattgtgtatgcgtggtagcatcaataataaatacgactctgctatcggttggccaaattaaggtcaacatacataaggaaatagttcgattccatggtgcctcgaagtcgattgttgtagaccgtgatcacaaatttacttctaaattctaagagagtctacataaagccatgggaaccaagttgaaattcaatacaacctttcatccttaaatatatggtaagtttgagagaaccatttgttggaatatgttttacaaggatctagatttagtaacaagtatttttcattaacatcctaacatgaatttctaaaacaatgaa

SEQ ID NO: 403922 - DNA, 733 bp, Cannabis indica
atttatgacgtaatcaattacttagttcacacattttgttttacgtgattatatgtttattatttaaattttattaaatccaaataaactacaagaaaacgtacttttgccaatgcaaaaatgcaccggcaatgctttgccggtgcttaattgtgccagcaaaagatgtaagcgaatcttcgtaggtaaaagagtttttaccggcacacaggtgaaatgctggtaaaaccttattttaccggcaaaaaatagtgtcggcacaacttaaacgccgggataaacagataccctaatctgcttggaacctgctttgatacatttttgctggcacatagatgcaccggtaaaaggttcgcgccttttctcacattggctcccgcacctcccttcaacttagcttcacgcttgagttgaatgaattcattctcctgatgagctccctcagcccaaccagcactggatttcctcttcttctcctaaacaggctgggaaatgatgtcctttgggtagagcccgtactccacaaagttgtcctctgaggtcaacaaggtgatatttcgagcagcacccagcagctgagtgatcctttaagctctatccctaagagctagcgtgaagggtggacgacaatatatagggatctgttggaaccgagtataggtggtgcccatgcaatccaccacgtaatactcgtcaacaaaattcccgaatttgctcacggccttgtccccag

SEQ ID NO: 403923 - DNA, 793 bp, Cannabis indica
gtagggaaaaataagtttttggataaatgtataagacattgttcaagtttagtgattctcctattatacacttgtgttgtatgtggtgttgggattgctctcacatctcttttatatttatgctatttatatattgtatttatgtgtagcttattgctttgagttgtagtccctcacttcatctttatattttctattttatgtgtatattttgtttagtgttgtaacattatttaatccatgattttatcctttgtattatttgttatagagttgtaatcttgttggtttggtatttctattggagcacaataattttcaacagtcgaaagcttatcctttcctaccttggttcaatggaaggtaaaaaatccacatgtgataatacaagggtaagaattgtgatattttgtgatttactattttttatatagtagaatatatattcacatatttttttatattgagatatggattgagatatatgtatatatatatgagttatatatgtatgggtgtatatgtcatattagtatagtgatatataatatgatatttgaatatgttacatgttaatatgtatatgtgagatatacataatatataccatgtatatgagttatatatattatatatatgttgaacatatgataatattgttggaatatattttaccaggatctagatttactaacaagtatgtttttaacatcctaaacatgaacttctaaaacgatataaaataaatacataaaaggtatgagaaaccttacattggttgcagcgaaattaa

SEQ ID NO: 403924 - DNA, 523 bp, Cannabis indica
ttttttcatcatcagaaataactaagatacaagtaaactagggaagaaaacaaggacctcaaggacttgaaagctgagcccagcgcccaggttgacctggttgtgggcccaacgcccaggttgacaattaacttgatgcgctagtttcgatcatccaaatgcaattctgctctgggcattctctccgacattgtcaaaaatggggtaggagaccccttccttgatttcaagaatcttggaagtatcaaaataacatctcaaaagctccagaaagagcaataagcgcccatgttaacatatacctggtgcgctagattctgcttacccaattccaattctgtctcgagtcgttcatctagtttttcatagtaaatgagagctattaacttagacaattaaaattcaaaacttcatattttcacttttttggccaagtgacttagttgcgaatcgaatagtttcgagtcccccgattccgcgaaacagcaacatcttcgagaactggtgaacaacttcaccagaa

SEQ ID NO: 403925 - DNA, 606 bp, Cannabis indica
tgcttctctaaatccttgccaaaggtcgacttatgaagcaataatgcattctgtagaaaatgaacaaggaaatttattttttatcaatggacatggtgacactggtaaaacatttttatggaataaaattattgcaaagcttaggtctcaatccagaatagtcttgcctgtagcaacttcaggaatagctgttttgttattgcctaatggtaggacaacacattcaagatttcatattcctttagatgttacagcagagtcaacttgtgaaattcgtcaaggtaccctattagctggacttctaatgaaaacttcattgatcatttgggatgaagcgcctatggcaaataaattctattttgaagctttagataagaccttaagagatattctaagaacaaggtttgaaagtagctctaaaaaaccttttggaggacttacaatagtatgcggtggtgattttcgacaaatattaccagttgttccaaaaggtacaagagctgacatcgttggtgcttctctcaactcatcatacttgtggccattttttaaaatatatgagctcaaccaaaatatgaggctctataatggaagtttaagtggatc

SEQ ID NO: 403926 - DNA, 552 bp, Cannabis indica
aaaatattatatatttaaatattcataatgtttttttttaaaaagttcatacaattaatatcatatataattttacataaaatataatttaatataatacaatacagtgtaatacggcgtaccaaacgaaccttatgttattggatgcttagggcaactgtaatggaaaaacttaaatttagtgttaaatcaacactaaaggttcatttgatacgccatattacaccgcattgtattgtatagtattatattaaattgtattttatatagtattttttaggggtgttcatcaaaccgcccaaaccgcccacaccgcaaaaaaaaaatgcggtttgaaattttttacggtgcggtcacagttagaatttttcataaaccgcgcggtttggtttggtttgtggttttgatttgttaatatgcggttcaaaccgcatcgcaccacacattataaaaataccaatttttatatttatttaagtccaatatgtgaatgttcaactcaaaatccactaattattgtattgttgacacttaaattttttttttcatatt

SEQ ID NO: 403927 - DNA, 1206 bp, Cannabis indica
caaaaaaaaaaaaaaaaaaatcaaattccttaatttatttcttaaacttgttctactcatttgcaagtggatttgtttaatcaaaaagggattcgggtcaactcttcaaaaggatcgatgaacagctagacaatcgagccaaataattatatgagaaatgattgagaaagtgtggattaatagttaatacacatcacattcacttaactgaggtttggacaccagcaaacctacacagagcaaacttttctcacaaagctcctctcattttctttcatttttttttgagtaaaactactaacaattacattcattcactctatgagagtaaccaagtattcctattataccatatatatatagtaaattgttgttgaaaaaattgcagcaacattcacggccttaacaccattgttcatgtcctcaatccagcgagtctaattcttatacggcaaagaccatttacaaccaatccatgcttggatctggttaataacatgttgaaagaaattatagttagaaaaataaatgggcatggttctcttcagctctccaaccaatcaggcagaggtaactatcaacaggggccgagccaaaattaagttttttggggtaggcatgtcaaaaagatccatttagttggagcgggttggagctctgatccgacggatcacttctgatcagaaacattcagatacttattggatcttggatcagatctgctccgccccgcctaattttttttttctggatcggatatgatccgacccaattatatatatttaaaaaaaaaaaactcaattcaagactcagaccccaaacttggatcctttgggacctgtacccatacctgaacccagacccagacccggaccgggacccggaccctgactcgggacccgaacccagacccagattcggactgggacccggactcggacaacgaccgggaccgggcaccaggaccgggacctgagatcgggactgggactcgggacctagacccgaaccgggactcgggacccgaggcccagacttggaccgggacccaaacccggacccgaacccggacccaagaccgggatcgggatcgggactcaggacccagacccgaacctggacccggacccgggacccagcgtagccccgtggactaggagtatttgaaagaacattgataacacgtataattctcttgtgtcaagt

SEQ ID NO: 403928 - DNA, 726 bp, Cannabis indica
tcaatgaccccccttggatgagcaaatgacctatcagccaattgcaaggttatgtagtagactttgcctccccaactgcaatttctaaaaaccgacagaggcatcaaattgatgctcactcccaaatcacacaacacatttatcccctctattctctcgatggtaaaaggaatggtgaaactcccaggatctctgagtttgggagggagtttcttctgcagtatcgcactacaaccctcagttaatgccactattttatagtcttccattttttttttttggacaggattgctttcatgaatttcacgtagctacgcatttgttccaaagcttctgcaaagggaatgttgatgtgtagctctttaaatacctccaaaaattttgaaaactacttgtctaggttggtcttttggagtctctgcggataagggatcttaacatggtggtgtatgctgacttgtggagaagctttttttggtgcgagttaatagtcttcttttttgttgatgttggtgccggttgatcctgaacctcttcttccacttgttatctcccatcagggccttcatacttcttcccacttctcaaggtgattgccttacaattttcttttgggttcacctctgttgtgctaggcaagttcccttgaggacaggtagctatcttagttgccaattgccccatctgattctctaaggcttttatggatgatctagtctctgtcat

SEQ ID NO: 403929 - DNA, 563 bp, Cannabis indica
accatctgtggtggaatcgaaacacttgtttagtctattctttttctaattctgtaaattgcattgtaaataaaattaaaagtgaagtgaagtatagacttttattgattaaagatagaaaatgctctaggaaggagaaagacttgattcatagattgatttgtaattaggtgaagtggaggtggttgcttctcttgtagaagtgaatttgcttgtatttgttgagtagattaatgaagtttccttcttcttgatacaaaaaaaaaaaaaaactcataaaatgaaactaaattactaagaaacaacacaatttaaattaaaaaagctaacaatttatagtccaaaatgccttattatatatacatatatcttataaatcaaatcttcaaagcatactgagcacaatcaattcttaagaaagtagtgctaattataacttctttttcaatctccacaataaaaaatatatgtcgaaatttattttatgactgtgttcattataattacgatatcattcttttaaatttttgaaaaattcctaatagtttatagtgtcgaaaata

SEQ ID NO: 403930 - DNA, 596 bp, Cannabis indica
taaaaataaataaaattcattatccttaatgtcattctctagaaaagtggggaaagttctccctttcttttctcgcttatttaatcaagttctctatttcctaaatttaataaattaaataaacaaatgtaagagaatgactctcttacaattaattcatattggttattagtaaacatgatattatagttgatgctaaactttggaagatatattaataggcactagtactagtgatgtttaagttaatgagttttttcttttaaaaaaaaattagatcaaaatatataggacttgatatttaattataataatataaatataaggttattttgaaattgaataattaataattttacctcttaaattttcaacaatacttattttgtcccctaaaatatacaacttgttaagatcgcccttaaactttacatttataaaaatttagtccgtctgttaggttgtctcattattttttttaaaagcttacgtgtctttgtaaattagcaattttatcccttgaactttgacaactattaaatcttacccctttaaaataaaatgagaaaattcaatatttttttagtaaattttaa

SEQ ID NO: 403931 - DNA, 544 bp, Cannabis indica
taaaattttaaaattacaaaaacacaatttatttagaaaaaaaataagaaaataacgagaaatcaatctcacagacaactataaattaactatgaataaactataaaataataaaaaataaccaaaaaataacatcatgacaactataaataaactataaaataacaaaaaaaaatagttcgttatttttattgaagatttatttttcgtaataaatgaaaaaatttaaagtgtaaaaataaaaaaatatatatgttaatatatttttataattttttttaaaattttgatctatgtatttttttctaaatattcatgtgtgcaatgaagtcctttggtcactttttatatatacattattagtttgtaattgtaataatatctataaattaacataggaatattgttaatttatttataaaagaatatatatttataattcatcttaataaatttattttatttaagatggcttaattgttaaatatatatggttttttttttgggaaattttgaatttctatgcttacattaaggaataatt

SEQ ID NO: 403932 - DNA, 1292 bp, Cannabis indica
tgtagtacttgcctacatatttcacatcttgggagcaaaatgtagaatagaaggaaagtgctgcaaacggttataagacaagggaatgttgtttcggccacacaagcagaagtgcttcttcagagattttctttcgatgaagttaagcaagaagtttttgcaattcctggaaataaagctcctggccccgatggctactctagctttttctttcaagacaattagaacctgataggtgctgaagtttgtgaagttataacatcctttttgcactcaggcaatcttcttagggagataaacttgattgtgttgactcttattcctaaaagtaagtgtcctaactcagttggtgattatagacctattgcctactgtaatgtcctttataaagtagctaccaaattgatatgtaaaaggctgaaatctgtcttgcctttccttgtatctcaaaatcaaagtggttttgtgcaagggaggttcattggacataatatcatgatctgtcaggatctcataagacactatgggaagaaaagtgggaagcctaattgcatgatcaagctagacttgcaaaaagcatatgatactctggaatgggacttcattgaggaaatgttgagtgccttcaagtttccagaaagcttcatcaaggtcatcatgatttgtgtcagaacaccaaggttttctttgatgttcaatggatcaatgcatggattctttgaggcaaaaaggggattgagacaaagtgaccccgtgtcacccttattatttgtcttcggtatggaatatctgtccaggataatgaagaagataagctcaaagtaagattttaagttccatgagaggtgtggagatttgaagttaaatcatcttagttttgctgatgatgttctgcttttctgtaatggagattacaaaagcatctattatatgctgcagggactaaatctattctctcaaacatcaggtctattcccaaacccttcaaagacttctatttattgcaataacatgagtgacacagacattcaaagaatccttgatgcttctggattccagagacatgaggtgccttttaggtatatgggagtgccaatttgcccaaagaaaatatcttcatcggaatgctctttgctagtggagaaaatggtagctcgaatccgaacatggagtactagacatctgacttttgcaggaagagtggtgctcattaactctgttttaatggccattcactcgtattggagtcaaataatggtgatgccaaagaaaattgttgctgagattgaggc

SEQ ID NO: 403933 - DNA, 1190 bp, Cannabis indica
gttttttttttttgtattttttactagaaataccaaacgtaactaaacaaagacaacttaaattgacaactaaaaatccaataaaaccaacccacaatgaaaactaccgcagcaacccaaactgtaaaattaaaaaaaaatagtatatgagataattttcactaatatatagggaattatcccatatattatgtttaaattttttttaaaaaaatttacagtttgagttgttccggtaatttttatgtagattgttgtgtgtaatttaggttactctattaatttctatatgagtttctatgtaaatatttagaaaaattaaaaaaaaaaagtttattttaagtgtaaaaatataaaaacccattaataaatattggtgtatataaataattatttatgcatggctcagatttgctgagttaattagggtttaatataagccatacatacatataattaattataattatatgtgtcgacagagaggaattgtatgctgtgtattatagccaatttagattaaagattggtccttattgtccattgagacagagacattttgttccaaagctagatgcctaaggcttagaccatgtttgattaatacattacatatatgtgtatatattcactataacacgtgcaaattacttataattatttttttaattaagtttcattaagtaatattaagtgtaatatatatatatatgtttaaattattttaagttaggtaatatatttcttttaatttttaaaataagattcgagattttaatctttaaagatttttttaagtattgcggctatattggtataccatttgaatatgattatacatatatacatattttatatgtacaacaaacctaagtaagatattgtagtgaatcattgtgtgcttgattgaacataattgtctcttattttaattcaaagttaaatcaacaaatataaaaatatctacaatattttaagtatttcaaattaaaattcaaatttctttatataaaatatttacataatttttatttttaaatatatataataatattataaaattaagggtaaataccattttagaccctgtgttttgcaaaagttactgaatggaccctgtgttttgttaaatgacaaaatagacccggtattttccaaaatagtaaaaacaggaccctgagcttaatttt

SEQ ID NO: 403934 - DNA, 826 bp, Cannabis indica
agggaaagtttgctggaaaaaccaaacaggcccctaaggaaaatcctgccaagtttactactttctctaacctgatagaagatttagagactatctacatggctacttatcataattagctccgtacaagaaactcgctcccatgaaaaaggacgtaagtaagagagacatgaccaagttttgtcattttcaggaagattatggccttgacaccaacaaatgcaacaatttgaagcgagaaattgaatttttgataagaaagaataactcgcacgtgcaaagatatgtcaaggccgataaaaatcaaagggctgctcagacagataataatcaagatttactaccaccaccagtagatgggcatttgcaagtcattatatggaggcccgcacatagttggagattcgggcaaaggccgggaaaggtatgcccgaacattacagcaggagcaagaagaggtggttctagccgtcgaagaaaggaagccaaaaataccatgggcaggggagcccaccataacgtttaatgatgaagatgttgtcaagattaatttctcacacaacgacccgttggtcatggaagtctagatagccaacaaaattgtgccccgaactatgatagataatggagcctctacaaatattttgttcaaaacaccatatcaaaaaaaggggctccaactcaaatacttaaccccttcactgttggggtttttcggccagggtgttgcacctttatggcaaattcacctacccttcactgttgggcaagctccaaagagcataactgtaatggcacaatttttgatattggacgttccatcagc

SEQ ID NO: 403935 - DNA, 536 bp, Cannabis indica
cttcttttcttcgtattttttgtcgaggacccatcttttcctcacgtaatgacattcaagggtttagagtagactttgtcttctcggtttttatcccttttcttttacttattcgtaatgtcaccatctatgggattcttgcacccgactcttgtcaaggaaaacattctggggctttctttttgacaagtgtccggagggggcctctttccagcggttaggggaccccattcccttttttgaattagggtttggtttggggcctgactgctggattttttcaatcttttttcgaaccaaaatatttgcatccagttccaaatcttcaaagaaaggggggaagcgtttggccaccctggaagaagttatgaagggtccggtggcccaagaagggcacaggtcccgcgccaacgggtgggaagcggccgagcttcactccaccttaacttgccctcaccagctggaacatatcgtggtggtggcaggtatcaagcctgcgacctccgagacctatcacctgttggaaattattttac

SEQ ID NO: 403936 - DNA, 597 bp, Cannabis indica
tttaaaaaatatttgattgataattaatataattttgacagctttctaataattaataaattactacctaacaaaaagaatatacatataaaaggaaaataaaagataagtttcttaccttgagactataattaattacataaaattaaatataatctatcaaataaaaaaataaaattacaaaactttcctaataaatctaaattttgaaacaatacaaataaacattccaaataattatttattaagaataaaaaccttttaaaaagtaataaaactaccgaaacaaaataaatggctaattaataaaagcataatttactaaaatcaatcacaataaaagcattcaaacacaaaaaatgttagaaaataaatatggtcaaaacaaactattaaagtttatataaaaatatggtgtgattttacatctaccttctcatatttttcaaaaatatttatataaaaattaataaagttaaagtttgataaaattttattacttagtgttgaccgaggttttcggcaactagtaaaatatgattataataatgagctgtgagaaagcgagatgaagactttttacgtggttggggcgtt

SEQ ID NO: 403937 - DNA, 1252 bp, Cannabis indica
cggagcgctttctctgcggccggaaaacgaatgttggggcagagaaccttcgaaaggttgaagtcatccgggcggtccatggcttggaagccggaagagaagaaaaagcgatggcggtattcctttacattcttttggtgattaaaagggaccagaccctcatttaaaggatgggcccagagggtgaaaaaaccgtctttaaacttgtcccccttcttcgggacagatacaagttcatagaagtacaaaattttggcggggctaggtgaagcccagcctctggcaacgtaaaaaataaacaagcttgagagcaggcggtaagcttgtggaattaattgataaggtgcaaggccgacaaaaacaaggaagttaataaagtagtcttgaagagggagcatggccccgaaaataaggtgggtttggctccaagctccgaaccacccataattgtgattgggcatctcttcgtctcggggcaagcggtgaaagaccccggacgcagatggtttgatactagccacagtcacgatcttctcaagttgatgagcacaaaccaaggtggaatggagctcatctgcctcccagccgttggcgcgagaagtgtagttctcctgggcaacagggcccttcatgacttcctccagagtgtccacggtggccgcccccttcttggaagatttcgtcccggaggtaggagcagacatttctattctgaaaaaataagagatccagcagttaggccccaaaccaaaccctaatgttaaaaagggaatgggggtccccaaaccgctggaagaggccccctccggatgcttgccagaaaaggaaactccaaggactttccttaacaagcatcgggtgtaaaaatcccaaaggcagcgacagcagaggaaagaaaataaaaaaaaaggagaaaagaccgagggtggaaacgagaatcgccctatgccctaaaagcgttatctcgacgaaagagactcaactctaaaaaggaaataaaggaaaatagcaaagacacgaataagagaagattctacacattacacaacaaatgcgccggatcattaatggatgggaaacgaatcgttgcctgcaaaaagtaaaaactgtaatgatgattgtcataaatgtatcccacgcgcccaaagcacgtgccaggtagtcaataagacaaccagaggcagttgttggctctggctctggtgccagtgttggaaattattttaccaggatctatttactatcatgtatg

SEQ ID NO: 403938 - DNA, 845 bp, Cannabis indica
agttacgtcaaaggatacacatccacccactatatagaaatcccaatgattctaactcacaagtacattcggaagtttcctaatgttcacagttatgtagatcaagtacaagaagagttttttgagagagaaaatggatgggtgcaattccttgattgctgttccacttaaacatagaaattttatattaccagaaatctctggaagagttgtgagattggagcacccacttagatcaagcaagttactaggtaaaagcctcaccctttcagtatcttgaacatctctttcgtttacaaatctaaccatccaataatcataatggaacatcactataaattctttatctggatcatctaaaatgttgtaaaatgttaacgggggaaggttaactaaacttgtacaaccatttagacaaagctggtgaagattcgattgagagagatttggaagacaagtaagcttcttcgattcagaaagaatgacatattttaagttgctaacatcctgcatatagacagaatatagttaattatactgtacattaaaatatgaaacaatgtatcaaatagatataataagagaaaatttttatatacaagtaaatgtatattaattaaaaaaaaattgtgcaaaaaaatataattacataattttattactttcaattgattatttgttaattactttcaattgattttctaaaaaataaaaataaagacataaaactgaatatgtaaatataaaaaattaatatatatttatattttgattactataaaagaatatgtttactaaattttaatatgaaattaaaaaaaatatacaaacacatttataaattt

SEQ ID NO: 403939 - DNA, 613 bp, Cannabis indica
tgactatccattaattgacatcggatcaatttgagtaaagaaagaagctctataatctacataacagtaagtgatagagttaatatggttcaaaatgttatccaaattattattatgtatcttatagttctaagcgtatcaacaacaattgatgcataaagaaatacttcatcaacattgattcctattccttgaagaccctaaaagaacttgacctaatcccacatttgggtgccaaccgaatgtacctcaggaattggattggattggatacattaaaactatgttgtggttttttttttttttgaaaataaaatagtaacttcattgaataattagcattcagaatacaaaagggagattaactcgtcccaagcattatactcaaaaatgctacgaccagagagaaaacaagagtgcctagcaacaacatggacaactcggtttgttgatcgtctaataaagcaaagcttaacattatttagagaagagaataaaacttgacagtcatgaataatcaaaccaaaaatagaatttaaggattcattactacgaatgctttgcacagtgagcatgctatcagtctcaacctcaacatcagaccaattcttac

SEQ ID NO: 403940 - DNA, 657 bp, Cannabis indica
ctagttggatcataggcgtcttaactttcgcttttctgggattcgttcaccagttggttgaaatctccatcgttcctttcagaatagggagtctcagttgcgtttgctctttgtgatctttgaggctcctttccagggcgatgggttgtctcctctggatgaatttcttcattacgttgggtattatccgccatagatataaatttttagttgcgtctatcaggagcttattttttaagattttattacaaaggctctcaatgaaagcaccatactattaatgtagattttcattaacaaaaaatattagcttttttataataaatatactatgaaattaattacagtaataaatgaacaccaaaaagtttttaacgtgattttaaagttaattcttcaaagtttatgaatccattttattaggaataatctttggaatacagaatacaaaaatatcaataataataatatcttactttttcttctctagattggtcgtcccttttacccgtgatcctgtccttatttataggggtatagtgtgataattattcccttgagatctattcattcataatcattcatcaaacgtgaacatttcccatgttttattattgtacatatgggataatattaaataactgtttaactgctctt

SEQ ID NO: 403941 - DNA, 493 bp, Cannabis indica
ttagtggacttttgtgaagaaatatatgaattaattgattttgttggctgaataaagagttggaatgtttctatttatcctcatttatccaaatttgaaacttagaaaattagaaaaactcaagctcttttcctctctctctctctctctcggctggtgtggtttgcttgggctgggaattcttcttgtttttttcaagcattactcatccaatctaagtgttgttcaagtgcttggtatgatttctatagctttctttaagtttcttggaattttggaagaaaataattgtttgcatgcttagtttgggttgatgttgttgctgtgattttatgttgtttctaaggtttaaagcatgttaatttgagtaggttagagctggttatgatgcatgtttgaagctttgattcacgcttggaaatttttactcaaaattatagttttcaaagaaaaatgaagagtcttgttgttgtgattgttgttgctgtataaa

SEQ ID NO: 403942 - DNA, 759 bp, Cannabis indica
aatttcttgcttcatattcccatacttcctagtgtgccatatttgaagttgtgaagagcatgtttccaggttatttaaaaagaggtcagcagcagcaattgaagaagaagtagcccaattttgcttgataatggcagcagcttcagcatcgttaagccatattttctcaaacctgaaacgtgatttcctcctcacttgttgaggaagttgatcgagagcttggatagtgacagaaatagcccgatggtctgatctgaagaagtccaaatgagtagtgatcaaaggttcaaatgttgctgttcatttgtcattcacaaagcaccagtcgagtctctctttgatggtatcagctttatgaggacttttaaaccaagtgaaaggatctccattaaccggcaactcagagaaagaacaaaaatctaaaaattgtcgaaagtcttccatttgcgcttcatttctcaacgaacccccttgcttattagcatttgaaagtatctcattaaaatctccaataacaatccatggtaacagtggagcaacatcacgaagcctctttaaagttgtccaagaatgacagcgattagattgatcaggagaaccataaaaggcagtgaaatggatagtaggaccattaccaaacgccaaataacagtcaaacaaagtagcattaaaattcaaaagtgttacattgacatcatccttccaaagaagtagtaaaccccctcctagacctaccctagggacttcaagtccattatt

SEQ ID NO: 403943 - DNA, 577 bp, Cannabis indica
cgatgattcaagcactacatttgggatgttgttggataaattgtataaaaggattggagccaatcaaatttataattattaataaaattttcagaaaatagctcaactgagagtagttgagctggactatatatggttgagattagtaaaaattgtaattatatgactcgactgtaattagtagagctcgaccatttgtggttgagattcataattattaatcaaattcatttttatattgatcaaattttgtaaaggttagaagtgacaatagatattataccattttgtaaatagattaaaattatcaagattattatgaaatgtaaagaatgtaacaatagaaattatgacatttttaaaatatatagttttgtctaaaataaatatggaatatcacaataaaattttagaaatacaatttctttcttaaatagattaaatcatcaagatcattatcaattttcttattagtagagaatgtggcaataaatattataacatttataaaatatatagttttgtctaaagtaaatatgaaatgtcacaataatattttaaaaacacatttttttct

SEQ ID NO: 403944 - DNA, 1708 bp, Cannabis indica
caactacccccattaataatcacgctacataccttgtcgtttagatgacaacgagtgtgaaaaaatgttctcatgctgcacctcttcttcctcttcttttacttgcgagtttaaggctcgtttggtgactagtgcaagcatgtcagtgtattttggcccatacctttcatcttctatagaagcatcttccaatggtggcatgttagcaaggtcatcttcatcttcaaaatctacaccgccattttctcaaatcaccataactcccttgtttggacattagctagctatgtgtcctcgcccctaccatttaaaacactgtatctcactagaacatgatgaagtaggggttatttttccttgagggggtgtggttgtggtgggcggtttggatgtataggatcaagcagcttggtcttctttctttggatagttcgaactccaaggtgttgtagctggattgtgtggactcagtcttgactttgaagtcaaaccacccttcttgagctgcctttcaacattgatttccatatgcaccaaatcgattccacaaaattacgtagttcaattgtattagcaatctctcaattcaatccattcaaaaactttgccattgttgccttctgtatcctcttccacattggctttaatcatagccatctccatctccttgtaatactcatcaacactcttgtaaccttgacgaagaccttacagcttaaggtataggtcttgataatagtgaggtggtccaaaatgatgcctcatcaccctcttcatatttttccaagtgtgaatatcacaatctccattttgcctcagttgatgcacaactgatcccactaaacaataacatactcagtaaattcaatggtagaaagtttaccttcttcatttcgaaataattgtgacaattaaaagacaattccatatttttctccaactcaaggtatgcttcaagattactcttcccctaaaatgttggaattttcatcttgatatttcctaaagaattatgtacctagttcctagcttctttatcgcgaccatacctcctagggttaccaaacaacatcctatcaaactattcattagaacccaccccttccaaattcctctcattctcttcctccctttggtgcccctattcctcttaggcctccgttatgtgctctcctctatcctattcaatctcgcatgtatttgttcacactcatctctcaataacctcctcatctcccccattaaggcttgaatctgtaaatttggatccgtaggtggtggagtttcattgcttgtatttctgtctatattctatgacagttgaaaatctgcaacataagatggttagagcagttatagaagaaagtcctcaccacactcactgacgtgatttttctcaaaaatgtcactgaagtccacttgtgtttcacttagctttgatggcttttaccctcaaatacgctcacgatgctccctctttccttcatattcttccttaatctctgtaaaaactactcaaacattaatatgtaggaaattcaagcaacaaatccaatcaaacaaaccaaactaacaaggaggaaaattatgatttttggaacacttgtgtggggttatggcaaataggcctctagacaatggggaccaagaatagaacaaaagaaaaatttaagagaggtttcaagactcttttttttttctttctttt

SEQ ID NO: 403945 - DNA, 524 bp, Cannabis indica
ttcactcaagaaccttatggatttcttttgtaccgttaatggccacgtacacaaatctaatttatggactttctagagaataatgtccaattctcataagaggcggcacgacacctagtccatataggtagaattttagtgtctcacaattctttagacactttcttaagcttaagtgagttttcttaagcttaagctccattaaaaaaatcttttagttttaaccctccaattttcactacatgtactgatccatagatgggacaattgagtatcacattcactctattgacttgttattatctattgaacttaagaattaattcttactagtgataggttaccatcaatgagtaaaacactaaggaaattttggtcccatccctcaaaattcatgcttcagtcatgtatgaagattaagcaatttgttaacttcacacttttgattccaagcgaatcatgctagccaaatatagtgtccacctttaaggtgaccattgttctccttaagtacttaagctttg

SEQ ID NO: 403946 - DNA, 761 bp, Cannabis indica
gtaaaattgaggaattatagtctgtacttcaaacttagtttttaacatgtaattccatgcaaatctcgattttttatgtactattgttaggatatatttgtactcttcaacactgattatgtagaaggagcccgaaatgtctttgtattaaatcaaacaagccattaagggctcgtttggaacgtcgtattaagtcgtattatattgtattatattaaaatgtattttatgcaatatttttatgtaaaactatatgtgctattaacttttatagacacctaaatataaaagattttagtataaattaaagtttaacatagtattatataaaaatatgatatataatccaattcaacataatacaatacaatacaatataacctaatacgatgttccaaaccagccctaaaagttattatttgaaataaaagggtacatttcttctagcaagatgacaaatagagcagtggtgattagacagagagaatgaaaaatcaatcattttattgaatttagtagaaattcgttgatgaagccagtcttgttttttcacagccaacaccattgaaatggcatgcttccatgattgatagtattggcatgtgagaacagagaaaacaagcacaaggccagagtgatctctggcactgaggaagaaccgggtagacttcttcgtgagtgtatcgatcattcttggagctgaaaggtctttgaggagctgtcggcagaagagctgtggaagctagtgcatcaccattgat

SEQ ID NO: 403947 - DNA, 657 bp, Cannabis indica
gtgtttgtcagtgctttattatcagaagaagaattaccacagtacacacaagtcctttgtgagaacaaagatgtatttgcttggttatatcgagacatgccagggttgaacccaaaggttgttgtgcacaggttggcagtatcaaaagacgctacccctgttaaacaatctcaaagaaggatttgaccagaattacttcccaaagtcggggcagaaattgacaagttaagagattgctagtttatttgggaggatctgtatcctatttgtcttgcaaacatcgtcattgtgatgaagaaaaatgggcaacttcgcatatgcgtgaattatcgagatcttaatcgagcttgcccaaaagatgaattcccactccccatcactgagttattgatagatgctaccactggttttgatgccttatcattgatggatgggttttctgggtataaccaaaataaaatggcacctgaggacgaagagctcacttctttttggacaccaaaaggcatattttgttatacggtgatgccatttagcctcaagaatgctggggcaactaccaaagagcaatgaccacaatttttgaagacatgatgcacaatactgtcgaatgttatgtcgacatttagtggtcaaacaaaagaaaggacaaatcat

SEQ ID NO: 403948 - DNA, 1121 bp, Cannabis indica
ttaagctcttcattatgtctttttttatttaaattattctaccgctaaatgggtccaaattttattttttctttgttatatagttggactatagaataaaacaaattataccgtttttgacaagagttcaaatggaatattgattggaaatttggttacaaaagcatattgtaatgtgggtcaattgatatcttattgggctagctatttagtgtaaatttaactattttatttagtattattttataaatatctaaaaaatttaaaaaaaaaaaaaaaaaatacttgaatctacaacattttttatttttattttacagattttcttacataaataagtattgttgtttaatgttgttctaactaaaactttaatcatagacgagttagatttgtgcctaaaacatatctactccaaggcctaatttttttcaatttagaaatacatattttttaatgattttgaaaaatattacatttttttttaattaaggaattcaaatttcttttttcattggcccactaaattggagggtgtgctatgtattattttctcatttaattttattttaggtaaatactattttagaccttatattttacaaaaattacgaattagactatttttttattaaataacaatttagacccagtgttttttaaaatggtacaaaatataccttgaactcaattttcagtaatttattttttcaatataacaaacttgaagctaatatctaacacgaatatatgcaaatatatatatatatatatatatataaccaacctagtagtaataacttcaggtcaattattattaagtttttaaaataaccgtaaaacaacaaaacagaacaattaaaaacaacaatgaaacaacagtaaaaacttaacacaatatacattataaaaagtacatagtataaacaattaaaaacaacagtgaaagttggtaaaaacttaacacagtatatagtataaaaaatacatagtatttttgaagaaaaaaaattccacccacagtaaaaaagaaaaaaaaataagaaatttgagtatgtggtgtaaaaacaaaaaaaaaaaggaaatttacaaaaatactataatttgggttaacttttaca

SEQ ID NO: 403949 - DNA, 976 bp, Cannabis indica
gagaagtttttctattatttgttatctataagaattatatggtgaagttttttatagatttgttagtttttctttttagatctttatttcagtggagattaagattatagaatatgacgtttgatagtatcgtttttttttattaggatcaagaattatacgatttatatgatgagttttctatatacttagggtcgattgcgtatacattattcaattttaagtacggtaaattttctattatttgttctttagattaagaatatagtaaattttatatagatttataattttttttagatttattgagaattatatgtacttttataactatatcaatgtaaataataattagaagaacaaaaatattcactcacaccttcttttaaaaatttcaatgatacgtttaaaaataatatcaaactatatatacatttaaaaaatgtagtatttttttattgtattaaaaaataactaatttatatataaatatatttatttattctatttttaattctcttattttttttttacattttattactttttaaaaaaatttaccaaaataataatagtaataataaaacaatgttcataagcccaaaatttatgtctaggcatcttttaagttatatgtatccatttttttttctaatttttttttttaaatagtgtctttttttcaaatttaattagatatttattttgaaaaaaaaaatcacattaaatattttttcatatcttaattaagaaaactaaaatcctaccaataactaaacattatgattgatattttagaaaatttatatatatcttcactcacataattatattattcctattagttttataattatttatattacttcaatttttcttatctatctatctatatctttatatattaaaagtgcctatctaacgaaatttcttggtttaacagaatatactttaaaaataaaagaatattctgtta

SEQ ID NO: 403950 - DNA, 538 bp, Cannabis indica
aaaaaaaaactaaatgtatgtatctacatgtacaaagcaacacacatataaaaaaaaaaattatcacgaataaactaaaaatatacacaataaaaaatacacatgaataaaaaaaataactgaaaaataattgttcaaaaaaaattatggaaactatttaaaaacaactaaaaaataacataaaaatagcaaaacaagatgcacatacacacaacaaaaatattacctggaataaactgaaaatatacacgataaaaatgtgcataaactaaacgaaaactgtacttaaaaaatacataaaagcaactatagaatacatacacaacaacataaaaataactataaaataataaaaatacaactataaattaataaaaaaataagacaccaatcttgttaaaatatgcaaattattcaaatattaactctaaataaactactataaattcaaaaaaaaaaaatatactacattttattaattatgtaaaagatagcaaaataaaggagactgctcttatttatttatttattttttttt

SEQ ID NO: 403951 - DNA, 526 bp, Cannabis indica
tctaaatttttaaaccatacaaatagcacaatcatacaacccaaaataaaaaaatcaaccaatataatcatttttattatggacccacctaaacccttttttgaataagaaaaaaaaaaaaaagaacaaaacaaacaaaaacccaaacaaaaattacaaaaaaaatttattcaacattacgtggaattatacagtatgatcgtcttggataacatgatatgatcttatttttgtatgtaaattgattataattctaatttttttatgagtatttattgtaattataataggttttctctaatcttttttcttaaatctgaataatttataatgtgagttcaaacaataattatacgcgtattaaaaaacctaagaatatttataatttatagcttataatttataatttttttaatactttttgacacgtaagctaagaataggtgtaaccagtgacggacccataatttttgatctgtgggggcttaattgttataaaaatatttattatttactttacattaaa

SEQ ID NO: 403952 - DNA, 650 bp, Cannabis indica
acgaaaataaactaacaccaaaattatggatattcaggatagacaagaatagtcttttacttaacagtgaatactcaaagaaaaatttgtgagtatgcaaataacaacagtttaaaagtaaataacacagaaaattatagtggttcagtcagaggttagtctgtttagtagtggttcagtcagaggttagtctgcttagttcacttttagtgtttcgttcctttattcagtttggatcaccctttatataaaaagtaggtgtccctttagattataaaacttccaagttatgactgtttattacattaattacatttaattgaaaagcgaaatgtttaaagaataaatgaaagaacaatttcgaccgttcttgattgatttcttgaatgtatgcgacttgggaagttgtatatcagtcgctcatcttccaagcacacgagcttgtaggctctctacagtattcctttgcatataaggtttttggacctaaagtattctcggggctatcttatgggtggatgcatgcaattaccctgattgcatgtatgggcatttgtgtatagaacataaaacctacgagttcttagtgagttgtcgcgcatctgtcttttggacagggcatgcataaagacgcacactacaaaaaactg

SEQ ID NO: 403953 - DNA, 559 bp, Cannabis indica
ctgaatgttaaagttacgggaaaagatacttattcagtgtatggaaagttctatacaaatttttggcattgtaccaacaatttattaactactagtgttactttctgactaacacagaagtagttgccaaaaataaagaatccaatatccctagaggagtagacatatagagaggaattgcacaatatcaagaattttgtgattaaggaaatgtaatagtggagaaaggttgtattgaatacagactgtcagatctaattacggggagaatactacatgctacacttgatctggatatcaaggtgttgagattatttgaaatgcacttcttattttatattagtgcaagtgggagtttgttgggttctgtgccctaaataaaatccatttcaatataatcagatttactaattaataaagatcaaaaattgcttttatgttgcatggttcacatgatttattttatgattatacttaatgtataaattctattaagtctagaacatatataaatatgcatatatttgttcattatagtgtcgtcagcatagtggaatat

SEQ ID NO: 403954 - DNA, 856 bp, Cannabis indica
gtacaagatacagatatcttaagaattatctcctttcttttcaaattattcgttctttgttttgtgagttctgtctctatttataggaattatccgtatttctagacgtatgacacgtggcatttaaagaaagggattagcttcataattccttaattgatacaatcttgtcacggagaagcctcataagaaccgaaaataagtcaaaattgaaggttaggcgaaagtccacttggtcctaccttagcttttagaacgaggaaggagtgttgcctctcccgaacctgaaagggttcaaacatgtaagcttgcccagttgatacctagataggtacttaacgagcctaatgtggatgtcgacctcctaggactgtcacgaatgtctacctttgatatgagccaaatcacctagtgacggttatgttttttctaatacaggatgagatcttgtctcctacgtccaagcatggtagtgcgcacacctttaccacctttttgacaggtaaatatgatagaccccctgcatttaaaggagaaagctttgggcgacatgtggccactacttttaaaggttaaatctttgaatgacacgtgtttactttgtaaaaatgtcctcattgtccagttgcaacacgcacgggcacaatagttttcccaggacccaacaatcagctctaatttttctatgtaatttaccccacttagtgggcttttagtagaaatcttaggcatgcaatgggcatgtccatacccgctatttagcctataaatatccttctattctcatacgaaggggggatcacggccagcatagctaaaactctaccaagtttactcttcgtcttcttcacaagaa

SEQ ID NO: 403955 - DNA, 839 bp, Cannabis indica
ttacgagagtatgagcctcgcttcaccacctactctatcttcttagccccaagataggagatctatatggctacacaatcaatagtgtcgtatcacaaacctcttcccttcaaagattcagggaagagggacatgaagaaattctgtcgctaccacaataattatggtcatgacactaataagtgtaatcagttgtgggacgagatagaatttctcattagaaaaaaaaatgctgatgagaaattatggtcgtgctcttccgcggtatgtatgacctgaagctccagctaggggcaatgcacctctctagcctgcatcagttgcaagcatgctagagatcatgattggaggccctcacctagctagaaattcaaggaaggccttagaaagttatgcaagatcactttaacatgagccaagagctgaagtcctagaggtggcagagtgccgtccaaagtctcaatgctacgaatgtgaacctatcacctttggagaatcaaactcctatcatgtcagctaccctcacaataaccctttagttgtcgatgtgcaaataattaatatgatagtgcccagggtgatgattgacgatagagcgtccttaaacatcatgtttaagcaagccctaattagaataggcatacccttagaagacctggagccatgcgagtagctgatggatggtttcagcagagcggacattgctccatgtggtaagatcaaactgccactcactgtcagcactgcccaaagcgaaccaccatcatggccacattcatgtggtagatatgaagtctccgtacaacgtgatgctcggaaggcctgccctctacgacctt

SEQ ID NO: 403956 - DNA, 495 bp, Cannabis indica
aaaaagggactataagtttacaataaaaagaatttagggtacatttactactattaccaataaaaagagaaatagaagatagataaagaaggaaaaaaaaataagaagaaaaaaaaaagaagactgaactaaacaaaatataaagaaaagaaaataaaaacttttttgaacctttaattagtaaaatagagtcaaaaagaaaaaaaaataagtaggaaaagtataaatgtaaaaaatttcttgtcaaagtataaatgtaaagtttggaaaataagttagtatttagtaaaaatttctcattaaaaaactccttaagaaacttaagaactcatatatgatttagttttggaataattacataagacaccatttttttgtaaaatatttatatttttacgttcaaagaatatttttttttacatttttacggttttccaaaaaataacacgaaaacaacataacaacaacaaaataacataaaagtaacatgaaaat

SEQ ID NO: 403957 - DNA, 956 bp, Cannabis indica
gttgactacagtagctggcgagccacggctcacatctatgctggccccttatatcagcagctatcgccattctcgccaaacagagtttacatatttttcggatgcagggtggcagttgcagcttctgctttcggttcatactagattttgggttaaaatgactggttatagccatgcagaccgtgtgagacgtaagaagttcttggaccaaaagagaattcaaaaacttatttgtgaaggtgatgatctttttgacatgttgccagaagagtatagctttaaggaattgataaccaaaatgggatcaattccccggtcgagttctgctgttcatcttcctacgtttttgattaaaaatgctgataagtttaggtttcttctacctggaggctgtttgagagagcctaattaaattacacatttttatagatttttgccaatttatacaaaaatatagttttttttttttctaaaaaaaaagttacattatttggaaaaaaaaaaaataaaaaatatgaccaaagcacaaactggttacctaaactttttaatttttctcacaaaataatttcttcaaaaaataaaagttatatttttgtaaacattgtaaaaaaaactcataaaaataaaaatttcttgatgccgtttatttccatgttttttaattactattattattattgtagtgtgaaaactaattgtgaatttatagtggtgtagctttattaggggtgttaaccaatgaattcaaagaggacatagaaattattaataatgtcctcaattgtaaaatgtatacacaaaaagaaggcaattcttaaagggttatgtgtttggtttatatatagtatacatatcattgataattgattgttactctatattgtaggtgggtttggaaagccataatgtaattgaatttgtgtataattagaggtaattatataatttggtat

SEQ ID NO: 403958 - DNA, 647 bp, Cannabis indica
caggttatggcatagaatgaagctattgtaaagtttcttcctagcgacatattgggcgtaggtacgtgcatcagtgaaagaatggaaccgtgtagggtttccctatggccaggttatggcacagatcgaagccattgttgggtttcttcctagtgacgtattgggcgtaggtacgggcgtcagtgacatatgataagtaccaggcataggtacgagcttgtctgattagatgatgagatatattagtgccaagttgtggcatggactcacctgattatgtggtgcaatgatattatatatgatgttgcattatgacacgggcttgcctgattaggcaatgtaaatatatgagcatatctaattctatgcatatggctggttatattacttactgttgaatattaggtttaatcattatatgataatgaaatgtatcgttagctatttaattccttctttattacttttctggccgagtctatgtgactcacgggtgctctgtggtgcaggtaaggacaagaaaaaagttaaaacatccatgagatgacattttctagcaatgtacatattgaccccaccgacttgtgtgccgagttgccattaagttcaaggtcctattttactattttggaaaatacaggatctat

SEQ ID NO: 403959 - DNA, 448 bp, Cannabis indica
cgaaaaagttcacaaaccacaaaaaagacaactcctcctaaaacaagtgtccagagttgtaacaaacaattcaaaaaataaatactactccccctttttgtctatcaaggagccaaagacaataaaaaaacatgaacaaagtcataatagttcaaaacacatagataaaaagcaaaattaaaaaaatggaccacttattcatcattattggatcaaaagaatttcatgatgttgtccatcctcctaagaagtaaggcttgacttatctccattcttcccaaacgcaagttgaattcagccatttctatagaagcagaagtggaggcagatgcagcagcaagttcatcagtagcaccaggggaagcagatcgagcctttttcttagcagatttttcttgaggaggtttctctggaactttgaaagtggtacctgttggaaattatttta

SEQ ID NO: 403960 - DNA, 1100 bp, Cannabis indica
ttaaggagatcaacacagtctgcgaaggatgcatgctcgggaaacaacatcgacaaccttttccatctggcaaaacttggagagccaaaaagccactggagctagtccatactgacgtctgcggggcaatgcgcactccatcaaatgaccaaaacaggtacttcattctcttcattgatgactttactagaatgacatgggtttattttatgcaacaaaagtcgcaagtcttcgatattttcaaaaagttcaaatcccgtgtcgaaaaacaaagcggtcactacatcaagacaattagaagtgatagaggcaaagaatacacttctaatgaattcaacaagttctgtgaagatgaagggatggagcaccaactcactgttggatacgcaccagaacagaatggtgtatctgaaaggaaaaacaggactgttatggaggcagcaagagccatgctgctagagaaaggtctcccaaaacgattttgggcagaggcagtaagcactgcagtctacttgctcaaccgatgtccaaccaaagccgtgcagaataagacgccgatcgaagcttggagcggacgtaagccatcagcaaagcatctcaaagtcttcggctgcatatgctacagtcacattccaaaagagaaaagaggcaagcttgatgagaaggcagagaaaggaatcttcttaggctatagtactcaatcaaaaggttatcgagtctatagcttagaaacaaataagctaataatcagtcgagacgtaaaatttgacgaagatgctgcatacaactgggagacacaagaagttgaaagaaagacagtcaatattcctctaccgccaagacaagaaactgatcaaaatgaagttcttactcaaccaacaacacaagaacctgcacaagtcatagaatctccgccagactcaccagtaaggcgaacaagaccactatcagaaatctacgagacatgcaacttagtacttatggagccagaaagctttgaagcagctcataaacaagaagtatggagaaaagctatgaatgaagagataaagatgattatgaagaatgagacttgggagcttgtagatcgtccacaagac

SEQ ID NO: 403961 - DNA, 855 bp, Cannabis indica
ttttttttttttttacaataggaagaggtttcaatcgttatatcatgtaaccatcatagttacatttatttttagtcattagattactattgaatggttgtgattaatttaaaaattaaaataaataaataaataaataacttattacctgatagtaacctgaaaatttatttcctcataaaatcttaattaaaattaattatatttaaaattaaattactaataatcattaattaattttttacaatttgttactaaataataatctttcaaaaattaacatttttggctttaaattattaaaatatttataataaagccacttataatttaaaaatattacacacatattaatatattgtatatgtatcatttgatcggagatgaatcataaaaaaagaaaaaattacaaaagtttaaaaaatattgatcgttttgattattgaatatattattgaaaggtttgaaagttactaactgatatcggttattgatcttgaatacgtgttattgaaaaagtttaaaagttaataattgttattggttattgaacttgaatatgtattattgaaaattttaaaaatattaattgttattggttatgaatcttgaacatgtgttctttataaacttagcaaccgatgttattgattattattaattattgattttgtctatgtatcatcaacaaagttagtacatcatttactggttattgatctcgaatatgtgttactattaaaaatatacatatatgaaattgttagtttattttcaagtgtgtctaaaacgatatacggatgaaatgggggtttagatatgatgtataaaacatgaattctcatattctagtat

SEQ ID NO: 403962 - DNA, 580 bp, Cannabis indica
caatatatactatatatatatatatatacaattgtaatattttatacatataaatatacataagtactataatataggaatttttacaccacatactgaaattttcaatttttttacttttcactgtgaagcgaatttttttttcaaatatattgtatttttttttcaaaaatatcgtataagttttatactgtgtactgtgttaaattttattgttgtcccactgttgttttaattgttctgttttgttgttttaaagttgtttataaaaatacagtattttataaaaaaaattcgtagtaaaactgtaaattttgcccaaaatccagtattttgtaaaaacctctataatatacatactcacaccagataataagactaaacaaaaatcatactactaattaataattctctttgatgaatttgcccaccaaaccaaatgttaaaaataaatctaatgctttaaaaaaataaaacaaaactaattgtcgttgaaaacattacatttagatatatgattatttaaattataattaaatattattatactaataaagtaatataattaaatattaatatt

SEQ ID NO: 403963 - DNA, 538 bp, Cannabis indica
tataaatataattgtattggatcgatttttatttgaattttgagattaacattcaataatctaattagaatctaacttttagaatccaatctaatccaattgtaattaaatattcaactttttgcaattaaattagatttgatcagttcgattggattgaattggattggatgatgttcactcattacacttattttgtacttatagtatagaaaatttttttttcaaccttcaaggcatctctaatagtaaatatcaaattttgtgttaaatcatcacaaaagtaataaaatttcaacactaaaatttttttatattctaatcacaatattaaaaattacactaaaattatattttttattattatattataaataaacacaaataatatatatacaaaaattttactcataaatatattattgggtgattctacaatgcactcccttaaaagggatatactgatgcaccccctacttgtttcggcatctagaaaaaaaatttagtctaattttttttcatattcatgtacgctata

SEQ ID NO: 403964 - DNA, 486 bp, Cannabis indica
tggaggtgtacgtagacaacatgctagtctagtctaaagcgtgcaatagccacgcagacgacttagaagagtgtctcgaggtagtccggagatagggaatgaagctcaacccaaagaaatgcacctttggggtgaaatcaggaaagttcctgggcttcatcgtcagccagagggggattgaggcaagcccaaaaaaaattcaggctctcttgagcatgccatcccccaagaagcataaagatgtgcagagcctaacgggaaaggttgctgccctaagccgttttatctcctggtctacagacaagtgcattcccttcttcaacatatttaagaagtaccagaagtttgaatggcctgacgagtgcgaggaggcattcaaaaagctaaaagaacacatggccaagcctccaatcctatcaaaacccgttctcggagagaacctgttcttatatttggccgtctctgagcacgcggtcagcgctgcct

SEQ ID NO: 403965 - DNA, 893 bp, Cannabis indica
tttcttttcttttcttgttttttcttttaaaataagggtcagcccaaaaaagtcaaaaagggataaaaaaaaactaacctacccctcaaaaacatagacttttaacaaaataacctatcgggattatggtaaattactaatccattaaaccgacgttctaaaattctaaactagtctagaatatcctcaaaatagtccatccattaatgtcatgacatttctgaccacatcgtcaaatttccacagtcgttgggcccgaaaaatatttttattttaaaaatggtatcctcgattcccacatatcctaatataatctccgcaattaataaattatgcttaatataatcatttaataaatcctcactaattaccctaagtaagatcataatcttacttgattacaaaataattacatatttaatagaatatgtctatttaaatatcattttattttcctagagattacacattttatgtcaatagattcaaactatatgttaatgtatggaatttgagtttagtattatgtgaccaggatcgacttggactactctaagaactctttattgtaactagacctaagtcatcaaaaaactacaaccacattcttatatatctatggcatttccatcttgttcatagttgttttgacaagatcattctttgtaaagagtcaatatgaatgtatccacttgaaagtaagatcatctttattcgaatatggatgtacattcaggggtggatatgaggtatcgttatattcttaagacgatcactccagattttaccttatgttaagaaatttgaaatgtttgagaaatttcatgaatttctagcaatggtgggaaaccattaaggtaattggttaaagatcttgcaaactgataggggtg

SEQ ID NO: 403966 - DNA, 756 bp, Cannabis indica
ctgtggctgtggcggcggataaagtgcgaaaattgggatttgaggaggcgaagagcctggtgagagacctcggggagattttcgttgctagtgaagacatgtttggttggattatcggaatatgagttttgggttgaatttattggtttctcttaatttttatttttcagaattttcttttttggtgtgggtttcagtttcatgggcgatcccagtgagtagtgagtgcagaggctccagtttttggctcctcaggggtttaggggtatagtctagatagagaagagggtaattttggaaactacagtaaagctacatgtcgttttccccaaacgacaggactcaggaatatattttcaaattcctttttaaaatatcgacatgacttttaagtttttaacaattacttttttacaattttttatttaggagaaaggggaggaggagactacccacacctctctctcgttgcgcgtaattatgagcgcttcaactccgctcaccaatgtgcatctctattttttaagggtaaatgacggaaaaatctccaaactttcgttttggtttcacttaacctttaaaatttaaatttgtacgagataatctctaaaatcactatactgatagcaaaaacatacatccgtctccctgacccgttatttgcctacgtggctcagtccaaataggcaattgcttgccatgtcattaattattatgaagtgaaaattaaaaaaaaggttaatgaattttttttaa

SEQ ID NO: 403967 - DNA, 581 bp, Cannabis indica
tacataaggccatggtccccacactaattaggataatatttttttgtagtctcaattaattggttttaattaatcaattagaattctaaataagtctatatcttgtttgtgaatttttcactaagcaagggcttatttaagaaaaaaaaaaagaaggatttaggttttatttgttaattaagagactttgtaaggtctaattaatatataagtttaatggcaaattttatttgataattaattataattattaaatagatagaattgacatctataaagtcagaattaaaatatggcatttgtgaaagaaaagataacttgttaaataaaatgaaaaattttaaactagtagggaccacaataaggccgcccacttaaggaaatttaagccattattttatctttttaattctatttaaattctaaacctaaccttagatggaatcctagaaatagaatatgatgactcttatttaattgacttcagactcttttgtcaaacaaaattagaaaataaaaagagaacctctcctcttctatttgaactcttcttgagattccttcatagaatttcgaagcct

SEQ ID NO: 403968 - DNA, 554 bp, Cannabis indica
aattcttcttcttcttttttcatcaaattttaatttaaaaccatataccaatttctttatatattgcaaaattcttcttcttcttttttcattaaaattttatatttttcactatattttttattttttttaaaatatataatactaatagagtttttttcaaaaatgtacaacaaaaataacataattacaaaaaatgtgcaaaaaaaaattattttaaaaatttatacattttgaaaacttcttgcatgacaccatacctttttttttttttgtaatcaacataacaccatacattttaatcattaaataatataaatcattaataattaaattaattaccataaatatattaatgtaattaatgtttgtaatattattttgtaatataatgtttataatattaatgttttaaaaattattaataataaaatatgtttattaaaaatcaaaataataatttcgtaaaattaattaaataataaactagttttataaaaataaataagttaaatatttttttattaaaatataagtatttattatctatttta

SEQ ID NO: 403969 - DNA, 753 bp, Cannabis indica
caatcaagggataccgagtttcagccccgatcatgtgcttgctgacatagtatactaggtgttggactttgccttcttcccagactaaggcctcgctgacagcagtttcagagacgaccaagtacagaaacaagtcttctccgtgagccagttttgacagtattggcagagcttggccatgtgttctttcaattttctgatcggtcaactcaaatctttgacactttttcaaaatattgaagaaagggatgcaattgtcggtcgatcaggagataaatcgacttagggtggctacctttgcggtcaagctttgtacatccttgtgtttctttggggaaggcatgtttaacaaggcctgtattttttcagggtttacctctattctgcgttgactaatgataaatcccaaaaatttccttgatttgacgtcgaagctgaacttcttgggattaagcttcatcccatatcttcggaccacttcaaagcactcagtgaggtcatctgcatggcccatgcatgttttggatttgactagcatgtcatctacgtatacctccatatttttttccaggaggcctttaaacatctagttaaccattcactaataagttgcgctggcgttctttaatctgaaaggcatgaccaggtaacagtatgttggaaatattttaccaggatctagatttactacctagtatgtttgattaacatcctaatatgaattctaaaacaatgaaataaacacataagagt

SEQ ID NO: 403970 - DNA, 694 bp, Cannabis indica
tatagatttacattgttgccaaatatgtctcctaaatcaccgtgacacatttacaccgccataaatgatccagctcatcaccaacaacaataatctacgttatcttgaaatacactctttagtacggacaatttggaagcattgtaacacacaagctttctagatacgtacatgacttcattgctagatgaaccttcaagactgacaaagttgtccaggagtgcacctccaaattagagacaagctatccggaagagacattccatacacggtacaagctattctagaagaaccttccaagttctacaagaccttctgcacagggctttccaaatccacactaagcttccggtatttgctctccgaattcacatcttccaatcccggacgataaaacttgtaaccataaccaacatatatattgtaaaattttaattttataaggatttttttattatttttagtttcaaaatatatatcatctaataaattaatgtaaatttatgtgattaaaatatattttctaaaacaatatatgtttgtataaaattcattaattatagtgaaaataaatagaattgtatttctaagcaaatttaattttatttggtacattatagatattttttagttaaattatttaatttttaatttttttataatcatttaaactaatgatataaatgttaataaa

SEQ ID NO: 403971 - DNA, 655 bp, Cannabis indica
attgctggcaaatctcgtcttacacatagaacgcatcctactcatagactttgtctttgagtggctcacgaatttacttgttcccatactttccgatcattagctcgttgaatactttctcctcttcgagttgattggctatgggttctggattgcctcaagtcacacttgcctcttcacgctctattctttcctcccgagagcagtttctcgtattttccccatcaaggtacgtacgagtcctcgctctatggctttgggaagaacattggtgattcctagcaggtgatctccgttctcccggttgagttccaagatcatcctcattttcatgagggatttctcgttcattagtttcttgttgcctcctttttggctgttcatcctgattctcaaggggtgtctcatgttccccgggttattcttcccaagccttttcctgtctcttggtttgtgagccatgaggtctgcctcgtggtcttctcactccaggttcaggctgattttgagcgtttgtcccctgcatcgccctggccgaagttgcctctcgttctaactcagtgtttcgacgttgcgcctcttccagacagtgtctcaggcgacgacattctgtttcataagttctttctcccatagattgggcacctccacggtt

SEQ ID NO: 403972 - DNA, 543 bp, Cannabis indica
ataaaattccatcgacgtactatgaggctaaaaagagactaaaaaaattaggtttaggctatgagtctattcatgtgtgcgagcatgattgttgcttgttttataaagagcatgccactaaagatgcttgtccaatttgtggaactagtcgatggattacttcaacaaaagctaatggaaaaagggtgccacgtaaggtgttgcgctattttccattgacacctcggttgaaaagattatatggttcaagacatactgcaaaacacatggtatggcatcatactggaaaatcgaaggatgaacgagtgatgcgtcacccggttgatgggattgcttggaaggactttgatgctaaacatcctgattttgccagtgaacctagaaatgttcgcttaggtttagctgctgatggctttaatccatttggcaacatgagcctagcatatagtatgtggcctgtcgtgttagcaaactataatcttccaccttggatgtgcatgaaagacaataatttcatgttggccctactaattcctggaccaa

SEQ ID NO: 403973 - DNA, 634 bp, Cannabis indica
tacgttaatttcattcttccattgcaatacataatatgtagtaaagcgcacacacacacctgtatcaccttgcctgtccaagtgatctactttccaattttaaaaacaacatattgagaagtgacttgaaaatagtatccggctattccgtgaatcttgttcctgaacagaatcaatgccttcaacattagacaatatgtaaaaaattaatagttcacagcaacaagttttcaaatgacctgcccagctaatcagtagtactaacaaacccctaacaaaaaactcataattaacttattcatcattcaaaaattgatcaaattaagaaagaatcgtctgaaatatttccactttaaatctacaaagttcctttaatcatgatgcattaagaacaatattgacattttaagagaaaatatagtgctattaaatattttaaaacggaaaaatttcaagagcttactctctttctccaaagaggaagaaacttaggtggcgtttggttggaggtaatgaaatagaatggaatggaaaggaaacaattttcattctattcttttgtttggttgcattttaaagtattggaatgacattctaatgggatgctctttccaccattttggtggaatggcta

SEQ ID NO: 403974 - DNA, 500 bp, Cannabis indica
tacagaaacagcatcataaatcccagtcttacttaagacaccttggtgttgaagtaacaattgatcagtccattcaatgagacacctcataaaaccggcccgcccccgaaagacaaaatcattatgcacattcttgtcctttaagtaacggtatagacacaaaaaaaaatccttgttcacttggtaagtcaaatccccatcatctttactatcaacatctcctaagacatttgctcgaaaaatggcaccataacctctgacatagtgaacaacgttatcatcatcagaagaatggtattttaagtctcctgaactgacatcctcgatattaaaaagagaaatatgatcttggtggttattagatgcttgaacctttgttaatgacattgagcgatgataacgcgagcggcccaatattgacttctttcccaaattcatcaagagccctttgagagcctagagccccaaacatagacatgctcaaaaaaaaaaaaaaaaaa

SEQ ID NO: 403975 - DNA, 646 bp, Cannabis indica
tctgaagagtcttcttgctccactagaacgaattttccttttccctctataggggtaaatgggtgagcaagaaaattaggttccctaattctgatggcatgttccacatgtgcttggtcggtcgggggagctttcttcttcttcttgcttggcttctcatgctctgaatattcttgagcatactgtttggccccgtcgcctcccttcaactaagcctcacgcttgagttgaatgagctttttttcctactcggtatcaccaactcggcttggcttcgccttcttcttcttctccttcatgggcttcggtacaaaatcatttgggaagagcttgtacttcacaaagttggcctcagtggtcaaaaaagtgaaatttcgagcagcttctggcagttggagaattttttgtgccctctccttgagtcttaatgtgaaaggaggaggacagtatgaaggaatcttctggaaccgactgtggacagtctccatgccctgcacaaagtagtactcgtccaaaaaatgccctattttgctgacatcagagtccacagtacccttcatcaatttctcgtccaattgggagaagtagaagtaccccgatctgctctgcttaggaattaacttcaggtcgaagagccagttggtgt

SEQ ID NO: 403976 - DNA, 551 bp, Cannabis indica
gtggtgttgagcatggtgctcgctcgcgccagaaactttgacaaaaaaggtgcttgcacgcgcgaaatgggacaaaaccgtgtttgaagacacggtgtcacccgttcaaacacgagagcctcgcccagtaggctgcaactcgtgcacgtaaaccctgcaggcgctaagaaatgctggccatcccaccctgctgattctccatgcgcgcgcggacatgcagcctgtccctcagccaagagtgattttttcacccaaatccgatttttgtgggattttttcaattttttcagtttttctcgatttcaaaccctaaaattcaaaatgaaatattatttttaatatatttaaacctaaatatcaatattctaaattaataatatttaatttttttttaatagattattattaatttttgatattttgaggtttaaatttaaaaaattgattattttattttatggtcagattttaaaaatttgttaatttctttaatattagtatattatttaattgtaagattagatattataatattggacatattttaaatt

SEQ ID NO: 403977 - DNA, 655 bp, Cannabis indica
tggtatggctaataactttcacacgtctattgttattttgaatttcggatttcagtttcttctaattttcgagaattaggctttgaattttcgcttttgtttattgttggttgcatataaatatatataaaaggcttttgaatcgattgggcggccaatcccggccgtcgcagagcatgttaatgcatacagcttgtttacggtgacccgaggctttagccaggaagagaaagagaagagtaaaacttggggtggtgtgcctgggaattctcgagctttgattcgaagaagaagataaatgcagaaatcaatattacgctccagagttattcaatttgtgttcgatccattctggttcttactctcaaaagttctgggattgaaataatagattttgaaaatttgggtaaaagaggtcaaatttggctaaatgcaagttaccaattgtattatctagtttgttaaatgataaaataaactttgtattttttaaaattgtataaataggattataaattaattttttgtcaaaataaaatttaattataatatgatctaaaattaatatgacagaactgtttctattttctgtatatgttcgtttaaagtttgttatattaaaaaaaattattctcagaattctatttttttacta

SEQ ID NO: 403978 - DNA, 514 bp, Cannabis indica
aaaaaaaaaaaaaaaatacatctacgagtatttgttcatttgttctttaattttttaaaaaatctctatattagaacaagaccagtggtggcaacaatgctcgacccacttttatgtttttttaattatgttagccaattataaaagaggggaaaaaaattgagcaacaacggtgttaatgttatagccgcaaagagaaatgctaaaagatactagtggtgccaaacatcctcctacgtaggggtgggcatcatccaatccaatccaattgaaccgaaccgatccaatccaatccaattacaaaaagttggatatccaattacaattggattggattggatgttaaaagttggattctaattggattggatcggttattggatgtcaatctcaaaatccaatttaaaaccgatccaatccaattacatttatataattttaacagatccaatccaattacatttatatatattaaaaattatttatataataaaaatatagaaaagtataatat

SEQ ID NO: 403979 - DNA, 697 bp, Cannabis indica
acatcatgatcaggaggaactctaagctgtggtaaatctcacatttgaagagtagaggtgcatgtttgccgaatggagggataaagagatggaagcgttaagggctcatcatgcagtcattgacaatcatagtcggcaagccactgtgctcatatgaaaagcctatcaatctgtcgggcagcaacccccgaatgtcatccccttgggtgaaatagacgaagatccagcgatgaatacttcccagactataaatggtcagccatcaaatccctaatcacaggttccgcctgtgggcctagtggtaggcgggcagactctgtctagtaattcatcacgagaagtcatacccaacgattccaaccaggttaatggtgtcggtcagcacattagccaaaccaaccagtcgctgagacaaccaggcgtttccgtattcgataggagaagaggagtggacgattagcttgacacgccgatcgtgcagcccgaaacccgcgttcaaattcccgctcagaaaaatgctgatgtgacgaactaaagagtatgttccaaggcatggccggtcagaggaataacgatctcgagttggaccaagcacgtggaacccctttctcccctaagattaatctcttggagtagccccacaagtttaaaatgccatcctggaagatgtatattggtaaggaagatctattatccc

SEQ ID NO: 403980 - DNA, 911 bp, Cannabis indica
agactgtcacgtcaccgccttgtacttctctaagaaccttcactcatagcttcttaaacttagaacttaagtttttttcttattgttgcatgcattagattttcctgtaggataaatgatagacgtatttaataattgataagtgataaaaaaataataaaatatgaataaaataataattaccttctcattaataaaaatcatatcatgacttatcaattctccattcttcttagtattaagagacttccatattctacaaactctaatttttatgctccaactatctctatcagtatttaagtcggtaagaaaagaatactcaagtcggtaataaaagaatactaaagtcggtaaaaaaagaatactccatcatgagagaagaagagagaaggtaagtagtaaaatgaattatgaatttaaaagaaatagcttaggatatataaatatatataaatatatatagagtttagtaaataaaaaaaccaaaaatccaaaatatatatattatttttaaaaaaatttaattgaaaaaaaaggtgaatcagtatttttttctcccaaactttgacatgtaccaaatcataccccctgaggttttttggccgttaaaaattccccccgaactattgtgatggttagattttacggacttttatctaattttagtaaaaaatttctaacatggatgaaagttcaggggcatgatttagtacatatcaaagtttgagggacatgatttggtaaaatatcaatgtttagagagaatggtttagtacataaacaatcactaaaatagtaaaattgaatgaaattagaaaagtccttaaatctaacaatctcaatagttcacggggaatttctaatgaccaaaaaagttcaggagacatgatttggtcaatgtcaaaatt

SEQ ID NO: 403981 - DNA, 899 bp, Cannabis indica
tttataaaaatacctttaagaaaattatttgcacaaatactgtcgtgccatatcagcatatataccgaaattcaaaataattaccgaaaatagaaaaaaaattggaaaaatcttgttttcagaaatttttgctttttgagagttttagaaaaaaaaaaacaactatttagttgcttttgatgtgaataagatatcaattggttactttttcactaaaaaatttattcaaaattgttcacatacataaataataaaataatcattttaatatgtgagaaatatatatttttctgcctccaaaaaatgacgactaatattaaaaaaactttttgtttcttttatatatatatagaaatatttattggctatattatgttattttattatttaagatatcttaagattacttttttttttctttttctaatgtaactcatatgatgtttagatactattcaatttatttataagttattttataaatctattaaaatagttttataaaaataagtttatttttatttaattttgtaatttttaaatataaaaatttaaaaaaaaaatgagtaactatgttgtttgatatattaaattttattaaaatttaaatatcatttatttatttataaaaaaaatatataataaactaaaatatttaataaaaaaagaagaagaaagaaaatatttgacaaatttattatcattattaaaaaaaaataactttactatatatgcatggttgagtcacataaaaataaaaaataataaaattagcaaaaaggaaaaaaatacgtgtaggcttaaaagaaagttactagtatatgagttagtaattagttttttataatatttaaaagatttataaatacagtaaaacctctatccaagaatacacttgg

SEQ ID NO: 403982 - DNA, 526 bp, Cannabis indica
aagaaaataaaaaatatatttttactattttcaaatttaagatacttttcataatatttaaataattaaaattatatggaccaataaaaatctgtgatatggatattacacgttggcagttaatagacctaagttaatcacacctcaaaaactaaaatggaaccatattttgaatagtttcgccaaaaaaaatggatatttataaaatacacttaaaagtactcttttttttagagaaacagattttttaaaaaatttacggatgatgatttacttctttatggatttttattttcacttttttatagaaaacatgagaacatcgtaatgtagagccattatgaaaataacgtgtaaacatagtataatatttttgtgaaaataatgtaaaacataacgtccatatttttgtaaaaaaaacttaaaatccgtatatatgtaaaagagctaaaactaaaatccatacttttgtaaatatttatcttttttttttttggtaattatgaaaaaatctcaaaaaaaaaaa

SEQ ID NO: 403983 - DNA, 1135 bp, Cannabis indica
tttttttgttttttttttgaaatatgctttgcatttaaattattcatattaataattattattttttctaaatggttgaagtacacgcatggtatttggtgtagcttggtaaactttcctattttatgataatgatcatttttattttattttgtaatatattttaatttcctacaaaccaagaaatcaattattgcatgcatattattgttcatttgtgtataaagtaaaaaaaaggatacatagtacataaaattagaggatatatttgctaaaatgagaatgtagtaccattggataagactaatgttgctcaatcacaagtctttttccaatgcccaaaattttacgaatacaatgatatattttaaaataacattgtctccagctaagagccaacgactatttttattttaattttttatttgtattttaatttccttattgtgtttagagtaaaacaaagtactaatgtagtactattggtgaagactacacatttattattgtgataagactatacatttgttctattcattgacaaaattataattaataatatattaattttgttcctttatttgtggctaattataatttttgccccctaaactttgacatgtaccaaatcatgcccctgaactttaaggtcattaaaaatgcccattgaactattaagattgttggatttaaggacttttacctaatttcattcaattttactattttagtggttgtttatgtactaaaccatgttccccaaactttgatatatacaaaatcatgcctctcaaactttcaaatgtactaaatcatgccccctgaactttcatccatgttagacttttttactaaaattggataaaagtccttaaatccaacaatctcaatagttcaggggcatttttaacgaccgtaaaagttcaggaaacattatttggtacatgtcaaagttcaggggcaaaattcctaattagcctttatttgttttgtcttttattactatgcatgcaattcatcttatataacaatttattatttttttccagtatagtttgaagtacacacatcgtttgagtattgctttggtaagctttcctattttttgttagtggtaaatacaagtctttgtcca

SEQ ID NO: 403984 - DNA, 1139 bp, Cannabis indica
tttttctggtatcacttggagcatttagattcttgtaacaaatctgttttgctaacgaggagactgtacatacaaatacagaaccatgtatctttatcttttttgcaggaatacacctcagcacaagacaacctctcatccctgcctactaaccagttccaaaatctggaagattctcagtcaagagcccccctctgttgcctacttcaggaacttacaaacttagtgtggatgcaagagttagaagttgagaaaacaaacatggttatggtgttatcgtccaagactctcaagactagataatagtagggtttgactcttctactctctcagggctgtctcccatcttcgcagaagtagaggctttcaaccgagcgttgagttggtgtagagctatcaatttctctattagtgtggtgttctcagattttttggaccttgtctcaagaacactaaagaggagaaaagactattaagctctttcagatttaatttggactctactcaactctttgtcctactttcctaatgtatctatccaccacaacccaagagctcacaaccaattggcgcacaaactcgcacaagctgcattaggaacagacgaagagtatacttgaaacaattgtgtttcaaatcttgtttagatcttctaacctgatatttcttgtttctctttgtgttacagatctttttttaaaaaaaaaaataaaaataaaaaatagttagttattctgacaataatattacactgtgtttaactagacacattgtactaggggtgagcaaaaaatcctaaaaaaccaaccaaaccgaatacaccgaccgtccgaacatcgaaaaaaccgacactggaaaaaccaaaaactgaaaaaaccgcattaacatagtcggttttagtgtcaatggcaaaccgaccgaacatatatattatatataatatatattatttttgtacatatttaatatacaattttattaaactagttttacttatatcttttttatttaaagtctcaattattcattgctttattttattatagtttgatgcatttacatattatatatacacattcataaaataatacaagttttttaatataactcattattatattaatagcacaaataatttg

SEQ ID NO: 403985 - DNA, 552 bp, Cannabis indica
tcatcattacttggtaccctctactagcaaatcacttggtactctctagcaaatcctacacttatatgtgacatttgattggaggtaatgaaatggaaataaaataatttttatttcattcctttatgttgttgcattttaaagtattaaaattttattccaataaaatgactatttcattttgaaagggaagaaaaaacttccaatgtaagatgagaaaaattcgagacctttccaatttgctaagaagtactcgaataagtttcaactaagcacgcaggtgagctatcacttgaatacaacaaaactgtcttgggcattatgcttctttagcatcagaataagttagagaatttgtggtaaagccatatttgatcatttggtgtagcagcatgtgcccatgtgatctcaggacgtcacttggtgcgcaactgagttttaatcaccatgagcaagtgactttctttacttgaatcaactaagaggcgtttggttgggaggaatgaaaatataggaatgggaatgggaatgggaatgagaataggaatggaa

SEQ ID NO: 403986 - DNA, 496 bp, Cannabis indica
tagttgacgaaaaagcatcaacaaatataaatatctatcgatagaaagatatagatctctagaaaaattagaaaacaaaaactataatatatatattttatgtaaaataaaactatagaaatatgatgtatttataagtttttagagtgtaaataaaattcttcgtaggaggattttttttttcagaaaacataagggaggatttattagttattcggtagtttcttatatagttgatgaaatctccctaatatatgttgaaccacatgtaatgtatgtgtataatattagcaagacaaactaattggcacggcatgaaccatgctatggcttattgcttaaattattaaataaaaaacataaagattctttacttattaaagaaacaacgagtgaaaattaaactatatgtaaagtgatacgagctatttctttcaattgtgatccaaatcattttaaattatggacagattcaaaaaaaaaattaataaattaa

SEQ ID NO: 403987 - DNA, 713 bp, Cannabis indica
gtctacttcatatatttcttgttgaattatattttctttagcctttatatttaaaaataagtttttacaaaaaaaaactcaataaactattatttactttagtttcccattattttaaactttgtttatttttatatctcatatatttttgcactatttttttatgccacataaaaataaactttaaattcttttccaacatttatcgaaaaaatcccctaacaaataattagtctagtccaacccaatcctgtataccaaagtccagcttgtatactgggtatccaatctaatctaacatttttcttccaatacaatctaattagtaattggatttggaaaattatcatccgatctaattcaattagacctcaaaatccaatccaatccaattaggtttttaattagatatctagttacacacctaattttttatattagcttaaaaaataaggaaaagtacgtaaaatcaaaatattactatttatttaagtttaataatttataaaaatatcatctttataagtgtaatacaagtaaaagtttaaaataactaaagtaatagcatttctaagtaataaaatagaacaaaatatcataaaaactaatacacaaaacagttaattgttacaatttttttttaaaaaagaatagccactaaaaatataattaatatatatgttttatttttaatataaataaatataaataat

SEQ ID NO: 403988 - DNA, 996 bp, Cannabis indica
aaaaaaaaaataagagatataataatcatttattttattataattagtttattttaaattttttatttttttaatttgttataaataagtaaatatggttttagtacaaaaaaaatttattataatcttttaatcaaaacagttttttctaaaagttgggttggagcagcttcagcttttagctgtaacttttccaaaaattcttcaaaaaattgtttttttgaatgtttaccaaacacgtttttatcacagtttttttaaaaagcattttttagcttttcaaaaaactgtgctaaacggacccaaaagtccaaaacacacaaaaagacttatttaaaaataattataagaactatatatatatcttataagagttacatcctatacgttattatttaggtgaaagagttacaccataaattctagatagatgacttacataattttaatgagatgactcttacatctttgataggatagtttattttgaatatgatgaatctcatataatctcggatgagatgaatctcacacatctttgatgggattaatcttctctgatatgaggactcacacattttcgatgaaattatttatttcagataggatgacttatctcaaatagaatgacatatatctcggataggatggcttatctcatatgaaatgactcaaacatctataatgagataactcacatttcttagataagataacatatctcaaatgagataacttacatatcttggatatgatgacttacacatatccaagacagattacttgcattcaagatggaagatacatccaagacgaatgacttacgtccaagatggaagacatatacaagcaaaagatttatggtttgagatttgaaaatattttatgttttaaaatttacaaggtggggtccacatagaatacttgattggttgtgttacaaactaatttgaatatgcttttgagttttaagctaaaaaatgaaaaaaaaaaaaa

SEQ ID NO: 403989 - DNA, 724 bp, Cannabis indica
aggaaccgacggcatagggttttccaaaaaaaccctattacatcgtcttcttcttccccaccataaccagccactcctacagcagagaaaacccacgaaaaccctcgccaaccacctctaaaaacccacatatctctctcatttcttcaccatttcacctcatttttgtcttaaaagtttctattttcaatatctaatcccatacactaaaaaagttttgttttttcacccatttacactgtacccgaacctattttaaaaaaaggtggtggtttaactccgaccaccgcttttagcggagaaatcgttcaatctcaacgttcattaaggtataaatatgatttctgttcattttattaatgtacattggtattatttcgtttttgtaaattttttttaggattttttcattttattaatattatattgtgtgtgctataggtggccggatttttggtcgcaatttgtcgccggattgcgtttataaggtaaatatttatttacttgatatataatatatatgtatatattttgtattttattattgaatatgtgtttatatatatgttgtgtgtatatatattgtgtatatactatttgtgtattttgtgtatttgtattgtatatatatttgttgtgaatgagaatgagaggtagtaggaatttaattagtttagagttaaagtttttaaaataatggtagtgtgatatttagttgattata

SEQ ID NO: 403990 - DNA, 862 bp, Cannabis indica
tcttttctagcttcaaatttgtcgaagaattttaacatggtatcagagtaggactttctgccattaatggctaatgttgctctagtgtccggccatggaaaagcaccaaactcaaggaacaattcaagtcacctttgaacagattgaagaacttcgattcttcaacaatcatgtacttcaacaacaatttctcgatcaagcttaatgatcacaactatctttatactttttgtagtaccacggtgatagaaagactcgtggatgagcttttggagaaaggaattacgaatattgctttgtgttctgaacctcgaattctagggtttttataaacccatgggtttcgttgcaaatccgaatgaggaatagtgtattggagaaaaaacaataagaagtaagaaagaagaagtgtatctggcaagaagaagatcacccaataaagtaataagtttgaagagtaaacactattactttcaatcaatatcgaagtccaaatagaaagaaagtcgaaagtgttacttctgtggaaggtctagacacttgtaaagattttacaagaagtacaaggagtagaaagaaagttgaaagtgttacttttgatgtctaactctgaagactttctaagaacaacgacagttccaacaattttttagtatttgtaaaatagtctcaaaaattaatgatgacaaattatctatattatagagttaacactaatttatgaaaaaataataacatatataaaatatatagactacttctttcattatcaaattaattttaaaatagaactacattgacaacactacagtagaacctatatgttggaaacaagcaggttagatcaacactcataccagaa

SEQ ID NO: 403991 - DNA, 683 bp, Cannabis indica
tagggtatgcactccctacttagaaggatggtggttaatgtgagatcagttcctaacccatccttgattgatgtgattgcacattatgaagccgtcactgacatccttgattagcgcgtaattgtcaaaggatgaatttaatgcatctgacatgtcctttcatatacgtttatagacacttcctccatacaacattaaatgttatttgacagtttatctccagtaccctaaatccggaggagctggacgatatccaactcacggaggcgaatgaaagacgaatccctctggacctagtcatggctcttgaagtagatgttgggttgtcctgaagggattttgcctatgtaatgactttcctttaattatctccgagtcctcgagcttaatctaccacatgtcacattgtgggattaccatgtatattgggagaaaactagcacaacaattacccctaagtcttatttagtactttgtaaataagacttgtatattgcttctgttctcagggagtgacgtggcacgtacctcgcgcgcgtcggccattttaatgttcataatcattccgccttatttttttggcaggcagcgattcgattcctgcctgttgacagaccccttccttaatgccgatgtcagaaaggtactcaaacgtctgaacctcccttttctcttcatctcgt

SEQ ID NO: 403992 - DNA, 1136 bp, Cannabis indica
atagagctgttgttcttcttctcctttgcctcattttttttctatttgttttttcttagctatctaatgtgtcatctccttttgaaactttttggtttgaactgtatcatattgcaaggtcatggacactaattaaacatgtatttaatagagacaagaactagagattgaatcaattttattgtgggcaaacacacaagattaagttgtttattcaaaagttggaaacttttcaatttgataactaaggatgttcatcaaattgcccacaccgcacaaactaccagtactgtaccacactacataaaaaatatggtttgaaatcttttgtgcgggtgcgatttgcattttttctaaaccgcgcggtgcggtacaatttgcaattttaaatttaataattgcagttcaaactgcaccacactatatattacaaagttacaatttttacaatacaatttttatctttttccatataagaacaaatatatgtaatatatgtatatattacattatttttttatttttaaaactttcaataattttttttttgtaatgggataacttttaataattatttggggaattaagaggacggaatctttccgttctttgagagggattttcttattttaataatttgaaaaaaaaaataaatattggagtgtattaaataatactcttttggtaaataaaatggggtgtaattataaaaaataatttttaataggataaatttagtaatgaagtgtatttataatttttagggggtgtgaatataatctccttaagattttctaattgcattatttacttttcacgaaaccctagactgtctacatcactttattctttctcaaaaattatcaccgttgactccagctccggcctcaatctccattgttctcggcgacacagcggcggtatcactctccaacatctactgagtttgttctctgttgatcaatatctgtatttgttttaagtttatgaattcctttctcaactactgatcattggcttcataattcataatcataatcataatcataggtaaacatgtcatctcggccggaattccaagcgcctcctgagatattctatgatgataaagaagctaggaagtatacctcctcttc

SEQ ID NO: 403993 - DNA, 684 bp, Cannabis indica
ttctggatttaaaatatgtttatgtgtattgatttgaagtggttttaagggctgtggtgttgattgagcaagctttgagttttagaacgcaagcttggctctctaatggtgattttgaattctgagcttgggttattgttttatttcttgcatatagtttattggggtataatatgaaggtctggaaggtttatgtttgtttggaatcgatttggttgagctttgaaactttttgggttttctgcagaaaactgggtaaccggtttttgcagcaggattccccatatatttcagctagtcgattcatcctagtttcaagtttctggttggttgattcgctactagtttagggtattgcaaaattaagttgatatagataggtttttggtttaaaaactaagttccagttgtgatttagcgagtcacttattcgtattgttatcgatgtgatttaggagcctataattcgctgagcaattgttcccctcaggttgaccggtgcacctgaattcagaattgagataagattagtataatatcatgcatatgttattaaatgtttagcgtacatgttgtttatgcctgttagattacattgatagcagtaatactatacatagagttgtgttgattactgataaatgtatgttggctaaaatactgatcgatgctgtcacatcaata

SEQ ID NO: 403994 - DNA, 691 bp, Cannabis indica
tatggagatataaataagataacatttcttttcatactccaagtaattattatttgttataagagacgtataagtacaaatatatttcttaaaagttctttctgtaagcacgaattacgtcaactaaatctttttagaatgatactgctagcgactaagcttgtatagaaaatacttgtatggatggagaatatttagtattttgtgtcaccaacttagaactattgggggtttgaaagaaacaaaaaatgtggatgttgaagaaatggttgttatatttatacacattgtatctcatgacattaagaatagaattatgagacaacaatttgcacgtttgggtgaaacagcgagtagaaaatttaatattttgaatgctttgttgcgtcttcatgggctattattaaggaagcatgaaccaattcttgatggttcaattaatgagaggtggggaaatggttcaagaattatttgagagcactagatggcacacttattaaagtcaatgtgcctgccatagataagcgtaggtatcgatctagaaagggtgaaatttctactaatgtattaggtgtagtctcataagatatgcaattgatttatgtcttacccggatggaaaggatcagccgcagactctagagtgttgtgagatgctatatctaggccaaatgggttgaaagttccacaag

SEQ ID NO: 403995 - DNA, 501 bp, Cannabis indica
tattacctaattcacatgatatatttgtgattatagttttaatatataaattttattaaatcatgaacttataaataatcatagattcttgtgttgtctacatagtaacaaataatcatgatcatatgcttcaaatatttagtcccatgatttattagtgtactggatttacactaacgtgataatcagcgatgagatttgcttacacttagataagtggagtgtctattccaaggcattaatagagtcactactacaaaaaggccaattttcgtcagtttttaactgacatttatactattcccgtcggtttccataactgacgtacatacagcagacgtaaaatgatatttttctgcgtcagttttggacagtcgatatcaaaatatcgcgttcctttataaccgacgtgaatagtatttttatacctttttctgccggttttgtaccaatacaaacttaaaaataataaaaaaatacacacacacattcgatcgagat

SEQ ID NO: 403996 - DNA, 725 bp, Cannabis indica
caacagtagaacaactaaaaaacaccagtagaacaacagtgaaacttaacatagtatactgtagtatgaaacttataaaaaaaaatagtaaaaaaataaaaaaataccgcctggcagtatttttgtaaaaaaataacaaaagttagtataccatgtaaatttttatttttttattaattttaatttttacattcattttcatattctttaaaatatactcagttttataaataatgttctcattataccccttaagttaatgtaaaatatgtgctagacttaactagggagtaaggttatattaggcaatctactaaaaaaaataagtaattttaatgaaatgtaatatgagaatttttttttttaattgtatgtataaaaaaaaaaaaatttacttcaacttatttccaaattgccctggttcattaaaataataataataataataataataatatttaaataagttgtgttgttaaccgcgatataaaaatataacattctagattatagaagataattacgtggtgattggctctagagttttgaatgtgttggtcatttatctttatggatgtcttaattaatcaataatgttttatgtatttaagcttaacccttatttaccacattatataatgattttctatatagtatatgataatatacttttgttaaccacttggggctagctcaagtggccataggtgggtgtgtgagtgttg

SEQ ID NO: 403997 - DNA, 607 bp, Cannabis indica
aaaagaattttgtttcttcatcatgtaatgcatgtaacaataaccaaatatataataaataattaaatatatttttaatataaaataatttattataaagcattttaatcaaaattagtttttttaaaaaattgaattgtactaacctttataagttcttgttttttaactacttactaaattttttgattactacctttttaaaaagtaactattaacttttctaaaatctataccaccctaaaataaactaataaaaagttatcagctcactttctctttctctcttaatctctcggtttttttttttacttttcttcatctatatttataatagttttataacagaatacttttaaaatgtatagttattgtattataaaatgtaattatgtttcatatatataaatagtaataatttttttttgtgatgaataatgcaattaatatacagtagaacctctattcaaaaatacacttgggaccaagaaaataatattctaattgagaggttataactaaatagagttacacttgaaaaaaatcaaaatatcaaaaaatatcaatgtaacaaaaataccaataaacaattcttaatactatatta

SEQ ID NO: 403998 - DNA, 614 bp, Cannabis indica
accaatacttgcagaggttccatttatatcctaaaatttttatatttgttattagtattagtatttctaaacaatattttaatccataaaaacaacgtataacaacttttcttgacaacaaacaacaaatgaccttaaatacaccagtagtagttgttcaattgtaaattgattgcattaatttctttagatcaaccaatttaccctatgaattatacttgatatgattgacaaacactatataacaacctaattatgaaaaaaaaaatactaaaatattatgtttaaaaaaaaaaaggtttggttcagaaaaatgcttatgaaagaatacaacatgataattttgtgtatgaatactaaaatacactggcataatacagtactttctgtatgtaaaatctccataatatgttaagaatttatactgaaatattatgcaaacatcaatagaatagcttccacattgggatgtatggattagggaaaatgtgagaatgaatctttatcttaaaacagttaaaattcagataaaagaaagataaataaaaaaaatctattatatttcgacatcaatgatgcagatgggtataagcgattctggtgtaacactcaaa

SEQ ID NO: 403999 - DNA, 713 bp, Cannabis indica
cacgctgcattcaagtttggatttaaaacatccaataacgaagccgaatatgaagctttaatcactggcctaaaactagcccaagagatgaaagccgaacatatcaaaatctgcagtgattcaccactggtggtaaatcacgtatctagagaatacgaggttcggggagaaaagatgatagcatatcagagcaaaatacatgacctggtcgcacaatttaaaagctacagtctctgacaaattctaaaggaagaaaacacgactgcaaacgcgttagctcggttggcgaggagtaatgtaagtgataaagcgaacttggttgaatagttcctcgaagagcctagcattaatggcacggaagagatcgaaatgattgatgcttccccaaactggatgatgccaataacaacctacctcaacactggggaactctcagataatcgaaatgaagcttgaaagatgagaaggaaggctgcacgatatatcatagtagagggaattatgtacagacgaggattcaccatgccattgctcagatgtgttacccaagaagaagctggacgacttttatctgaagtgcacgatggattttgtggaaatcacgctgccaggcagcgtttatctaaataaattctaaggcaaggttatttctggccgacaatgatcgaggattcaaaggcctatgttaaaaaatgtgacaaatgctagagatt

SEQ ID NO: 404000 - DNA, 672 bp, Cannabis indica
tcctagtgtctatacgaggtctgactctatagagacaccgtgaggaggcagatacaaagttcatagaggtgatcttcgtgatcacctcaacgtagttttcatggtagggtctcaaatgccccaaagctacaatgagcctcgtgatccccgattgggcgatcaaggcacaaacaatggaaataaccctacgaatgttgtcgacacgcctaacgcatgagctgcaaccaccgaggtagtgatccacgctagcatagctgcgattgccactgtaactacgataacttagaacaacaccgttgtgccagggggtgttgatacaagcattgaaaataatcgagcagcagagaaagcccatttacaagcttcatgggacttctcccttcactgctgaagtgcgcatgctcgacttcccaagggattcaggttatctgaattgctaaaatataaaggtactactaatcccattgattacttaaaaaaattcaatacaattatggaagtagaccagatacctcaactagcgaagtgtcacatcctggcagcaaccttggaggagaacgctcatgattggttcagccagttgcctaaggcattcatatcgacttgggagacttttgtggattcattcttaacacacttccaagccacgatcacgtataaatcgccttatac

SEQ ID NO: 404001 - DNA, 449 bp, Cannabis indica
aaaaaatgttattctattaaattttgcttattgttattgaccttagggtccacttggaattcaagattagattcaattagattgagattggattagttagaattatagggaaagtaattatgtatttagtttttgaataaactaaattattttttaagaattttttttcagccaaaaccaaaatatatactaataatcttgacaatatatacatattttaataataaatgaataaaaattttaattcaaagaataaaaaattttaaatcataaaataaaataataaacatttattaaaaatattaaagaaattatatttttaaaaataatatttcataacataattaaatatgtatacatatctatatactagcaaaaagttaacgtacgtaggcacgtatactaaattttatgctagtttttttctacgttattaaaaagtgatacaa

SEQ ID NO: 404002 - DNA, 689 bp, Cannabis indica
aatttgctcaactatcttaaacaaagacgtctgtccccaatacttcaattcaagatcatcaagatgaatccaaattggcacccttctgatgtcttccttcttgaaattacaatcgggatcccatggtttcattattacaggccttttattgaagaagatgaaaccccccttgagaatttcacctctttcaacctcagagaagaacctgataatgaatacaccataagccaacatacccaccttgtccaccttttctttccataatctcctagcaaatccttccaatacagcaagaggtgggttggcacctagaacataacatacaattgaagaattccaaaacgaaatttcctcttgaatatcttccaaattaatcttaactttgcttgttgtctgagatttcgaaaaggattcagtcaaatttttaacaacactgccagatctgagaacagggggagtaacacaattacctcgattcaattcgtcagagcatctcttgtttgcagccataaacatactgaaatcagtgcggatatcttcctgctggataatagtcgtcaacgacgatttcagagttaggggagcaggaaaatcatcatatagggcagcttcttctgaatcaggtggcacatccaaaattagcgattcctcatcctccgagaatgctaaaggttcaacacccagcacct

SEQ ID NO: 404003 - DNA, 609 bp, Cannabis indica
aataataataataataactagtaatttgtagagtaaataggtagaataatttacagtgtaaatgtataataacttagcaattattgccacgaaaaattaaacttagctatttatttacaactgggagttaaacttaggtatttatgccacaaattactctttcagaaatacctttaatccatttcgtcaaaaaaaaaaaaaaacttacgcggattgtcagtgttgcgatattttgcacacgcaagtgcatgtatcgtaacaagtagtaaactcaccaagagtgaggtcgatcctacaagaattgtagttaagtacgttaaaattaaacttttacttctatttagttgaataaaaattcaaggaaggattaaaactagaaaataaaaatagtgcaagaataaacaattaaactaataaggaaattaacagttaataaaaactaggacttcgacttcaattgtttctattgattatgacataatatgattatctccctattatcaatttctatgcaatagcaggtttactaaggtaatttataatcttctcagatatataaatctcaatcacatgcaaactttatctactctcgtgataaatttaacatgc

SEQ ID NO: 404004 - DNA, 880 bp, Cannabis indica
ggtcctgctgacgcaccccaacgtctgctattcccactgctctcaggacgtttctcaacaatcttagtatggcttcatccatcattggctttgctatcgacagtattttgctctgaacatccattcaattatttttactattatatataagaaaataagaaaaacaaaacaaagtatatatatatatatatatatatatgtaattaagttaaagattgttgggggtgggttcatgtaaattaacctgaactgttgaatttttagcataactagtgtcccctgaccccttgttcatgtgaagcacccgagctacttccatattaatttcttctctaaacctagtacttcaggagacgagggtacttaagtagattttggatttggtgtcttaaaatgaggtggagaactctcaatttatagggagattcaatacaatttgaaaattttcaagctatgtatggacccacaggccacacccaaccacacaccaaaaacagaaaacaaaaacggtaagtcaaacgagtatttacctcgtgttttcaaatatctcaacctaatcaatttaatccaatttaattataatttgattagattggatgttaaaagtaaaattttaattggattgaatcggttattggatgtcattctcaaaatccaattaaaaatcgatctaatttaattacatttatatatattaaaaaaaactatttatatttatttatggagtaatttgcagcaaaactttcccaactatcaatttacttgcaaaaaaccatccaacctcatattttggtgggaaaaccctccaaagtactgttccgtttatattttaaggtgtcgtctgtccagtctcgttaagtcctaattttacccacgtggc

SEQ ID NO: 404005 - DNA, 975 bp, Cannabis indica
ctagggttctgaattttgttctttaaatcttgtgatttctagcagctttaagtgaatctaggccaaggtaagctcctagcaactatcccttttgttttcttaagtttcaagttaagaattttgcatgaatttgggtctttcagtattgtagctactgttagtgattgatattgttttctgaaattcattcatgaatagaaatgttgaattaagcatgttttgttgattgagcaagctttgaattttagaactgaagcttggctctctaacggtgaaatttgattctgagcttgggtagttgttttattgcttggaatatgtttactggggtgtaatatgcagttctggaaggtttggtaaagttttgagtcaatttggttagatttggaattgtcatgggttttctagggtaaactgggtagccaattttatagggcctgtaaaactggctactcgaatttgctgttgggttccctaaaaaatttatgttgtcgattcgtgttatttttagggctttggttggttaattccctattagtttagggtatttccatgttaagttgaagtagataggtttttagtttaagaacctaagtccccggttgcgatttagcgtatcacttatccttattgttatcgatgtgatttaggagcctgtaattcaccgagcagttgttccactcaggttggccgacacaccagaattcgtaattgaggtaagattagtataatgtcatgcatatgttattacatgtttagcatacatgttgtttatgcctgttaggatacattgatagcagtaatagtatacgtagagttgtactgattactaataaaggtatgtaggctgaaatattgatcgatgctgtcacatcaatatggctagattatgaataccgtattgagtataggctgacattatggtcgatagtattggggggacacgggggatagggttatgatcgggtgtatggg

SEQ ID NO: 404006 - DNA, 864 bp, Cannabis indica
atacagaatataagcaccaatgctaaaaggcgtccgaggccgagagctccaattcgtaattaaatttaatgtaatgacttgtataaactataaagtactgctatttaattgggaatttgggaatcgcaattctagggagccatgctctttattaatttgttttttttatctaatgttcctatattttttacccttattcttattcagccggctcaatttaaattggtaattggccctaccagtgtttaaagcacttttgccgcaaaattttataaaaggatataagacactattttttatttaaaaagaaaaactataattttatataaaaaactataattttgtaaagatttttttatatatatatttttacagtttcatagaaataacacaaaaactacttaaaactaacaagaaaataacatcaaaacaacaacaaaaaataatatacacagaattaaaaatcaacaacaaataaataaaagtacaacataaaaaaaccgtattttctttaaacaaaattataaaaatcgtaaaaatatttaaaattccgtacaatcatatttttataatttttatgtatttgtgaaataatctcatttataaatgtgtatatatttaaatatattttaggtgagatgtgtagtctgtttatgttaataataattttattactctagtgctaaggagattttcttttacattttcttttgcattctctctttgtttttacaataagtgtcaattattaaataatatctacttttacttaatatttagttataatattatcatgttattacacttatgtcatttactaaatcacatctgtaatttataaataactttatatttatttttaaa

SEQ ID NO: 404007 - DNA, 507 bp, Cannabis indica
aagagagagagaactttgagaggaagagcttcttcctttactttgatttttcttcaaaaagaatcaataccatttgcataattcaactaatatcagcattaaacatcaaattactcaattaaaccaagtcctctaaaggataaactactaatggcaaaaagactctattgccctcaattaagctaaaagtcatatagtcacttaagggtattttgggacaactctaaattattgactaatctcgacattcccaatgctaacaatatcaccccgctatactaaaaatactaggacgtgattctactaagccatacaccgcgttccaatgttgccgagcaccgaacatgcaaaaatatgaaatatctatatatgacatataaaatgcattctgaattcaaataaatcatcataaatatttattttaatatcaacgaataattttcataataaaaccgtaattatccactaatttccaaattaagctaagcggtctttacaactatcccc

SEQ ID NO: 404008 - DNA, 894 bp, Cannabis indica
accctaaaattttaacattgtttattttatataacttatgtaaattttatttatgactaaacagttttgtaaatagaatacaaattacaaaagagggatataaatgcgaattgctttaaaagaaaatggaacttttttaattaacagttcttcaagatgtccttttaaagctatagactaccagcctattgctaatgtcctcctgattttactgagtcagaaccagggagcctttgtcaagggttgttctattgcttacaatatttttattcttcaggacatcttgaagaactacagaaggaagaactgctccctaagatgcactataaaaattgatatcagtaaagcttacgacacggttaattgggattttcttgagaagcttcttgtggcctatttgcttccctgctaagtttgtcaagtggatcatgaactgtgtgggaaacacttcttattctctgctcttgaatggtagatttcaggggacttttaagggagagcaggggctaagacaaggggatcccatttccccccttctctttgttcttgtcatggagtatttatcccaaagaatccaaaaagcagtcggagaaaagagattcaggtaccatcccttatgcaagaaattgaaactcactaatctatgtttcacagatgatttagtgatcttttgtaaagggaatgaggactctcttattgctatcaaggaagtgctcgatgagtttagcaagacttcgggtcttcctatcaattttgtaaaatatcaagttcactttggtggagtttctcagtcgattcctcttactcaaaagattaatctttctcttggagagttccctcttaagtatttcaggatccctctaagactaacaaaatggagacttgatgattgtg

SEQ ID NO: 404009 - DNA, 621 bp, Cannabis indica
agtgaaaaagcttccactatattggacatctttgagttgacacatctcaatacaatctataaattcagttgttggtctgtggcttattctcttaccaattctctcttctttcagcaaaatctcattaaaatcgccaaatactatccaggcttctctagttcgaattccttgcagttcctgccaaaaaacttttcttccctctatgtcattaaaagcatacacaaatgtataaaacaaaattattcttgtcatctacagttgaaacaagtaagtgcacaagttgactagtacacttcagaatgcttatgtaaaacttaatggattccatgccacaattattcgccctccatcatgttaagcaatgttttatgtgaaacaacatccattgaacatatgtacatacacagccccaacttttttgggccttgactcttgtctcgaggagaccaacaagctcaattttttgttaatgaattaacggcctgaccacgcttcgcttttgcttatcgttgatccctcggacattccaacttagcactctatccatttcgaagaggaggtactcctgttgcgataatttgcacacgcaagtgtacgtatcgtttcaagtagtaaactcac

SEQ ID NO: 404010 - DNA, 616 bp, Cannabis indica
gcaaaaattgaatgctacaaaaagtaagttatgctatgccattgcagtgctaggtataaagtgatagtggaggaaactgaaacaattaaattttggaatggtgagatggggaaattgtggtagaattgtataacaaaattaaaggtgtcattaaaaaatagaatagcatgtatattaaaaatagaatagcatgtatatgacccaaaaatgtaacaagtagtgaggagaaatggtttaattcattgtaaaggttatagattttgaaggtcttatagttagaggatgatcttttgtataaattgttgtttggtttcaaacacttgctgatttactaaaaaaaaacatcctcaaactcaacattcatgatcgacaaccaccaatcaaccacaaaacaactggaaaataaccataatttaggactccaatcataaaacaataatataaaaaatcaactaaaacaaatgtaaaagaacaataaaactacaaaaataaaatcaccaaaaattataaaataataaataaatactatacctcaataactcttttgccaatggaaacttccatattatcacgagagggaacctttcccttagaaaatttctccttaccctaaata

SEQ ID NO: 404011 - DNA, 824 bp, Cannabis indica
gtatccagctgtgaattctacagcaaaaattttgggtgtgggtgctattgttcgggaccatcaaggccaagtattgctgcactttcaaagtcggtacaacgatgcttttgttctgatgaaatggaggcaaaagtattttttccatagcttaaattaggctctccaacaataaaaaaaaaattcagcaatattgaaacagatgcacttagactctttcatgctttaactactacatctatagatttgtctagtttctcttatttgattttagatgttcgttgtcttttattctttttccctgaagcaaataatctcatgttaggaggaatgctaaccatgatatgcacatggcttgacaaaacatgctttagatttggatcaagacatttgttggttaggagaaataccctatcctattttcactattactgtaaatgactgttgatttataataatagtggtactttctacaaaaaaaaaaaaaaaagaaacattcatactcccccttcatagctttgggaaaaatccattaattgttctttttaagaaaacaccaactttctttcctcaaaatctattatccattattcaatcaaataatgaataaataaggcttgacctattaatttactaaggttccgtttggtaacatttttgttttttaattttttaatcacaaaatgaaagtaaaatcttgtgtttaaaaaaattatttttaaaaaacaaaaatgcgttctgtaaccacttttgtttttcaattttaaaaatagaaaataaaagtgtgttctgtaaagtttattttcatttttatttttttgatttta

SEQ ID NO: 404012 - DNA, 517 bp, Cannabis indica
tttttagtttacaaaacttttaaaaaaaataataatgaaaaaaaaattcatgaacatacaatgagttgatttagtaagtatagaatatatttatatatataaatattgaattattatatatatataaaataacctcataagcatgagaatgccaaagcttttgttcctgtggagttaaagtctcaaacaccttatccgaagcgatatactccactcctgttaattaattattattattatcaaaacgacaatcttaaactaaaaaacaacatcaatcaaaaaaagaaacacaaaacgaaagcgacaccgttttactaatattaattaccaattaggtgagcgaagatatggtcagaatcctggttgagtcgagtgacgtaatgatgagtcatcagctgacgtgtcatgtcgtgactgtatagagcgaagctgcacacgtgttgattcatcttcttcactgatttcaacgactgcatcttcttcttctccggcgccggcatcggagacggtgacttat

SEQ ID NO: 404013 - DNA, 622 bp, Cannabis indica
ttctgcagtgcaggatccactgtgtgtggatttactggatcaaccacacctcaacgagtctgtaccaccattgtatttgcgataagacttgagataaagagcgatccttgattctactctcaatgaaagcacaaaaatattgacctcacttttagccaacgacagtgagcctaaattgtaagcgaaaagtggtacaatgagtatataatagaataaatcaaataaagacacaggaattttatataggttcagccccgagcaattcggtaatagcttcatcctcttagtttgtattaactttagaataagaaaaatggttccttttcttagagatcttacaatagtatctctgaatatgaattcttagataagtttttcgaccctttgcttagtgagtatgaatcactatttatagggctataagcttgggagggaagaatttcccttctgattacaattgatataagtggaaagattgcatatcaaatactgaatacactaattaagggattcggacggcttgccatatctctgtgatctgatcccaaagttatagggatttcttcggtgactcacgatgcgaaagctgaatttgctaagtgttagcgtgctgcgcggattg

SEQ ID NO: 404014 - DNA, 540 bp, Cannabis indica
tgatcaaatatatatgtatgagttaatttattataacttaacttaagtttaatttaattaagtttaatttttgacgttaataataattaaattattaattttagaaatatgacttgttataagtgtcaagtttattatttatgtgtttattttttattagtatatttaaattaatttttaaacaaaaaataacactcataccaattagaaactgtcacttgactattgacttaacagtcaaataagttcaaaaaatataacttaaatattattattgtaaaaaaattaaatttaattaaatatttatctgtaaattaaaccaaaatatttatcctgtaaattattatctgataaataccattttggatcctgtattttgtaaaagttaccaataagactctctattttgttaaatgataaaataaatcatgtattttctaaaattgtacacatagaactataaattgatttttttgttatataaattaatataaaccccaagatcaatttgtatataacatagaacacaataataagata

SEQ ID NO: 404015 - DNA, 561 bp, Cannabis indica
ttttttttttccttaaaaaaaattagactagtgttatctttaatattttttaaatattaaatgtattggtattaaaacttatgttaatattaataatatattagggtaaaatagggtaaataccattttgaaccctgtgttttgcaaaagttactaattagatcttgtgttttgttaaatgacaaaatggacgctgtattttttaaaattgtacaaataggacattgaactaattttttatcaaaataaaacttaataataataatctgatctagagatgttacgacaaaactggttacattttctacatctatgcgtattaggaattgtcttaaagttggttatattaaaaaataaaattgttaaaaattgagcttagggtcctatttttactattttgtcatttaacaaaacagagagtccaattagtaacttttgcaaaacacagagtctaaaatggtatttacccagtaaaatatgatttattcaagtgtctttatttttttttttaaatagtccataaatatgttaactctctttctttattttggaaagagaaat

SEQ ID NO: 404016 - DNA, 638 bp, Cannabis indica
acaaattttttttattaaagggttaagtgtgtcactaactaggagtattgccaagaatcatcatatatataattaatatcaaaattattatagtatttttttactagaaaaaatacatgcaaattaatattggaataataattaattaattaattatcattaatattgttacacctaaaactcagctacacttcagaggatgatacgtgtcaagtagtggaatatgaaccacctggtataataaatttatatcatttaatgtaaagaaaaataatgtttcgttaaaagattaataaaaactattcaaaactcgctaactatgtagtcttaagcgagacaaggatataaagctattaaaacctatatcgacgagacacatacctgccgcgaaatacacacgccaaaaagataactcatttattcgccaaaataaatgtagtatgcaaagaaaccttgggatacataaagcgagacgtccaccttgctattcacaagaaagttgacgaggcaaatgatttgttaatcacttagcgtatttttcacattacaatagctaaggataacaacttagaaagatgtgattgtccagtctgcaaggcctttggtaaaagagcagttcttaagtttgctcatacact

SEQ ID NO: 404017 - DNA, 562 bp, Cannabis indica
agcagattttgtagttgaatgcatgggtaaagaagagagcattccagaaaacatcccagagccagtacaaatacctcagcctagtaacagtgaagacaagctgacttggaagctacacgtggacaggtccgctacaaatcaactatccggagtagggatcgccctctcacacctggggggcaacacctgtacgctgtagtcaaattttgatttaaggcatccaataatgaggccgaaaatgaagccctgatcacaggtctaaaactagcctgggaaatgaaggccgagaacattgagatctacagtgattcacagctggtggtaaatcatgtatctggagaatatgaggctcgaggggaaaagatgatagcgtattggagtaaaatacactatctgctcgtacagtttaaaagctatactctcaggaaaattccaatggaagaaaacacgactgctgatgaaatagctcgacttgcgagcagcaatgtaaatgatagagcaaatctgattcctattcagtttcttgaagaacctagtttcatcggcacagaagagattaaaa

SEQ ID NO: 404018 - DNA, 967 bp, Cannabis indica
agtaactagttagtactaaaaatacatgaatagaaataaaaattagtaattagttagtaattgtaactaactattagttactagctagtaaaagaattaaaaacacaagaataggaatatgaaagaaaaaattaaatttagtatgtaaataaaaaaaaataaataaaagagttaatttttttttcttcatcttagatctacatctatttttgaaaaaaaaaaaattaatatctcactaaaaaatagttttacaacccaatttctcaacttctactttaatactctcctatctcattttcattttctcttttctatcttaatatttaacatattaatattaaataaaaataataatttttaacaaaataatatgtaacacaaacactaatcaaaaaattatttcaatttattaaaaaattataacaaaactattaaagtttaaatttttccattataacccaaatctggccaccgataccgaccaaaatctggccaccattgtataactctaaaaacacaatcttaacaatctaaaaagccctaaaaaaatttacaaaataaaaaataaaaaaatatactttaataaaattattacagattagatttataccttaatggacgttgagattattcaactatttttacaccaaaaacggcgattggagctgcaaccaccacctctaagctcaatttacactaaaaagctaaaaaaaaaaaagaaaagaacgatcaaacattgggaatacaattttgggtatgcatgaaaaataaaagatttaaaaaaaaaaattgagtaaaaatggtggaaaataaagaaatgggggttgtatgggtggtggatgccggtgagggtttcgtggctcgtctggttttgttctcataaaaaatgaagatgaagaagtgaatgcaaagaaatcaagattttaacactctatatgttgtcggttatttactaataaccgacgac

SEQ ID NO: 404019 - DNA, 879 bp, Cannabis indica
tttttttttttttgcatttatatagaattctgtatagaaactcctattgcaactggcgttgcaacttaaattgcaacaaaaattcgtatagaaacccctattgcaactagcgctgcaaaccactttagaaactcaaacagtaaattttaaaaaaaagtttaaaaacagtatataaggtaatttccctaataataaactataataattatgacatgtttggtttagtgtaatgagaattgtaatggaaacattattaccattacattgtttgctatcatttttaaacctttgtaaggactttacattataatggtcattacactatatattgtaatccccattacatcataaaaccaatataatgatgattacattgttagaaaatatctcaattattatagtatattacagagttaaaccaaacatgagaataccattcctatcacaattcttattccattacattatcattcatattccaattaccatttccattacattacatcaatgcaaacaccacctaataaatcattatctaacctatgatgataggaaaatggagctgaagacagtacaaggcagcacatttctcccaaccaaatggccaaaaccattataaaatagtgttttttttttttttaggtctagttcttttggtacgagtttaagtaccactagaaagtagaaaataggctataattagttggagactactgcctaaaactccatttctacaaagcccaactctgtccttccagttccaccatctcctcctctcagacgagcctctctagttgtagctgctgctgcattttccccaactgacttacgataggagctcgctgcggccacgaaggctgcctctctcgctgctcaact

SEQ ID NO: 404020 - DNA, 548 bp, Cannabis indica
atttagttaagttgactttgtcttccttccaagatattatgtgttagattctcttgtgttgtggcatttatcaatgtcatcttaactcatcatttgccttaatttttaccaacttctgaaatatgcaaatgatagcaattgagaccaaaatacacatttttcacttcttcttctttctctttttcttcaacaggccattacaccacctttaattaatcatctatttttattattattattattgttttatttttgaatagcacataaggtcaacaatgaaccttttggcataaagaagaacaacaatttcaaaccacaaaaacctaagataaaatgtaaattgtgaaaagtccaaaatattttttatttaagtggatgtgtacaaattttagcactttagtttagggtactattttggctctaaattctaattaatggcggagagattgaggacctaaacgctaaaaaaaatagttaaagacctagatgatacacgagaatattgagattttttgaaaaagtaaaaattgattaccataaattaagag

SEQ ID NO: 404021 - DNA, 899 bp, Cannabis indica
gaaaaaatataggtttgggcacgagacgacacgatattacaaactggcgcaacacgacacaaaaatatgtgcttaagcacgacacaacaagcacgaaaaacatgacatgtaagcaaagaatagactattcgaaaagtatggcatgtgacaagctcgaaaaatacgacacgatacattaaaaaaatcttataatttaataataataataataatagatttgcatttgttaattataaataaattagaataataattaaacttaaatgtaccactgaatatttatacactatttttattgcaagcgtacaatatgttgttatagcaaaattttattactaaaaaggttgttgaacccacagtaattaattattaaattttactaattattatacttttttttatactttaattagataacacaaagtaaattataattaagaaacaaataataaaataaatagaaaaataaatagacaaacaacgattttcaatcagaaagtaaaaatccagagcattgatttttttcaaactatgaatctaaatttactgattatccgaatttatcctataatttgtttcaagaatcctaatgtaacctagtaacctttctcgagcgatgatatgtttaaatcaaattaactaacacgatatctctattcaatgttaatcaaataagcactcataaagcaatatgattctctttaaatgaaactcataaaagatgataattagcacaaaattgcataaacaaatggtgatcaagcattaagaagatgataattagcacaaaattgcataaacaaatatcaagaacaaatatgagaataatctaaaaacttaaattcataatctagaatagttccatcaacactctagaatgatgttggaaattattttac

SEQ ID NO: 404022 - DNA, 587 bp, Cannabis indica
caaaaattaaaaaaaaaaaaaaaaaaaaaaaaaaaaggtaaaatgtgtgtgtctatatatacacacacatatgttatatatattatctaccccagtgtgcattaattagcagtgaaggaaaggtgagtttcaaattttttcttatatttagccactaaagtttggttacaaaataaaatagaatggaaatagtaataggagtaggcatgaaatttttattgttttgtttataaagattacagaattaataactgaataaaaattattatgtcttatgtagtaagaataagaagtttatttagtccccaataataataaaatagaagccaaagctctcttccacaacatcaactggatcctacaattggaagtgacaattactcatatcgaaacagatgcactcatagtttctaatgctttgactatttcttgtcctacgattttttcttccaaagacttaattgtagacatatattgtcttttatcttctctccctaatgtatctatttgccatgttaaacataatgctaacatggttgtccatgggttagctagatatgttttagggttggatgaagcttgttttt

SEQ ID NO: 404023 - DNA, 563 bp, Cannabis indica
ctatttcatggaagtctaagaaatacaccattttggctcaatctacaatggagtctgaaatgattgcactagctactgctagtgaagaagtaggttggctgagaagcttgctagctgagattcctttataagaaagacctattccagctgtgttgatccattgcgttagtaccccgactattgtaaaattttagaattgttattataacggtaagagacgacaaatacgttgtaagcacaatactattagagagtttctctcaacaagaggtgttagagtggatcatgtacacactgatgataacccagctgatcctttgacgaaaggtttagctagagagaaaatccttaaaacatctaaaggaatgggactattacccttggattgaagaatcactcataatggcaacccgacttattgattggagatcccaagaaataggttcaatgggtaataacaagttataaagtgataaaattgagattatgttacgaaaagagaagcatgaattcttgaagcgatttaaggctgagttaatagaagctcttaatgagatctatac

SEQ ID NO: 404024 - DNA, 753 bp, Cannabis indica
tttgatactttaggtcttgagtcgaggcctttcatcagcaagtatcttggagtccctcaatgttttaggcattcaaagaaatcaaattttgacttccttcttcagaaagttagctctcaactttctatctagaacagcaagttgttctccaaagctggtaaggaagtgctcttaaaagctgtcattcaggccattacctcttacacaatgtcttgcttcaaactcccggcctcaatctgtcacaaaattgaaagactaatggctcatttttggtggggttcaatggggaaaggatctaaaatacactggaaaaattggcgagctctttgctcttcgaaattctttggtggtttaggtttcagatctcttatctcccataatcaggcaatgcttgccaaacaagcctggcgtgttttctccaatccaaattcccttctggccagcattctaaaagcaaaatattttaacttaataattttcttgaggctaaattaggtcactctccctcctatacttggtctagtctcctttgggaagagaccttcttattaggggcttgctttggaaggttggaaatggttgctctatcagaactttccaagatccttggattccaggtataaaatttccatgcttaagaagtaatgatcagcctcctgctgataaggtaagttttttcatagataacaatgggttttgggatagaaataaactgcaacagtactttgatgattactctgttttgtccattct

SEQ ID NO: 404025 - DNA, 653 bp, Cannabis indica
cctatattaacaaggaaataataatttgtatatatgtgtttcaatttcttagtcttttttcaataaccattaacatttattaatgtctgaaaagaagtaaacaaatatatcttactaatgtaatcttaaaaaaagatttctttattattaatacttaaaaaaaaaaaaaactatttttaatttgattgaaactaaatatattaatgcatatctatcattcattttaagttatactaaaatcacaataaattatcatagaagataaatcttttataaattataaattattgtagcaaggaaagaatttatttactttattctttttttctcacctataaaagataatacaaaactacaaatggactacaaataaatctgagtaaaagaaataactcaagcaaaattaaaaacaaaattagtatactctctcttctttatataaacaaatcaaaattaagctcttctttatttatattttttatttccaagtttggtggtgaagttttgattcaggtaagcttttagtttttcattcagttcctcatatgtatgtaatctatataaaattgtttgcttctaattatattttttgatattttctttaattaagtagctaatttaagcatagaaatttaaatttctattttattatt

SEQ ID NO: 404026 - DNA, 756 bp, Cannabis indica
taaaaataggggagtggggagttaagatcctatttttactctctatttgatttattattattattattttcaaaaccaataatgaaataataataaatttatttattcttcttttctcttttttttttatcgttcaacaacttggtttggcaaagcatgcccttcggttagacaatgagctatcctggttcgaggaggtgtcgtcgccgattgaggattgctgctttgttaatcatgtgtgattttaatcaccacgtcaaaaaaaaaaaaaaaagataagatgtataatcctcaatttacgctaattcactattcaccctaagtgcatgcacaactaattcacgagaaatgaacatgaactaggaatgccttagtaaaattggaaagcaaagtagcaaaaaaattaaaaaaacctagctcatttcaaaagaaagagcgcttttgaaaaacagaaaccaaagctaaataatcagactccacataacaaagagaaagaacaatgtgtaaaaccaatccagtactatcattaagaatgaagcttatgcttgaatgactaagaagtaaccaatgagttcagatcttctgcaatatgtgaactttttgtgttttgaagtatagataaacaatctacaaaataccaaaaaagataaatgatgtaaggaattaacatataaaaaataaaccaaatttaaaaactaaaatttcaatatataaatacttatatagcaattaaaatatgaagaaaaacttatctat

SEQ ID NO: 404027 - DNA, 1209 bp, Cannabis indica
ccaatcctcaaccacagccaaaatctggaacaacgacaacttcccctatcgttcttcagaagaggaagagtgaggtggtggttacccctgtcgcggattcttccaagaggccagctaagggcatactagagaaagggaagaaggtcgtgattgccccagctgtccgagcccgcaacatactgtctctccaagagaagttcataagcgatgaatttcaatcgaagatcgacaagactcctgctgaggagctgctgcctcgctctgcggagttagcttcgcagttcattgccatgttcttgaaggcctttgttactggatccaaggaggtcgaactcgtgaagagacagaacgttcagcttcaggaggacattaagaagttgaaacaagatgcgacttccaaggataaggagctcgaggagctttgcaaggccaaggagcaagttgagctcgtggctaagagtgctcagacgaaaaattgaggagatgtctcgcgacttgtatgtcaagaaggagaatgggaagaagcagtatgaccaggcggtctcggactacatatacaccactgtctccaaaattccagacttcgacttttcaattctcggagcagaagcagctgaaatggctgaggcctttcgcgccatgtcgcccacacaaactcaaggcggtggagggaatcttcctgaggaggctgaggttgcggatgctgaagaagtcgagaatgaagccgtcagcaaagtcgcggatggatctgctcctactgctccaaatgcttgacttttcctttaatatttgcttgtgttaaactatatcctttatttttttttgtttatgcggtacaagggtactcgcaccttgtacttagacaaatttacatttatgtttattttgaacgactttatatcctcgcggggatatctatttacagtattttcgcagtacacgggtactcgcgtttgttatctataatattttgatcgcgactttaattacaacttggtgtaataagtagaaaatttcagaaacttgaaaaatttcaaacttgaaaaaatttcctttatataatcaatagtacatcatggtatataccccctatacttaggatttttttataaaaaatgactaagtataaatacaaggcgagtacaaactagaaaatgcgagtactattgataatagaattttaggctctcgccattccaagcccgtgga

SEQ ID NO: 404028 - DNA, 308 bp, Cannabis indica
ggaaaatggccggaaaagggaatattaatggctcctcaactcagatctctaactcttgtatcctgtctgtagcagagtatcaccaagatctgagcccgaatgttcttcccttgattctggattcttcacaaccttacacactatgattgagataccacttgatgtgtgtggcactcactctatcactcaaggtatgaaaataatatgaagaaggaagagaagtagctggttcgaaagtagaaggaggatggctcaggaaaatatttactgaaggcaagaaatttcatcatcttttaagtgtgagccat

SEQ ID NO: 404029 - DNA, 543 bp, Cannabis indica
ctcaagggaaattcaaattgaaccacttttgcccaattttaaggagcctcgcatgacaccatatgatgctacaactgattcaaagtacaatctaggagcatttgatgagctaatgaagatgaaaaatgtatcatgcaaggcaatgtgccaacgctttgtggtcacagttaaagcaacgccgtataagtgattaaaaaggcttggatgaagaacaatcacatcatggaagaaatttttgaaggaattccttcaacaacatcagactatgagtgattatgttatgcatatgatacactatttttactacaagcgtacagtgttgttacagcaaaattttattactttaaagattgtcgaacctacagggattgattattaaattttactaattattatactctttaattttatacattaattagataaccaaaagtaaattataattaagaatcaaggaacaaagtaaatagaaaaataaatagacaagcaacgatttttaatcaaaaagtaagaacctagtgcattgatttccctatttcaaac

SEQ ID NO: 404030 - DNA, 549 bp, Cannabis indica
acttagaatcattattggcagaccctacattgtaggtgagactagtaaggctagggagagctatgctcagacactccatcataggcctaaaagaaacatcctggtcgtcaaagaaaggggcttcaagcaacaaaagcttggagagatcaatatctctttcacataaggaaatgctactcaagtcagtttcccgcacaatgattccttggtcattattgcaccaatcgagaatatgaatttggcaagatttattgtggaaaatgaagcctcctccaacattcatttcaaatcaacatacgaaaatatggggctccagataactagtttggcaccttgcactcaattaatgtatggcttctttagccaaggcattgcacccattgggtacatcagattgcccatcactgttagagaaaatccaactaccagaactctgatggctcattttgttgtaattggcattcccttgacttttaatgccatgataggtcaaccagacctgtacaacctaaaggcggtgacatccatctacctgttgggttttatgcc

SEQ ID NO: 404031 - DNA, 580 bp, Cannabis indica
tctttttaatttttttttttaaaaacatacaaatactaatttattctgaaaaagaaaatagagagtagctcattttcaatataattacaagtcaaaaatgaaaatgaaaatgaaaatgtattagttcataagttttaaatttgaaatgtatgaatgacatttgggtgtatgtatcctaccatttaacatggattatgttgtaattgcaggcattaatgctaatctacaaagaaaagaagaaaataaaaaaatgatataaaattgcataaaattaaattaatccatgcataattaggccaatcctgttagccaaattcatgaatatacaggtaattagataagaccatgagatattttcttaatcaactaaaactaaatatgaaatgacaattcacatccagcttagtttttgaaaattaccaaacaagattgaattatgaatctattccatgtaatggagtattgatagataatttaaaaattgattgatataaatacccactttcttccaccaatattggatacataatgtttagttttcgacatttcaaataattgtttttctttttgactttggatc

SEQ ID NO: 404032 - DNA, 524 bp, Cannabis indica
tgaatatgtcggctacctgctctacagtcttgcagtgcttgagctcgatttctttgtttgcttctgcttccctgatgaaatggtacttgatgcttatatgcttagttctactgtgaaatactggattttttgccattgctatagctgatttgctgtcgcaatagatctttgtagcttcttcttgtaattctcccatgtcttcaagtattcttttgagccatatagcttggcttgtagtcattgctgctgcaatgtactctgcttctgctgatgattgcgcaacagttgcttgcttctttgatgcccatgaaaatattcctgatccaagtgtgaaggcatatcctgacgtgctcttcatgtcgtccatggatcctgcccagtcactatccgtgtagccaacaagttttgagtcacttgtaactccgtaccatattccgtagaattttgttccttgcaagtatctgaggattcgcttggcttctctatagtaacttgacttggatcatgcatgaatcttgatagga

SEQ ID NO: 404033 - DNA, 585 bp, Cannabis indica
tgtacttttacagaatgtatttcatggtacatgtattagatgagtcttagggtacgttacaatttcttaaccttaattacccctaaatcaatctcaaccatcagatcaaataactctctcatctaacggctgtcataaatcacggaatacattttgtgaaagtacaatcacgggaaaaaatcatgtccctatatatataaactaatgaagatgtgtcagagacacataacgcctgtcaaaattgcttgattatatttcttatactactacaaaacaagcctttagaggtacttttttcagcataataataaataactcacaccatagggttgggaatttttagaataaaattttacgctacttatggcgtcggttatttccaaataagtgacgccaaaatggtttataaccctagcccagcctttcatcttcctcatccgaccaaccaacccagaaacccccaaaccagagaaaccccaaaccctctccgctaaccaccacaaaaaatcacccccatttcactattttttcaccattttagctcattttttttttcttctaaatcttctatttttcatacctaaa

SEQ ID NO: 404034 - DNA, 1200 bp, Cannabis indica
cgtagcttttttacctcttctttcaatgcttctgcctattctttgtctaataatcttcgtttttgctgaacgggatggaagttcggatcaatatttagggtgtgggatattatagaaggatcgataccgatcatatcctcatgtgaccaggcaaaaatatctaggtttgctcttagaaatttatcaaagctaattttcttcaaacaacaaacctttgccaatattattgggtggatttctatctcttccaattcttccactggcccaacatttttatttggttccccaagtcagggatccacatcctcgtccctgccttgggcgacttcctatttggcaatgcttttccccttgtccaaactctagccaaaggaattttcctttttggccttggtcagggcaaggttatagcattctcatttaacttgttgattcccttttaggcaccctaccccattctttgttgggaacttaacacacgaatagaaaattaatgtgacagctttcaggtcatataaggctggtcgacctaacatgacattaaaagctgatggaacttcaattatcagaaattgtgccatcacagttatactctttgaagtttgtccaatagtgaggggtaggcaaatttgccccaaaggtgcaacactctggtcggagaaaccatacactggttgggtacaggggatcagatctttgagttagagtcccatattctcatatggtgtcttgaatagaatattcgtagaagctccattgtctatcatagttcgggcaactattttatttgctatctgtacttctacaaccaagggatcgttgtgcgggaagcaaacgtggatagcatcttctttagtgaaggttatagtgggttcccctacccgtggcatttttggctttctttcctccacgaccgaacctactttattttgtttgtgctgtaaagtttgtgcatacctctcccgagctttgcccgagtctccaacaatgtgtgggcccccaataatgacttgtaaatgctcgttcactagtggaggcattagtaggtcttaattattgtctgcttaggcgacccattgattcagatcaaccttgatgtacttctgcaagtgtgggttatttttttgattaaaaattcaatttcccacttcaagttgttgcactcattcgtgtcgttgccataatctccatgaaaatggc

SEQ ID NO: 404035 - DNA, 690 bp, Cannabis indica
atatttatttttaatttgaattattattattttttaaaaaaaatgttactttaaattgtttttatacatgtatttattttcaaaaaaataaactttatttactagtttttatatcaattttttttatattaatagttaactataacaaaattagttaattaaatatttttgtcagtaatttatttacatacatagttctactttaattattgtttaaattaatttgttttattattttttttatcaagaaaaataaattgcatacagagtcaattacatccacgagaggattctccttcaaaaaagaaatttacaactcttttacatttttaagagcaattttattttatacaacttattattctatacaagatcagtctacttttaaggctgtctttaatgctactatctatacaactcggattcatacattttttttcttatttatacacaaatttttgtttagccaaatgccataaattacactcgctaacatatttttatgaacataatataatttttatgacacattctaatatatatatatttattttttaaattatataagtgtttttttaacatattttttttttcaataacaaaaaactaaaattaaaataacaaaacccattcacttaaagcaaaaaaaaaaaaaaaaaactcaatatatatacacacaacatatataaa

SEQ ID NO: 404036 - DNA, 687 bp, Cannabis indica
agttttgtcataacaattttaaatcaaattataattaaattttattttgacaagattttacataatcttcgatcatttatttttctagttatactcaatcaattttaacatcctctcaaaccaaaaaaaagttagtatttatatgtacattttaaaaagttgatatcatggaatctcttgagtcatttttatgtgagccaagagtttctacacaagttattttctttaataaagtgattcaagatttctattcttttttttttcttctacaacttttatagccatgaaaattactagtctagaactttccaagtggctttattttgaaccaatcaaacattaattttgttcaattcgtggctcacaaacaatcgacctaatttgctttggtttttttcgatcgacttctttagattatttttattattattttatttgcatgggatatatatatatggagtttttacgtattcttttttaaaaagttaggattgggatgaatattatataagtggatgaaaggtccaagaatattttgcttggtttttttagttaattaaatcaatgttattgtcattgtgaaattgagatataatatggttcaatttcattactttattcactttttctgtgtgcttactaataattctaacactaataataataataataataaatattactata

SEQ ID NO: 404037 - DNA, 1226 bp, Cannabis indica
caagctattcggagggtcaccaagcttcttgtagctcatttctagattaataactagcttttcataagacaaaacttataaccataaccaacaattaaatcacagagaaagaaagattcatagaccatgacaagaaactatatatgaaactttcaataaaagttttggttgagcccaatgtattaaagaattagattatatattggactctgttatatagcacgttcagtcttaggcataggcgggctaggcctttaccttgtacccacctagctcagatgctccaaaaaaattattttaaaatcaaatattttttatatatttggaaaaatacaacattttttctatgtaagggcccaaaatatttttttctatgacccactaaatttttgggccagtcttttattataataaagctaaccaaaatattttcgtaaccttagagaagagttgtactaacttcgtctttggtggtgggttttcatgatgtttgaaatccgtaaaaataaaatttagaaaagataactgatatatatttttcaagttttattgtattaaagtgatttttcaaataaacagatttttgtgtaaatttactgcttttttatttttaattattttttatttttttttattttaaattattttttagtttgtatatttttttattgtagataatatttttataattttaaaaattaaaacattattttttggaaaaattaatttgtaatgggatattggcggctaaatcacttgcacattaaattttttaagacttaaccacaaaaatcaattttttgggggcaaaactacctacacactcattccatttttctttgtactccttcgtccaaaaatcaaagttaaatgccacaatggcctgcccacgtgtatacacttgtaaacgtgataaatttttgtggcccacgtaatattaattttgtaaaattaaaaaaattagaaaaaatattattttaaaaatattttctttttgaaatattggcgctaaaccacccgaactataaattttgaaatcttaaccacaaaaattgattttttggggggaaaaactacctaaactcccattttatttttaacacttttcctttttcttttcttcttcttcttaactgaaaaaaccctaggcaccaagtcgcctaccccatgacccaaccttctgcgactcccctctcacacactctctctcacggtgcacaatgtcg

SEQ ID NO: 404038 - DNA, 756 bp, Cannabis indica
catcatatattagtgtagtattggcagtatatggaattagggaaaattctataatgcacctcgttaaaagagatacatcgatacatctctatctgttttagtatccgaaataattttttagtcaaattttttcgtatggtcatgtaaattatacttatttaagacatcttgcaaaattttaagaagttcagaaaattttaacacgtcgaaaattgtgttcaagtagtgtgtttcacgcgtgactattttattttatacgcgtgtaaaataagactgtttaaacattgttttctatattgtaaattattccgaatttcttaaaattttgtaggatgtcataaatagctataacgtacgtgaatataaaaaaaattagactaaaaaatttttctggatgccgaaacaagtagatggtgcatcaatacatccattttgagggggtgcattgtagaatcaccctataattagtgtagcattggcagtatatatacaggcccggccctgggcataggcgggctaggcctgtgcctagggcccacccagcccaggggcccaaattttttttttcttcttttaaaattatacattttttttaccgatttggcaaaataccacatttttctaacataagggcccaaaacaatttttttccctatggcccactttggttcagggccgggccctgtatatataattagtgtagtttcttttttctaaaaaaaatataattagtgtagttggcagttgctttctttc

SEQ ID NO: 404039 - DNA, 567 bp, Cannabis indica
tttttttttttttttaaatagaaatcaatgataaagttaaatcatagaataaaatatgaaataaatataaagatatttttgataatgactatttttcttaattctttaaaacaaaattaaaaaaatagtggtttttattgcaatacctagtataacacaatcatgatcatgtagatgtagtgtagtactagtaattgggtagacaattctctgagagcagttaaccgactttctcagtttatccccttaaatctagtgtataaaaaagaagagaaattacaatcaaattcttgaataactttttccctttgaaatagggtttttacatgtcgtatattgaattttagcattttattacttttataatgtcacacggtagaaagaggtacaatacatataaaaagaggtatgtattaaataaatataaaattagaggtaaatttgattaattgattaataaaagaggtatttttcgtttgctacgctgtattacacttattgtattgtataatattatattgaattgtattttatataatatttttatgtaaaactatacgtggtatt

SEQ ID NO: 404040 - DNA, 556 bp, Cannabis indica
aaaattatatatcacttttatatttaataaaatgaaaactaaacatgtatgatctaaataaaatgatatactataccacaaaacttatatatcatataacaaaaaatatatattttataatagaaatatatataataacaacaaataaaaaaaatataacatgctaataaaattatatgtcatgtcaataaaagttcaatagaaaaataaaatttaaatattattttgataaaaatattatatcgacaataataataataaatatattactaatatgtatgtatatactatgctaactaatttatatactacaattaaaatatatacaccgtgataatcaaattattaaccaccattatatataataaaataaaaactaattaaatattatttaaaataaattatatatcatacaatgaaaatatataaaaataataattaaatatatgtaacttccgttcggttcagtcggtcggcgtcaccgatcaacgacgaccagtcgtctgagagtggtttcaacaacagtcgtcttaagtcgtctgtgaggggttcaaga

SEQ ID NO: 404041 - DNA, 666 bp, Cannabis indica
gggtaaagctgtttctgatcagcaatgagtgtgggagctcgatggtgaatatacatgcttggggaaaactagaccaagcgggttggggtctaccatcgatgaattttgtgactctgttttgtcgcttcggtcggccagtaaatcagacttgtaatagtgttttgtaaaaatatttttgggatcccgacttttgtaacttttactttgtgaagttaaaattattattacaagtttattttcattccatttgtatttatagtttaattttcgcgctacttttattagtaattccatttaagggattaggattacttaagtatcttgggtagcgtgcctaatgaatcagggcgttacaatttagtatcagagcgccaagatttttaaagttcctgtaaacgggccgaacatgtacattcattgtcacatacaagctcgactcatgttacagtaagtgtttagagtaaatactttattgtttatgtgatcatctgtttacgctttctattttaggcaatatccaagcatctagagtatttatgtattatgtgatgccatgctttaaatgctttatgattaagtgtttatttatatggagttaatagttgagttagggtttaaggcaataagtgcataagtattgtaaagaccgcttagctttaatttgga

SEQ ID NO: 404042 - DNA, 614 bp, Cannabis indica
aaacccatgggttgtcgctgcagtgagggtggaagcgagatgaaaaaaaataaaagatataggtcaagccctattgccgtggccacaagatggctcgctgcgacgaggaccctatcgcagcggcgagaatctttgtggccgcggcgaggagacgatttctgcatgcgatttttttatctttttttgttttaaaaaaagatgagttatcttttcttttaatgagatattttctaatactataaataagacctcttatgctacaaatttattcattctaaagctacaaaatagagatagaaacttaaagagagagcaaggaaaagacggagattgcagcttggaagtgttcttcattctagttcttttcttctccttaaactcttactaaatattatgattttcgttataatgtctagttccgagtaatttccttctagttaagggttatttcaaaacccgagacatgaatttctaatttcattattgaatgttaatttctagtatatatcaaattgcttttattcttttatgtcaatgttatgattattgttttaatcttgtttagattgccactaaattaggttttactttaatctattgtcatcttaggatta

SEQ ID NO: 404043 - DNA, 325 bp, Cannabis indica
gatgttgttgtggttgtgatagagtatgcttcatccttgttgtgtttgttattggttttttcatcacattgatccaacaacatcaatggtagaaattcttgtaatcttccttctctttgcaatatgttgatatattgtgcttcttaattaaatatcattaatttttataattaatataatattaattttttaacatgtatagttttttttttttttcagaaagcgtactattggattgaagctgaaatcatatttaaaaacatcaaccaagatttttattacatgtcttgtgatttatgtaataagaaacttatgttctacaacg

SEQ ID NO: 404044 - DNA, 564 bp, Cannabis indica
ctttaatggtgtttttagtttttgggtatattcctttattttattgcttgaattatgtttgttgtgactcaaaacgcttaggaagaataaccgggggaaactgagggaccccctgaaaatgagcaacccggggaaactaaggttccccctaaaaacccaaatgatcagccaaaaccatctcatagaaatgagaataggaggcgactccaaaccagggaataggaaattccacgtcgaaacgaggaaaatcttaggacacaacctggggggacgtaggtcaccagcgagaaaccaccagcgttctttccagacccacaaggaaggggctcgtacaaatcttagtaggggaaacacgacgaaccatgcccaaagacccacagttggtcaacacgaggaggagaaagtacctgtcgcaacaatgatcgtgaaagcataggtacaagtaagattgtaagtcactcaaggacaaggtccatgagcaggatgaggtccgtaagtagtacacagtcgatgagtagaacgaggtccgctagtaactataaccaaccggatctgcgagagcac

SEQ ID NO: 404045 - DNA, 714 bp, Cannabis indica
ccaaaacgaattacattacttagtaagttttagttttttttttttttttttttttgaaaaattggttgcaagttgcagaaaattgagagagagattagagtttgaaggatgaagaatatgttaaattttcttgattatgaactatccaaatacacattaaatactaattagcattactcataattattaaccaagatctatattttatttagagcatcacaaaacaaagataaacatacatacctcccattgatgatccatccatgtgatccatattagagcatccaagaatcttcaatatgaggacaaatacaaactcaaaatgatattagagagaacactatgtggagttatcctctctttcactcattaccattaacccctaaaacctcttcacttaagacatatatataaatatagaacacttcttaatgggtattacccatgaatggttactaaacaaatttaactataaatattaattttaaaaatatcaaattattgaattttgatctaataacgaataatgaaatgacaaatttaaatttctatgcttaatttaactacttaattaaaaaatatatcaaaaaatatctatttttacactatatcaaaaatatgttcatacaaaaatatttaactcaaactcaactttttctgttcttatttttcttgctaaaaaacttttttttaaatttttttttttaccgatgg

SEQ ID NO: 404046 - DNA, 756 bp, Cannabis indica
attaaatcatgaagaaacatgtaaatagaattaggtacgtggaaacactgttatgatttttaatgttttataaaaattgtataaacattttgttattaactgttattttcgtctgattgaaatcttcgtctgatgcaacctttagccaactacctagtaacttttgtctgattgaaactttcgtctgatgcaacattcagtcaactacccaacaactttcgtctgatgcaactttcggccaatcacctaatagtgtaggaggtattttgataattaaaaatacataaaaaaatataaatattatttacactttataaaaatatttttgtaaataaaatgtaaacttatttttaatgtaatattcctacagtttaatatttctctaataatataaaagctgtgaagaaactatcgagacaagaaaaagagaataataattgtgaaaagctgagagagaaggcctcagactgctagtcagtccaacagtgttggaaaagcaaatatataacatcgagttattttatcataaaaagtgtttatgacacagccatgaatatgaagtttaaaagcgtataaatatttaataaatacttattattgttcacctacaaggatccatagaatttattgtttaataaatataacatttcgttctcttcacttttttatatctttatatattaaaagtgcgtatctaacggcaattcttggtttaacagaatatacttatttttaaaagaatattccgttaaattt

SEQ ID NO: 404047 - DNA, 605 bp, Cannabis indica
gctactgttatgcaagaattcttagttgccgacctgcctttagcttacgacatactgttgggtcgtccagcactgatcgaactgaggcagtcagttcgatcaagcacctatctttaaagttccaaacaccagatggtgtgggagtggtgcgtggcaacaagatgttggctcgcaattgctatcgcatagagttgcagcatagaaaggtcgatcattagctgatgaagatcttggcaggagaaaacgagaagaaagatgaagatctttatccccaagttcaagatgaaagaaacctgctaaaaccaattgaagaattggaggaggttattctcgacccaggaaatcccaccaaatgtgcatacgttgggaagaacctggacgagcagctcaaatagcaattagtaagctttttgaaggcgaaccaggatcaatttgcccggagtcatggtgatatgatagagatcggccctaatattatctgccatcacttaaatgttgatccaaactacccggcaaagagacaagaaaggaggcccttggattccgagaggcaagggacactaaaatagaaagttgacaagctgttagtcaacgaatttatacgc

SEQ ID NO: 404048 - DNA, 598 bp, Cannabis indica
aaacatgagggaggtctcgctatgaggttagacatgagaagtaaaggattacttatgaaatggctttggcaattcccattagaatcaaactcactttggcataaagtgatcaaaagccgttatgggagagcagaaaattgttgggatactaaatcaggtcatagactatctccaagaggtccttggaaggatatttcagatctctatggtgaatttttggagttaataaaattcaaagtgggcaatggtacacctattcggttttgggaagatatatggattggagatacaacattaaagagtcgttttccagacttggcagtggtatcaaaggcaaaaaatacgagtataaaagatcttgttgccattgaaggagaggtagaaaattgtgttccaagctagaattttaagtttagaaggaacttgatggagagggaaatgcctaatcttattattttattgcaactactggaacatattaggctgctcaacatctcagaggatatcagattatggaaaccagatcctagtgggattttctcttgtaagtcagcattcaactggtttacttcagaccagaattttggtgatttgtttt

SEQ ID NO: 404049 - DNA, 568 bp, Cannabis indica
aatttcatttttaagtaattaaataattaaatttaaattcataaaattaaagacagttaaattatattgatactattttatcaaataaatttaaatttaaaatactaaatatgtatgattttaaaatacaggatgtcaaataagcattattaaaaatacagtgtaccgaatttgtatttagataaaacataaagtaccaaatatatagacaccctatataaggattaataccatttcagactttgtattttgtaaaaattattgattactctctattttgttaaatgacaaaataaactatgtattttctaaaatagtataaacacgactcgaaatagtccaatttgtcatttattaaaacagagggttcaatcagtaatttttgcaaaacacagagtttaaaatggtatttacctatattaattaaaaaaaaaagaatattttcatttttaatgtttgtttttggtaaagttacaaaaatataattttcctttaaagaaaatcattttcctcttttgggtaattagttattttatattattttttttcatatttttaattaaatttt

SEQ ID NO: 404050 - DNA, 990 bp, Cannabis indica
taacatgaaactgtgggtaccaattaccgaacttatgggagatgcgatctatgtgactcgttctatccaacatggttccatactgctcagcaatcccatagaatgagctagtacaactaattttaacatgaaactgtgggtaccaactatcgaacctatgggagatgcgatctatgaggagatggttccaaataaaaaaagtacaccgtttatctcaaaaagagactaaggtattatgttcggccctaagcattgtgggtgaccacccacattgattacctcaggatcttccgtctacccgaggagggactctctcgagatattgtgcgcgagccacaaagtcattactttcttcttcttctgggacggggaccttttgccatgaagtatactttggtattttataatcgcaagtatatttgtcagacgcaaggaggccaacattcgtcaagtctcatttagcaagaaatctgaagctcgcgactcgtacgatagacttagcaaggtcttgtgacgctcggctatctctagggtagggactggcctctgaagaaccgctgcaaacagataaaatttcagtaagcaactttaaaaactacaagttaatataattattttcacgaggatagaaacttacgtatgattcgaaaggcagttgtgtttattggagataagcccgtcgtccaaaagaagtcttctttaaaatctgttgttatacccaaaattcggctgccatctcagtggaggacacgtatcaagataaagggaatatggatcaatgcaagtcactttatatggaataactcattaattatttgagtatcagagtatatttataacctgcagacggtaaggtcttaggcaaggaatcaatatacaaactggtacttagtatattagcgagaaaccatatgttgctgaatgcaaatagcgaggcatcaaggacagtacacataggaagatgaaagcgacatatatcaattgcgaaag

SEQ ID NO: 404051 - DNA, 1151 bp, Cannabis indica
ttctattttcttcagtataacatcagtgaggggatggaaaagggggatcttacatgtaaagaccgcttagtttaaatttggaattagcagataattagggtttaattatgaaaattatttattgatatttaaatagttatttatgttgatttatttgaattcagaatgcatttttatgtcatatagtgaaatctcataattttgcattttcggtgccccgcaacatggaacgcggtgtatggctcagttgaatcataatttagtattttagtatagtgggacggtttatttagacattgggaatgtcgggattggtcaggaatttagaatttcccaaaatacccttagtacccctttgatgttattttagtgtgaaggggcaaaatagtcattttgccctatttgtattttgtcctttagtggacttagttacattttatttttagcttctacttactattgttggctgaaataaagctagttaattgttatttgctcactttgttgaaaaattaaaaaagaaagacaaattccattttttctctcaaactttcctctctttttcgaacccacctagaggcagctaggttttggtgattttttctgcattgcaagctggttttaacaaagattaagtgatctcaagttcttggtaagattcttgtagcttcctctttgttttcttgagttttaagaaaaatatgatagtttgcatgcttggtaaatttgatgttgttgctgctgtgtttatgtgatattttcagaggcttattcatgttttttttgagtggattagatcaaattttgattcatgttagttggatttaactaagtatggagttttgaactcaaaacattggtttttatgagtgcaatgttatttagcttgctgtagttgctgtagttgtttgttgttatattcagaggcttatatatgagtttttatgtggattaatgcttgaattagtggttgtttgaagggttagtcaacttttgagtttttgaactcaatcttgaacctttaatggtgaaattcgtttctatgattgaagctttgtttaatcacttggaacatgttctttggggtctaattagtaggtctagagagtttggtttgaattggggttgaattgcatgagttatgaaatttt

SEQ ID NO: 404052 - DNA, 786 bp, Cannabis indica
caataaagactttaatttctactaatgcgcatataatggtaaatattaattttatcactaataatctgctaattctcatgtctaaatatgtgattattaccattattcttcgttaaaaggatttcgtcctcgaaatctaatctgaacaactctggatactgagccctcatatcgaactctaacttccaggtggcttcctgcaccttactgtttctccaaagtactttgactaaaactatggtcttatttcaaaggaccttattgttagggtacgtttatgttctaaaagtaagtatttaatggataatatattatagaatatatgaaatacaattataagataaatgaatatgttaattatagaagtataattaataaaagtatgaaaatttcatatttatatagagaaggtatgatcttgtaaggtagtacaagagaatatatgaataaaataagtcggtagtatattaaagtgctaaatctttaatatataattactaagtgtaatttactatgcactatattagtgtgtgtgattttgattcggatcatatatgtggatagacatatggtaaaagtactgtgtataatttgattaaaaatgactggaccaatatgaaataatattttttattaacatatcgtttatcatgaaagaattatccatatcataacaatggtcattagtaaatcaatctgaatcatgagtatacatgaactcccatttatgttcattgagttttttgattcattcgttaaagtatctcagagaatgtgattcttaca

SEQ ID NO: 404053 - DNA, 620 bp, Cannabis indica
aaaagattcaaagttggatgtataattcatacgtggcgtgaacccattgaggaatagaattacggtaatattaataataattaataaaaataaaatagaattttattataattaagaaatggaataatgatattaattaaaattgagattagatgctcagacaaaatatatgcaattatctatatatatatattaagattatcgagaaagttctgaaaggttatcttatagaaaaacgccaaaagaaaaaaaaaactgaagaaaaatcacacttaattaaaataataataataataataataataataaaaaaagatgaatcttattgaccatataatgtggccatgagaacaaaaacaaaaacttataaatatatatgtaataaattaatgtcagatttgtgatagctagtagtattataatcttgttgtgattattttttccttgaatagctaagagtttgttagagtcttgatatatattgtttgcttcttcatattgtaaaagaaataaaatatctaagcctaggaaaacagaaccgataactctatgagttataatggtctgttgagactttgtaaaaaaggtctaatttattttccttgtaacttatttatgtg

SEQ ID NO: 404054 - DNA, 843 bp, Cannabis indica
aatgtacaaaaatatggtattaccatagctttaactttaacagaattaacaaaaaaaaaaaattaagagaatttactttaaaaaatcaacaactaaaataacttgttcacaatactgagaaaaagcctatgccttaattcgaaacttaattcatatgaaaaatagaaaatcatatatttaagaacaaaagatatattaattattcaactttttttttaaaaaaacatattaattatttcaagatttctatagcaaaaaaaaaagaaaaagagcgaatatgtaacgggcttgggaatgaagcacaaataatgaataacttatgttattttacggttaaaaataaaattaaactttaacagtttgataagcttattattgttaatccttctacacttactttttcagttttcatttcatactaaaccgtctaatgtacttttctctccctctctattttcatttcattgttttttttctttttttcccctttcttcctccattctttgttcttgctctgttttttttttttttttctgctctcggtttttggacgacaatggtgtcattgtgcttcgagtaagagtggacatttctcgtgtgttcttcaaggtatttatgctttcttttcctttttatattcactgatttttggattttatttttcatcttcattttttttgttttttgaagtttttattgttgttatacaatttttcctagttcatttttgtatgtcttttaaatgattaacatttcaatgtgtttagtttgttgttattttatttttttaaaaaaaatgcttcatccgaagtgagttgtctgttgttgtatttgttcataatg

SEQ ID NO: 404055 - DNA, 600 bp, Cannabis indica
gggaggcccttgcggaggcaaagatctgagaggaggctaagcagagggaggctgaggtggaggcgaggcaccaggaggcattgaaggtggagggtgaggccgctgccagggccagacgcgagctctgggaggccagggaagccatggacgagatggctgccaaggtgaagtccttagaggagttgcactaggcagacttgcagtctacggccaacctgaccgtagaggtgaaggagctgagggacttcacagactagaccttgaaaaaggccaaaagagatgagctcctgacccccgtctcctgcaagcattgcgccaagcgctttgatgacgatgtctacatggcctggtagtcaaatggccagagtattaagcttgacttctatcccaagcttgaagaggctcttgcttagttctgggagaagaagaaaaggcttgatgctttacttgaagcgcgttggggccctcgtcttcctcctcgcatcgattaggccacggcgtccaacccattccagcattataatcatatatctcttttctatttacagtcttttttctttcctttaagacaatttaaattatcttttaaggggagacagt

SEQ ID NO: 404056 - DNA, 816 bp, Cannabis indica
atttctaattaatatatttatttatgaaataattattatatataaaataattattataattaatttaattatataaaataatcagaataatgttttttttaatatttaaaatattattgccggcggatccaataattgggtccgccggtattaatcattataatgtttttttaaatatttaaaaatattaataccggcggaccccaccgctattaatccaccggtattaatattattaccggcggaatcccattttcgtcgctaataaccatttatagcgaccaattaatgccggcggataattaccggcggattccgccggtattaattattaccggcggtctgggcatttaataccggcggatgcttccgccggtaatatacaaatctgttgtagtgttaattgatttacagaataattaaataaaatcatatttttttctcaaagtactctccctcttcccaattaatactctctctagtgagtttgctaataaataaagacaatttattttttggggtaaaattttatttagttattaaaatttagagttcaacattggacaagttgactgggttttaggaaaaaaaaaaaaactaaatccttactcgtccgttcaggtgttacaggttaacagcgagttcccccgattattttattattttttttttgtttaacccaaattttaaatactataaaataaaaataaaaattaaaaatttaatagtattactaaatataatatactagggaatataaaaaaaacaaataaagtatatgtgtaagttaaaaataaaaaataattaatggaagta

SEQ ID NO: 404057 - DNA, 782 bp, Cannabis indica
ctagtaatagtatttatattagccaagtactatgattatttagaattatatatagctcaataggacaatgttctccaataagattaattattacattatcaactctcaagagggttttgtttaattttgtttttcttttcacttctttctgccctgttttttatgagatgtaagtaaataataaaaattctgctaaataaaatttgtatttccaaatttctctccacaaatttggtctttaattagggtagtgtggctgagaatgttgcccatcaccctcaaaataataaaaaaattactttaagttgaataaaattgttattagttataaattatcattaatgtgttgtgctaaaaaattcgttgctaaatatattagtcacaaaatcataattgttatgtccaaaactaaattagcgataacttgtatctaaatattatgttttagtcacaattaattttttgttgtgactaaaaattacatttagccacaaaaaattatgttatgacttgtaattaaaattaaattagtgttaacttgtattcaaatattacattttagtaataattaaaagttatatttagctaaaaaatttattactacatgtaagtttgtttttttgatagagaggtgaaatgaaagtagaataaatttgaatggaagaaaagtataattaatggaagagttaagaggagttataaagatgtacctctcaaaaatagatgtatcggtgtacttcttaaaaataggtatatatagttggtgtaccttttatgttttt

SEQ ID NO: 404058 - DNA, 1153 bp, Cannabis indica
tacagcttttattatttcttatgcacagttctctcctatatccaataaatgtgaaggtttaaaaaaaataagtaaaatacataaatttctatcaactagtcaacatatattttgctctttcggtaaattacggtacaaatacttaatattttaaattttatacacttaaatattttatctttatttttggaggcaaaaataccaatgttacaactctcttacatctgttactaccacttccgttaactcataaataaacgtgtaattacatatgtatatcattatactaatattactttattttcgaattaaggtgtgtcggtcaacctgagtggaacagttgctcgatgatttacagcccctaaatcacaataatcgtaaactggtgagtgacacgctaaatcacttttcgatgacttaaaaatgaaactaaaagttttcctatcgatagataacatggcaataccctaaatatcgtaaaaaaagggaaaatctagggtgccctaaagttttcctatgataatattgactctgtgagcaacacttatttatgtaagtccatataaaatattctaacagtttcaattaaatccaaagtacaggcaaatttagttaattaataaaaaaaatattcctacttctcttgaataaaaatttattggatgaatttattctattttttatactcaatttatttaatttaatgatatatttattatcaaaaaaaatcgtacagcttttattatttcttatggtttgttctctactatagccaataaatgtgaaggtttaaaaaaataagtaaaatacataaatttctatcaactagtcaatatatattttgttctttttttttaaataaattaggcaatatagccgcttttcgcgcgactaatttaatttcttttagtattataataaaaataattatttattaatttaataaataattacttaaaaatataattcttatatataataaaattaaaaatatattatctaattttatattattattaataattttgtttattaataaataaattcaattttattaattattatttagatttatttcttaagatgtttaaaagttattatatgtagtcttttaaattactttgttaaaaaaacttgttgttataaaaataaa

SEQ ID NO: 404059 - DNA, 731 bp, Cannabis indica
tcaccgccgccgctgccatctgagtttgggcagcggcggtggtggcgagtggtctcgccgacgatggcgcgttttgttgattatgaatttccatcttctttatatttggtgatgatacacttgccttagtctctcaatttcattcttcaatgcctcttgatgagctaattaattaataataatttaaaaaattaattaatatataagatcatattaatttcactcaaattaattttaataaaatagaaaaaatataaaaagaaaaatcaaagacttttagcatagtattttaaatattatatatatgaaaaattgtcactataaaacataaaaaaaaaaaaaaatcaaagaatatttatgaagaaaaaattcacatttattcaaaatctcctaattaattatagagattcaatttttatgataattacatgcttatacaaattatatatagattttattttagcatagtattctttttctttttcttttttttttgaaatgaaaattaaaatcaaattgaagaaaaatttcacatttatatactaaaatctatcttagtaattaagttatatatagggattcatttttataattaattttttttgtttcttgttctctaagaaaattgtaaagattattaagcaaaatctatatataatataaaggaaagcacaaaataagtttatgtggcatcttagatttttgttattctatttttaaaattttgtaaa

SEQ ID NO: 404060 - DNA, 551 bp, Cannabis indica
ggctaaaccttgtttccactcaaattcttccttaggtggcgtttggttggaggtaatgaaacaatttttattccattcttttgttttgttgtatttttattggaatgtcatttcaatcattctaatggaatggcttttttattattttggtagaataattattccattttaaaattgaaggaatgatcgttccaatataaaaaaaaatttatcaattttttttaaacattttaaatttgattctatccattctcattcctattctaatattttcatttctccctaccaaatagtcaatattaattggctaactatgatttacttaaaattttgcttgttgttttagtgatgtcatgttcaatatactaaactcaaactttagtttgagtaatgttaggttaggacttatgaggttaggtggtgtttggtcggaaggaattaaaatataggaatagaaaagagaatagaaatggaatgcaatcaaatttaaaatgcataaaaaaattgataacaagattattaaattttttctcatcttgtattggaatggt

SEQ ID NO: 404061 - DNA, 786 bp, Cannabis indica
cccataaaaattaccgaagacaataataaaaataaaaaaaataatataagaaagtaaattaacgaaaaaaaaaaatataagatgtattttataatttaactgttcaattgttatttacacttcatttattttgctgtaattattttttttttgaatgaattattttttttttttgctgtaatattaatatataagaaaaatatatatttatatgcaggcgagtactgtgaaactttaatgaacttatcggagaaaaggctacaacaatctctaacagcacttaacaacaaaaacaaagtggaagacatccaaacatggctaagcgccgcgttgactttccaagaagcttgtaaagactcagccgaggaaggacaggtcgtcccaaacgacgtcgttaggagcgatatcgccaaaaaaatgtcttatctatacgagttaagcagcaacgcattagctcttacaaatcgcattcaaacgacgccgttcgataccaaatctcgtggtttgtctgatcagaattataaggacgaatcatcaccagattttccaaagtggatatctcgtaaagatagaaaactacttcaggcaacaacgacagtaaatgcggatgttgttgttgctcaagatggttctgggaattataaaacggtttctgaagctatagaagctgcacctatcgtctggggggtctttcgtgattcgatgtgaaaaagtggagtttataaggagaagattaaaccataaagatgggattacttgattgagatggaaatatctagtgtcatt

SEQ ID NO: 404062 - DNA, 528 bp, Cannabis indica
ggatggttgctcaagtgaagtgtgatatacattatctcaaaaaaataaaataaaaaatcattattttgtacactgctaaattatcaataaatttcaacatggttagcttaatgttactaaatttcacttcttctcacaataaaactcaccaattttgcaacttttgtaaaatattaagggtgtgtttggaaacaattgtgtaattactatgcagtgtaattactagcttttgatttaaaacacattttatagtaattacattgtattttaaaatacaaggtgtgtttggatgttaaatgataattacatgtgaattcctaatatcatgtttggcataatagttagtaattacacaataaattaatatcataatatttaaaaatatatttcatcaattaataatatataaataaataataatcttttcgtacaataatgtcaaaattataacaatttagtagcaaatatttaaaataatttttttatgactatctaattgttcttgcgttccatatattttgagctatt

SEQ ID NO: 404063 - DNA, 654 bp, Cannabis indica
aaaactgtccacaaattcgtaatgaaggctacactgcgatcacgaaaagtctcgtcgcgacgactgattgagactcgagaatacaacgttcagccaaacttcgtcgcgaccataattcatgcttgtcgcggcgagctttgccagaaataacttgaacttttttcgattctttcccgcctttgtcaaatctaattcttatgaatattttctttaaacaaagagaaacaatcataaaactatcctaaaagtagaaataaagagcaaaaaaaacactgaaaagttacccaaaacttaggctaaaaatagtctaataggaggcacttcaaagagagaaagagaaagtcgcttatgggcaacaccaatattgaacaaaattagaccagaggaagggtcatttacagatatgacattgacaggcagctatagaaatagctcctccttataaagaccctcaagcccttgaagctctgcaaaggtaaggttggccctaacgatgctttcacagtacacccttgtcttaaattttgagaggcaaggccattcgaggtgaacctttaggcgacccaagtggtccagatcgtatgattttacggtatctgagaagagcctagcaggcaacccctagcttcagaacatgtaacgtccccgcttcaa

SEQ ID NO: 404064 - DNA, 536 bp, Cannabis indica
aattaagttaaaattaaaaaaaatactaacaattttgaacttgatgacaatacacatagcctatctgctgtcttgttcgcagatattgtggaaaaatattttcatgtactactgcccaactaatgaattacactgcagaggtgtacatttaaatacataaaataattttacttgcctttcataattagatttttttaatcaaattaattattcacactatgtcatatcatcttaaatgataataaacaactatttgcaagaacaccgcaactttgtcgatactaccatataccatttatccacgaaaaaatggacgattcaattatatgcggacctagctagaatgaaaagtgtaaaatacaaacattatactattgtctatgtcgaaacaaaggaagattaaaatccacccattaggagtatctttatttttcttatctacaacttttagattgattttatttttaattatcaacaatttagagattgatttttaatttttttttttattttatacacatttaagttgtgttttc

SEQ ID NO: 404065 - DNA, 565 bp, Cannabis indica
accctaataaacataaaccatcaattacatgcatcatacatgcatcattcaaaaattatatatatataatgaatgataaagaattaaaactcaccttgatgttgatatgtggctcgttcctctctcaaagtaaaaaaaaaaaaaaagaaaaatggcttgctgcaaaaaaagaaacgaaagagaatagaaaagtggtttgtttagggtttagggtatataatatatatataatagggtatataatatttagtggcaaatgtgtctttttgtttttaataataaaaaataaataaaaaactaaaaagtagcattacccgtaatggtttatacctgaagaaattgggaggagaacttctttcattcttttctcctaattttatgcctttcccttagagtattccaaccattaaataaagtaaacaaatgaaaaggagtgattaccatacctatcactcccaatcctgattagtaaacatgccattagattgatatttttattattggaccaatttttaacatttatattatctttttaatttttaacatttttactttttaaaatttt

SEQ ID NO: 404066 - DNA, 723 bp, Cannabis indica
tctgcacttcttttgatgatttcaaaacaacacctgttttgattgattccggtcatcttctcaggtgaagtcatcgaaattaatggtggctctattctggttagattttgtttcggttttgttgcgatactaggttggtcgatcgaaggttgcgtgtgtgaggttgtttatttcgttccatgcgactgaagtagtagaagaagtggtattttagtaatatttagtttatgagttgtattaatgttcaaagggctggccataaatattattgtaatttaattgtcttttttgtatatacatgaaaaaactccttgtttatttataacttaaactttattaattaatagggtttttataaaaatactagatttttggtaaaagtttataattttactgtcacaaggaatttttttttataaaaatactatctttttataaaccaatctttttataaagcaaccgtaaaataacaaaataaaacaataatggaaaaactaaaaaacaaccgtgcaacaactgtgaaaacttaacatagtacacagtataaaacatacgcagttgatgtcgcccaattagttacactgtggtcgcggtagtaaacgggctatatgtcgtatccacagggaggtaaattaccagtaaagattagtataaatagaaaatgatagaaatgtgaatgaagtaaaaataataaaatgatgagatgagaaagttgatcagata

SEQ ID NO: 404067 - DNA, 678 bp, Cannabis indica
ttgattgatgtttgcaaatttttaataaataatattctgattttcgttctggaattatttttattgtatagtatggaaaaaaattaagcaattcacttttttacagaactcaatttcgattttatttgaatcagttatgattttttgaaaatttgaaaaaaaatctcaaatcgggtacacactacgtgcacgcgcggacacacgtgatcacccgtgtgcacgcccatcaggacagcatcctgtctgaaggaacaggcacaagcatgtctaaagtcccattctgcgtgcagaaatcctgctgtgcaagattcgtgtgcgggaaatttgggctatgcacacttgctgcgcgcgcggatggtatgcactgcataccatccgagccaaatgcaatttttttcatggaataaatttcgaattttttgtatagttttgtattttgattttgatttttcaaatttcaaatctaattatcataattaaattaaataaattttttaaaaaattaatttaagatattagtgaaatttgaatttgaaaataggtaaaagtctattcttttttgcttaattaattatcgtatatttttaaaatttgattattttatcttatttttaaatttgaggtcagatatttatatgttattttttttaataaaatgaccttatttgaaatttaaaa

SEQ ID NO: 404068 - DNA, 579 bp, Cannabis indica
cttttcagattacacatttgcatcaagacctcaatgactgtaaaatgtaagagaggtccaaatagctaagatgcctcaattgagcaattgatttaagcagctgcttgacaatttcataacccaagtcaactggttagttaaggggaggggtatgagtgttactaaggtgtatgtaattatgtgatacacagtagagaattaggatttttggctcccaaatttgatatgtaccacatcatgcctcctgaacttttaaggtcgtgaaaaatcttctttgaactattaagattgttgaatttagaactaaagcccaattttagtaaagaaagtctaaatggatgaaagttcaggaaacataatttggtacatatcaaagtttgaggagtatgatttagtagatatcaaaatttcgggagcatgaattaatacataaataatcatagaattagtaaaaattgaataaaaatttgacaaaaatccttcaattcaataatctcaataattcaggaaaaaattttaaagaccagaaaaattcaagacaaaaatccttattagcctagaataaatagagggagaggg

SEQ ID NO: 404069 - DNA, 645 bp, Cannabis indica
gagtattgtttagattcgattttaaggtatttttagtctttaattttatttttagtttttacttaatttcgattaattgttcatgtactaaattatgatgtctagactttaatatctatcaaatcataccttcaaactttacatgtaccaaattatgttttcctaaactttagtttcatgttagattttttttaattaaaattttgacaaaagtcgttaaatttaataatctcaatcgtttaggaggaattttaaatttttaacggccttaaaagtttagagagtatgatttggtacaagtaaaagttcagggacaaaaattttaattagactaatataatttatctctactatatatgtcatgcacgttaaatgaatataacataagatgaatgataacattaaaaaattgttattattaataaattataacaatattaaaatgtaatattttcttatatataacataataataatgtaattaaaacatatatgattacattttgaaaatgttattaataaatgtaacataataaaccataacactaaattaatgttactatttataatatataacactaaaataatatcataatatactatttaataacatgtaaaaaatgtaattaaatgtcaatactttta

SEQ ID NO: 404070 - DNA, 757 bp, Cannabis indica
gtatagtattacattgaattgtattttatgtaattattttaatgtaaaattatatgtggtattaatttttatggacatctaaagatataatattttagtatagtattaataaaaaaaaatatgatatataaatccaaattcaatataatacaatacaatacgacctaatacgacgtaccaaatgagccttaaaagattctattacccttgtttttagcaacttagagaggccttattgtattttattgtacccatttatttcttaagtctccctctctcttggttttatttctttaattgttcctattatcttttttttcttaaggaatataaaataaataaaataaaatctaaatcctaaatcccaatcgtgttcagactagaccattagagcgaaatctaaacccccattgtcctcctgctcctcgtctaagattgaaggcctcatacataattcgtttgataaagcacaacccatgtaattgatacttctaatttttttaagtcagcttcgattctctaactcgttttttttactcactattcttgatcacaagtgattctttcgctctactttttggatcggtatttttgataaggtgaatgtgttagaatattttatgtagattaacataattaagtgttgctcactcagtgtcgatattaacgtataatgataattatataatcggtaatgcatggtattgccatcgagccataatgggatagacataacgtactaacacgctcgggaccc

SEQ ID NO: 404071 - DNA, 770 bp, Cannabis indica
aagcatgattttgtgttgttgtgaaatctgaaattatggggtttaatattggattttaatgcatgaaaatgtattataaactctctatattattattagaaaatctgttgtatggctttaggttttggttggttattggcatgaattggttgagtttgaaagctaaacttcgtgtaaaagcttgccggtttctgggtttggaacctacgtgccgcgacatggtctttagcatgccgcgacccgcccctcttgatggaacctgagagttggtttcaggtgccgcgtcatggctttagaatcatatttgtgaaaatctcagaattggaatctctgctattgcgggacatcaagtaagacagtagttagcacgtagagttatgtgcggtggcccttgagtaactagtaaccaggattagggttattaccctaacatgagcggtttaatagcctagggttattaccctagtgatttatattgtgtaaatgctatgtcatgttgaatatatgtgtatatggagatttagggttatgtgttcaaggataactaggttggactcagtaactagaaccgagatgaaccggtctaaggccttattgtatttagacgtgtgagtgcaacatgtaggtctatgttacgtagacttaaataggcatgtgagcctaacatgcaggtatgtgtcatataggcatatgagagtggcattactgcttatatagtgtgataaatatggtatttgattttttatgctgtcttgctgggcttggctcac

SEQ ID NO: 404072 - DNA, 632 bp, Cannabis indica
agtcttatgtactctatggtgtgttaaagacctgatttagctcatgctatgagtgtggtcaataggtacattttagaccctgatcctgaatattgggaagcactaaaatggacaatgagatacttgtacgttactctagacactggaattatgttaagtaaagagaaccagtttatggaagaaatcactaattatgtggactcagattttgtagaaaacctagacactagaagaagcctaacatgatttgtgttaactactctcgggggctgcatcacctggaaatctaacctgcaaaaattagtagccttgtcatcaacagaagttgaatacatggctgctacgtacataagccatcaaagaggctatatggcttaagtggttaacaaaggagttaggtttcatatttgaggatatcacaatttattgtgacaatcaaaatactttgcatctcatgaaaaatcaaatatttcatgagagatcaaagtacatcgatatcaagttaaatttcataagggggatattgtgtcatccaagcaagtgcaagtgaagaaaataagcacacatgataaccctacagatattttcgctaaaagtataactagagacaagtttaggcactgtctaaactt

SEQ ID NO: 404073 - DNA, 651 bp, Cannabis indica
agctagacacggtagagtttcatgaaataggttggctttccagtgtgagcattttgagggaaaaataacagcatataggtttttgccgccccattgcagatggcctgtaaagagagattttattggatcttgtattttaatactagtattttggtattttgtcttaattctaagtactcttattattttaatcaataccaatgataaatcaaatttcaggtggagcgtagttacaattttggtacaaaatatttcgattagttctttgaaatatatttttttccttatacttaacaaaattgtaaataaataatatggtactaattattattatatttatttattgtagttattttttttatcatatttgtttaatgtgattttttcaaccaaaaaaataaaataagaaatgaatttaaaaaacaaagtggattattttgttcataaaatatttaatccaatttgtatgattcaattcgttaactgcgcacttgtgtggatcgaattgaaaataaatgttaattacatataaaagtagttaatttacactcttaatgggtattacttataagtagttaatttttctatttaattaaaaaaatctcttatttttataatatatagactgagattgttccatcggtaaaaaaa

SEQ ID NO: 404074 - DNA, 578 bp, Cannabis indica
gggatagctagaaagcatggaaagctctatcttcttcaacagaagacccccattgtgctctttctcaatgttttttccattcaataaacaatgttgaccattggcacaacagccttggtcacccatctatgtacatttctaatattgtcaataaaaagattgatccatcttttgttattccctcttctacttactgtcatgtgtgtcaattagcaaagcaaaaaaaaaactaccttttattgccaatcacaactttgcaaaaaccatatttgacttattccatatggacatatggggtccattccatataatcaacactaaaggatataaattctttcttacaattgttgatgataaatttgttgggattttatgccctaaacaaaacccattacaatctaatctgatttgttatcaataagagattagaagtgatttgtgttaacatgtagttttcatgtttatggtttaatatatgtacaaaatctgttaagtccagaacatatagtcattgataattacagtgatatcaacacagtggaatgtgattgtgattatatgattcgaaagactaagtc

SEQ ID NO: 404075 - DNA, 278 bp, Cannabis indica
tcctttctctccttctttcatgctgaaactccttcttgttaaaagtctttcttcacgatcttcctcactatgattgaggtatcacttactgtgtgtgggcactactctaatcactaagtgtttcaaaatctcaaggaggaagagagagagagagtgggcggccaggtatagagagaaggctcaggtttttctgaatgaaaagtgtaaaagttaagtgtaaatttcctgaagccttcactatctatttatagcattccactcgggttaggtttgaatta

SEQ ID NO: 404076 - DNA, 558 bp, Cannabis indica
gctgatgctttcgaaaaatcaagcggcaacagaaaattttgggaaaacagaggtggtcatcagggctgtagatcttcattccgatcataccctgagtgtttgaaatgcaagaaacacaatcagggtgaatgccaggccaagacttgtttccagtgtggcatggtgggccactttattcgaattgtcctcaggccaagaaagaggagctaaaaaagaatactaatcagaacctgggatgactttttaccattactcgggctaatgcggatgctagtccgtcagtagtgacaagtcagttatctataaatagttgttcttacattgtgttgtttgattcaggagctactcactcctacgcgtcgagtagagtaattgacagttttcataaaccatgtgatgtgtatgctttgaggtttggtactctgttacatgttgagattttatgccataaataaaacccatttcaagaggcattcgatataaataaccaattagaccaaaactaccaagaaaataaacagatatagaaaagtgaattagcacaccatacaacgataa

SEQ ID NO: 404077 - DNA, 632 bp, Cannabis indica
cagaaggaggccgaggtggaagcaaggcaccaaaaggcgctgaaggtggagggtgaggccgctgcccgggctagacgcgagcttcgcgaggctagggaggccatggacgaaatggctgccaaggtgaagtccctagaggagttgcaccaggcgaacttgcagtctaaggccaacctggccgtggagttgaaggagctgaaggactttagagaccaggccttgaagaaggctaaaaaagatgagctcctgacccccgtctcctgcaagcacttcattaaacgcttcgacgacgacgtctatatggcctggcagtcaaatggccaaagtattaagcttgacttctatcccaatcctgaggaggctcttgccgaattccgggagaagaagaagaggcttgatgctatgcttgaagctcttcggggccctcgacttcctcctcgtattgattaggctgcggagtccaacccacttcttggtaatcatatctcctttttttttatttacagctatttttcttttctttgaggcaatcttaattatgtagctgtttattttctaaggggagacaattgttatggcccgtctccaggccctttgtattatatttttttttacctgccctttgggtcagg

SEQ ID NO: 404078 - DNA, 1081 bp, Cannabis indica
gcccggggatgaggctctcccaggccggcggagattttggatttttatgaacttgtttccgtccccaaaaagggggacaaacttaaagacagtttttatggtttccgggcccacccttcaaatgatggggtggtcccttacaatcgacaaactcatgtcaaggagtatcgccatcgcttcttcttctcctccgggttccgagctgtggagcacccggagcttctcacggagtgggtcaggattcctccctacgagcggaccgcgcctactgagatcttcttcggcgggcccaggctttgcgacttacgaccgggcggatctcgacgtcgggggcttagtcacgacggagaactgccggaaggccaagctgatcctgccgcaccaatcagtggaggactctaacctttctaaggttatctgtccgaatgtgagggtgcctgccgcggagaagaccttccgggatgagcttattgccaccgcggagaagaagtaccaggagtatctctaccggaaggcccaggagaaggcttattccaaggcccaagcggcttccgggaggccccttcgcgtagggagcccggtcgagaggagaagccaggcgattgctgggaggtcccttcgcattgggagcccggctgagaggagggctcccaggcccaagcctttggttcaggtgccgaacacaggggctcctgatgccagtacttccggctccagtaagtctcctttagcagtacattacgttccttctgttagcgaatatgccagccttaggcctgtaggattcgatgagcgtctccttaggtttaggatgccctcgacccggtggggagaccatatgaaggattattatttttccaacttaggagatttcctaggtcggtccctgataggttctggacctccggaacccgttcccttggacccttcggcctatatttcttccagctggtttaggccttcggacagctacctcggggatgatgcagccagcattaagattcagaactttgctagggccgaattagagagtcagggtaggactagcttgattgctttttgagtgtttactgctttcaca

SEQ ID NO: 404079 - DNA, 683 bp, Cannabis indica
cgtcaagttgactttgggaactccggaatggaagtttggacttcaataactcatttacaactctctttctttcactattctgtaccacgaagatatggagcaaccaaatccaagccccaaaaatcacatgaacgtgcaaaatggaagtcaatctgggcacctagggattcacctagccccccatgttgacatcctcaactaaggttttagttttcgggaatgtcttagtggaaataggtcaaaatattattgggacatgaactagacataccacgaacatatttgaggcatcaaattcaaattcagggaaagtttatttttgagcacctgatgtcccggcatccaatgcccaagtcaaaaatttgtcaatttaggcgactttcaagtattagattgaagatttgaattttgtatcatctttgtcttcataaaaaatcactactacaaaacaccctttagaggcaatttttaaggcctttcaacgttagttttagcaaaattcgctaccaacactgatttaggtgacagtgtagggtctaaaataaccgacaccataagattacatatggtgtatagttattttctaggaaccaacgccataggggtacatatggcatcggttcctagcaaacaaccgacaccatatacacccataacaaccgacgacaaatatctaatgatta

SEQ ID NO: 404080 - DNA, 808 bp, Cannabis indica
ttattaataataatataatgggaaaatgtttagtaaaaattacattattatactatagtaaaatgtttattctgatgtatttttgttgttttttaaatttctaatagtgaatttgttcattttaaaacataaagagacatgtagatagatttaggtatgtggaaatactgttctgatttttaatgtttcacaacagctgcattacagttgcataaacattttgctaacagttattttgtctgattgaaaccttcgtctgatgcaacctttagccaaccacccagaaactttcgtctgattgaaatattcatttgatgcaaccttcggccaaccacctagcaaccaccctacaaccattgtctgattgaacccttcgtctaatgcaaccactgcgcaaccacgcaacaaccccaccctgcaaccatcgtctgattgtgtaagtgatagtgtaagtggtattttagtaattaaaattacataaaaggtataaatgttgtctttaccttatggaggtatttttgtaaataaagtatcaatttatattttctatgtaataatttctagattttacgtataacatccaatccgatcagatcacgattagatatccattgtttggcggtcggttgtaatttgatcgatcggttctcattggattggaccgatttatgcacacccgtactgaagatcttttagtaatttttttttcacttagttattgaaacagttttaacaaaactctttataatttaaaattattacacacgtaatcttaattaataaaaaaaatagtaagaatgacctctaa

SEQ ID NO: 404081 - DNA, 740 bp, Cannabis indica
ttagttaaacttgtgaatattcttggagatcttcaattaaatctactaattcttggagcaaagagtgtttccgagtttggtcataagtgtctaatctgtgagaggggactgtggttttattgggatgaccgcttcacacccataagtaatcatatacaatgtgtgccctattgaagtgtgttctattattctgtattcccagaggactcgcgaagctcctctgccaaatgggctttacaagcttggagttttttcttcattgttgtcttcaggatcttattcacaacttcaacttgtttattttcttgtgatttttccacaatcaaaaagctcttcacaattccgtgttaattaaagaaattggtgaagtgatcactatcaaatctcttcccgttgtctgagacaatcttgtgtggaagctgaagtggcacatgatttttttgatgaaaaagtccagggccttcttggaggtgactgtgttcataggatctgcctgtaccaatttggtgaagtagtcaacactagctatggcgtagttaacttctccttttttagtggggaggaatcctactaagtcaattccccaatcaacaaaaggccatggactgctcatgagagtatttttgtttgtggtgtggcagaacctaggcgtatctgttgggttttatgccctaaataaaactcatttcaatataattagatttacttattaatatagatcagaaataacatttaatgtt

SEQ ID NO: 404082 - DNA, 663 bp, Cannabis indica
agctgtgccaaactggccctaataatactaataatatattatttttgtaataatatactttttgtgtgtcttttcattttctctttcatttttattatatgtttatccctaaataattaataatactaatagaatatcttttgtgtgtcttttcagtttttattatatgtttattattaaataattaataacactagtaatatattatttttgtaaaagtatatttttttatgcctttttattttctgataaatttgacaacttatattaagtttgaatattataataatattatgagtttatcaataaatttacattaatttatttaattatcatattataataataaaatagattggtcaaataggtaggagttatgagaataaaaataaaattaatacaaaacatgtttttttattgaagaaaatgttaagctctagaaaaattacaaaagatagaataaaaaatgtagagaatgctacttaattaatttttgatgagattttttttttctagaataattattattttttgcacaaacggtgtataatatatattttttttataagtgcgtaatgttttataagccttttagtagagataattataatataaatttgtgtttagtttttttctattaaaaaaatataaaaggaggcctca

SEQ ID NO: 404083 - DNA, 503 bp, Cannabis indica
cgcccttctaaatagctgcctttcccattatgattgattcccaaatcaagatccttataattataaaagtcttctctaggattctataacaggttgcaataggttattattcaaataactgtctatatatattaaaagataaaatttctatattagaattgtattaattgtaaaaaattatgcaattcaaataaattatttttttaatcaaattattaaataaaacctgtttagaaattgaaatacttaaccgcataatctctcccactcaaagtgcctttctccttaatcacttaatttctgataacatcatcattggtgaagaggtaatgaactccctctcacatcgcaagacaggtcgcctgggatggatggctctcaagttagatatggccaaggcttttgatcgtgtggaatggatctttattcgtcgtgtaatggagacatttggttttccccaaaggttcattaccctggtcatggcttgtgtttctactgcaacc

SEQ ID NO: 404084 - DNA, 799 bp, Cannabis indica
atctgaaaatttattttttaagagctcatacggactacaaattttttattaaaattaaagtccaatttttacgtgttttaattgcctaaaacctacatgaatctatttatttatgcatagagattcaaatgggattgattccatgaatttttatcgtcggaattcgttttcctgtttgggtttgggtcgagtccgtcgaacccgcatcgctggaaacaggtcaaaaattacccggctggaggttgaagatacagccaaacaacatgtcgtttttcccttgtagaaaatgacgtgtcgtttttcaggttttgtggctgctgtcgtttgttcaaacgacatgtcgttttccccccttggaaaacaacatgtcgtttttcgtcttgtgagcagccttcagattcaaaaaacgacatgtcatttttcctcttgtggaaaatgacacgtcgttttcccgtgtgaacagccagccttcattgaaaacgacgtgtcgttttacgtcgttgtgggcagccttctttgtagaaaaaacgacgtgtcgtttttcatatagctaaaaaacgacaagtcatttttggggcagtaattttcaaaaaaaaaaaagggaaaattcaaatttttatttatttggaatattaattatttttctattttgtgttaatttagtcaataaattacattcattcaatttctatttttaatttaatacatatatttagaattaatatgttatttagtataaattgaaaatgaaaatttgttttaatttggtaattaattacatgatttatttaggcatgta

SEQ ID NO: 404085 - DNA, 625 bp, Cannabis indica
gtttgaagttttttgaacacgtgcggtgaattgtaatatcaaaaactctgctttcggtactgtaaactatttagaacatttcaaaaatgtataggagtgatattgtaactataatgaatactattataaaaaaaaaaattagaaaaatatttcagcatataattttagccgcaaaaattaactaagatgttataattaacactcaaataaaattttaataatatattttttagaatataatagagaaattcatggaagtcatatactaaatgtcagctaacaaatcaattgtttttagagaaaattttagttaccttacatttaatatggacagttatattttcgtccaataacagtaattattattataattaaactcgtggagcagttctcggactattgttacgtacgcggccatccgctcgccgcgagtttggtattctccggaaacctggtttacgaccagttgagagtcactgtagacttctactcttttggctcctacagcttttgccaatttcagtcctgctatcaaggcttcatattcggcctcattgtttgaagctgtaaagtcaaatcggagtgctgcctggagccgcagtccagttggtgatatcatagccac

SEQ ID NO: 404086 - DNA, 643 bp, Cannabis indica
ctatactttttcttttactctttcatctctctgctacttagtagctataaccatttttttttgatcgtgaatagaggtgacagcacacatatatattttgggacacgattttgtctcgttattgtactttcacggaatgtattccgtgatgtacgacagccgttagatggggagttatttgatctgagggctagggttgatctagaggtaactagggttaaaaaatggtaacgtactctaagacccattattacgtaccctgagactcatttaactgctgtcgtacatcacgaaatacatcccgtgaaagtacaataacgggacaaaatcgtgtccctatatattttttcttttccaaaactttaaaaagttttttcagctaaaccatttattattttgactcaaaaattacactattgtaatctattttttatgataatcattttgatatgtgggaagcatatatttttttgccgctacaaaaataaatgaccttaaagagtaacttttaagtttcttttctatgtatctagtaaacaaaaataattaaactttcaacttaaaggaaatttaatatatcaaccaattttataagttactaagtaataagcttatacatatctaaaacatcatatgagttaca

SEQ ID NO: 404087 - DNA, 600 bp, Cannabis indica
ttatctctattttgaaagccaatctaatattatgtggaagtggatttagggattaaccttgtacttgtgaatctttgaattgtgactaggattaccaacacttcgttaggagcacccgaggatttggaatctccacgtttgcaggacataaggtaagacagtagttaacatgtagagttatgcatagtggcgcttctattgaatgtgatatatgtgagcaattaaaaattgggattagagttgtaaccctaaagtgagcgatttattggcctatggttattaccttagtgaattgtaaatgtgtaattgttatgccatgatgtatatgtatatcgagattaagggttatgctttcaaggcataatcgggttggactcgataattagaacttagatgaactgttttaaggccttattgtatttagacgtgtgagcgtaacacgtaggtctatgccacatagacataaataggcgtgtgagcgtaacacacgcgtctttgtcatactgacaaatgtgaaatggcattaatgtttgtatgatgtgttaattatgattattgatatttttcactatcttgctgggcttggctcacgggtgctct

SEQ ID NO: 404088 - DNA, 554 bp, Cannabis indica
caattcggcctcatctaccactgtagtgtgcgattttatcgctgcaaatcattttattttaagaaagttttgtacagttgtaaaaacgtatggtggttgtttttaaggatttttatatgttataaataggatttagagagtggccaaacaaactgatctcttctagtcatataattttgtatttttatctttgtgagaagatagtttgttttatgaaaacctgtagtattttactaggttttagtctttatttattattactattacattgttttcagaatagattgaagagcttcgattaataagagaagggtcttcggaaaaagacttatccaagtcttacttcggaggaagtaaacacacatacatcaaaacttgaagggagttcgctagctgtatggtggtgctcaaaaattagattgtcaaagtaaattacaaaggatcgcagtgaagcttttagagggagtctaaacttgtttaagtcaattgaacttgtaattttgagactttactaattgattttattatctaggtgtggccccgtagactaagag

SEQ ID NO: 404089 - DNA, 890 bp, Cannabis indica
gatactctccatgtgactctcttatgtgagggtattttgggtacaatacacataaaaagaggtatgtttacaaataaatataaaagtagaggtaaatttgattaattgattaataaaagtggtatttttcaacttacccaaaatattatggttagaatatctatataaaaatatctaggttaatttcaaatttattaattatttaatttatcatataagataattttaatataaaattaaaagataaagctaccatttaatttaaaatatgtcaagtattaaaatatctgatcttataattgaataataaataaatattatagaaattaacaaatttttaaatctgaccataatttaaaaaataaataatcaatttttaaatttaaacctaaaaatatcaaagattaataataatttattaatatatatattattaatttaaaattgatattaaagtttaaatatttttaaaataatattttattttaattttagggtttgaaaattgtaaaaattaaaaatttgggaaaaaatcccacaaaaatcgaaaattttgggcctgcccacaagacaggttgcacgtgcagcccagactggctgcaaaatgccctgtccgcgcgcagaattgtgatgcaccagggtgaggcgccgagaaatctcggcgggtgcaacctcatgtgtgtgccatcacgtgggcgagagcaaggggacaacagggcttcagacaggaagttgttccctgtccgcgcgtgcagatgcaccttttcccagtgctctgtgcatgcgattgctcgatcgtgtgcatcaatggaccccaattttcaaaacgccataactttgtcaatttttatcggaatcgagttccgtaaaaaacaaaattgcttaatttt

SEQ ID NO: 404090 - DNA, 825 bp, Cannabis indica
gaattctatatcccaaataatgattacgaatatcactattttgaatacatcgaacatgttcttgcattattggatcaaatttagcaatcatttcaattatactcaaaaaatttctattgttctcttggtaatttctttctttacttccccgaaaggccaaattattttttgctagatttttgacaatggcaattattcttgctaaaagattcctccaatgttctttgtccttgttaagtttttcttgagcatctttatcaattgttctatttttttgataatctcaattctaaatcaaactaaacactcatgttaactatatgctcattatttatatcatgactcttcaacatagcacttagatgcctccaatcattagttccactgttgactaattgaaacgtatgattcgcactagattttgtaccaaaaattttacaacaaaaataatataccttataattttttttttaatatactaactattttctatcatatttttctccatttgacaactttcgcatataataagaagtagaaaaacgtctaccattttcatcttttgggaattcgatgtcacttacttttattggaccattttctactaataattctattaatttattatcaagattttcccaatttccacgatcaaaatataatctaaatcatttttaatatttctagcttccatgctctcttcaatattttcttgacattctccatcatccatcacatcatcacacatttcattattaacccccaaattttctctatttaattgttcattaatttttttcattttgaattacttttcatcttttt

SEQ ID NO: 404091 - DNA, 533 bp, Cannabis indica
ataccaagagcttccaccacctcggctgggtaacttcccccatgatatcttgctcagagatcaataaagtggcccaacgaatcacgagctacaatgccaaagccataagcattttctttctcaaacaaagctccatcaacatttaacttgactgtatttgaatcgggtttggtccaacgctcaatgttattatcatgttgtaagagagacaatgataataagctagatttatcttgagcagtacgccaatggtcaagtgtagtccatgctgaatttagaacttgagttggagatgaggctttcttttcccaaacaagcttgttttgtgacttccaaagtgcccaacaaagcatgatggcacggcaagatgtatcatcaccatacatttcgaatgtagaatcaagccagtggccgatagttgatgaagaatcggattgaatggtgaacccacaacgctcccagcagctgaaagcaaaggaacaattaaaagcacatgtgaagcagtctcgacagcattgtggcagacagggcac

SEQ ID NO: 404092 - DNA, 689 bp, Cannabis indica
aaaaaaaaaaaaaattggttggtgctaaaacgcactttcattcaccacccaaaaaaagaaagaaaattttaataaaattaaaaataaaaaagacgtagtagtgcatgagatatagtaaaaatgtgtgtgtggggtttaattaataattagttatcaaattaattaattaagtaccagaatttggagtaatcttggggccaaagctggcgaaaatgttcaaggggtgaaccaacgatggtgaagccttcagaccacataagctttggaaaaaaagaagaaattctagccaagccgtagccggatacgccatcaggtgagcgagccgccttgagcttttggctaaccggaagagaaaaaaggttccgaccggcggtttcaatgtcatgaagaagttgtgatgggattccatggtttgtgacttgaaaggcaccccaagttttgcatgcatgtccaatgagtttaagggcattttggtcatttaaatcaacaatagggacagatatgtcctctggccaccgctcaccgccggcgggttgctcctccggccatgcatatgattccggcaactcatctaatgagctaaagtcaaggtgtttgtggtggagatggactgggtgggacttaaaggcatcggtgagtgatcttgaaggcattttattatattatatatgataattaattaattaatt

SEQ ID NO: 404093 - DNA, 1247 bp, Cannabis indica
ttatttgatattatctttgtatatttaagaatttctaatcatattatttctttttatctaattttttaaccaagaaatcgtgtacagttgtttttgtaaaggttgttaaaattttcttatttgtttatggaaactttactgaaaaactgtttaggttcgatggaactgtttgaacggagtgactatctgtttaaacagattctgactttcctgtttggaaatttttttcatttactaacctgattggttcttgtttgtttgaccacgacctagaaggtttctaaagtatataaatacacccttaggttgttgatattgattatctctcttggtgtattaattctaaaattactttcaaagttagagagattttctttgttgtgtgaagaacttgagtccaacaagttcttaatattttattattgtgttattatgtattgtttcttgttgaaattttacaggttgaacacattggatattgttcttcaagcttcaggagaagtcttgttcgtgagtcactttttgggatgaaaagcaagttagccacccaggagaaagattgcaagttaatcactcttcaggaaaaagattgcaagttaaacactctccaggagaaagattgcaagtgagtcacacttcgagatgaagtgtgcaagtgctacgatttgaaaggagttcaaggtctcagcacttcaaaaatttgattagaagcatagattacaaaagttgcggcaaattcaaagagatggtctttattgttggaaatattttaccatgatctagatttactaacaagtatgttgaattaacatcctaaatatgaatatctctaaaacaatgaaattaaacacataagagtttagaaagccttacattggttgcagcggaatataattaattcttccgctcagatctttaacccttgttttttttctgtcgcagagtattatcaagatctgagcttggatctctttctctctttcgggtttggttaccaccttcttactcactatgattgagtacttgacttgctatgtgtgggcatggcactctttcactaaggattcaaatatgaagaacaatgaaggaggtaaaatctctatagaaggaactttctaatctactagttgtctgacatagaaaactagggttgatttggctgaaggtctcaagtgaatgagtgagagcatcatgttcctttcatagtgtttcaactaggcttagggctgaattatatggattaaaaa

SEQ ID NO: 404094 - DNA, 578 bp, Cannabis indica
acatatcaacctttacaaatatacataggagatctttcaagatgatattaattgaaattggaattcaaataaaacttctttattgtaactatcatgattacatttttacatttttctaatcaatatagcatattaccaaaatttctttttttagaatcaattaattataattgattattttattaaaataattaattaaatatttaacaagacctcttttaaccattaataattataaataatttttaatataaattcctactataattattttaaccgttaaactatttaattataatatttactatgaaattttatctttttttttttacgaaaattagatttctttttatacaaattagaattctcttcttgtataataaatttttaaataattaattatttttaaatgatattaaattattttttataactagaagaactaagtatgagtttttctattcgaatttgaggttgcttcgttttctgagggagcttgactttgtttttaaatatggattgattttttgagtaaatgactccttataaaaaaaaatggaggagtttagccatttttt

SEQ ID NO: 404095 - DNA, 568 bp, Cannabis indica
agcatgagaattgccgacggttttaaactgtaggccattcccttttaaggcacatttaaaaattgtcgcatataccttctgacagtttaaaaccgtcaggaatatcctattttttccgacggttttaaacactcacttaatttttttagcgaacggtaccaaaaaaaaaagtgtttttaaaaccgtcacgaatactcttttttgtagtagtgctaaaaaataaactaaggaaaaaaaaattcttaggcctttcagcatcaatcgtccaagccttcgtgattaatcacctccatcaatcgttctatctactgtcgctggtaataattcagtttttcaattgtattcctgcttttctccaaactataaaaaaacgtaaaaatttatattagttaatttatatatatattattatttgttatattataataaatactataattaataattaaaacttacgctttttgattttgtatataatggttgggtttgcacgtgcgacaatatcagtcatatatttcaaaaacataaaaaccacatttcttggtttttaggttgtcttgaaaaattt

SEQ ID NO: 404096 - DNA, 564 bp, Cannabis indica
aattgtaactagtgaggtccacataagtgggcgacaactggagtgtatttttgtccattattttattcttttttaatccatataattaaatcttaaaccctagttaaaatactataaaaggaacatgatgctctcattatcatccaactcaactcacttcaaccaaaataaaccaagttttcattctctaataactagtagatgagaggttcctttctatagtgattttgaatccttattcattgttcttcattaattcgagccatagtgatagagtaccatacccacacatagcaagtcaaatacttaatcatagtgcggaagacggtggttaatcaaaccgaatgagagaaggagatctaggctcagatatagttattactttgtgatagaaaggaacaagggttagagatctgagcgaaaagagtcatattattcaactgccatcaatgtaaggttttctaaactcttgtgtgcttaattttattgttttagaaaatttatttttagtgtgaatgaaatatacatgctagtaaatctagatcctggtaaaataaattccaa

SEQ ID NO: 404097 - DNA, 502 bp, Cannabis indica
cctttatgcttgtaaaatccaaccattcaacttatctccatcaaagtagacatttttaatttcttgagccaattctcgtgtgtgaaatgtatgtcttgctggcccatgttgaaaaatccctgctccgaactctgattcaggaaaaaacctaccattggagtgattcatgtggttgttggtccctgttccaacattgtcccgctgtgttgtggtgccatgggggtcactaaacccttactttcctctttttccttactgtcagcaactccaataacgtcctcattggattcttggacaattcttgacttgaacctccaattgagttctttatttttcttgaagttctaagaagtaaaggtgttcacctaatctaatccgcactattgctcatagtgtatcagattcgcgctaagtgcagatttcattttttggatccaatccaattcgcacaatagctcaaatccaatccaatccgtaaaagtacgaattggatcagttattt

SEQ ID NO: 404098 - DNA, 901 bp, Cannabis indica
taaatagagtcaaagattaagaaactaagacaaatagaatattaattacaattaatggtaataaataaaagatttagacttctatatatttattaatatttataacactcccattagatgtacataataactgccttattaaaaaactcactgagaaaatccagtgggacaaaatttggtcaaggaaaaaagagtacaatatgaaattactccccatcattttggtattcatggagatcttttaatcgacacattgcaatcttgtgaaccatattctcgaaagttgatattagtaatgactttgtgaataagtctgcaagattatcacttaattgaatttgttgaacatcaatatcaccattctcttaaagattgtgtgtaaagaagaattttggtgaaacgtgtttagttatatctcctttaatgtatcctcctttaagttgggtggtacaagcaacattatctttgtagagaattgttggtattaattagatgttaattcacacgttccttgaatatgatgtgtcattgatcttaatcatacacattctcgacttgcctcgtgaattacaagtatctcagcatgatttgaggaagtagccactagagtttgttttgttgaccaccaggatatagcagtgtcactgtaagtgaataaatagttaatttgagatctagctttatgtggatctaatagatatcatgaatctatgtagctaataagttgcggaccacaatcatttgaatagaacaatcatttatcaataatactctagagatatcaaaatatgtgcttaatcccttttcaatgtttatatattggagcaaaactaaatcttgctaacaaattaacatagaaagttatatcaggtctgtacagttagcaagatacatcaatgct

SEQ ID NO: 404099 - DNA, 798 bp, Cannabis indica
gtagtcgcaccagaatcagactttggatgctaaataaaaaaaatattagctgatcagaagattaataatggtgagctagctcatattagtcattaatgagtttcaataataatcggatcatgaattcatgatcatctttgcaatgtgatcagttttgaatcttttccttcttatttctggtatcaacttgttaataatcttattaacattgttcgtagttgttttgtttgttaattaagcttattagatatcatgaacaggaacaagagtccagcaatgtttattttgggaaagtaattatcattattattatggagtgtattatattatatatcatctcttaatcttattagagtttttactttttttttttaccttaattatttccaaggagaggagttatatggatactcctactaataatactaataaaagtacacttcaaaattttaaacattatgttaattgactaaaataaagtatatttcaaagtcctaatgaaaaaaaaaatagagttcgtcaatggaacacattatattgtttatttatagagattttccgaaaccaattataaaataattaagtttaataaagaaagaagaaaaaaatcaaaattttacgtgattctcgcatcaatgagtcttattccacaagttagatttggaaaagcttcaaagtatctatatacaaatgttttttttttcttagaagatgaactctaattcttaggttgataaagctctcttctctttctttatataacaattacaataagtttagaaggctaaaataaagact

SEQ ID NO: 404100 - DNA, 562 bp, Cannabis indica
tgtcaaatcataaccgtcgatcataaccgttgattttcaatatgtatccgttaaatggtcagagtctatttagctatagctatgctatgcagtatgcacactcactcaatagtcaatcctaaattaatggtctccaaacaccaattaacataaaaaaaaatatatttttttgaatgaaaaatatatacaatagaacatctattcaagaatactctattcaaaaataacctctaatttgttataaaaaaatgaagttacaatttgggccagttataaataagaataacctctatattgtaataagttatacattttttaagtcccgtattaataaaatatacctctatataagaataattagatcttaaataaatatatacatatattttataaatttacttatgtaaaattaataattttatttcaaattatagtacatgtataaatattatatgtactcgaaaataattttaatataatatagtattaagaattgtttattggtatttttgttacattgatatttttttgatattttgattttttttcaagtgtaactcta

SEQ ID NO: 404101 - DNA, 1062 bp, Cannabis indica
atttgtttcagcagttttgtcatcggttttgatatgtattttgaacctatatattagagtgaaaaaagcagagaaaaaaattaaatataaaacaactttagagagaacacaaataacataataaattagtattttaagaaaattaaatataaatttcttacctcacaataggatattgagattcgtttttgcaagggtcacaccaataaataccacttttaggtacaacttttttcaagcaagatttgcatgaaatataaaaccatccaagtgtattatctatgcttataattttttctctcatagtaacaatatatttctacaataaaataattatcatagagtaaaattataggtattgaaacttttaaataatagtaataataataccaaaaaataaaaactttcacttgaatatcactccaattagcctctaataatttttgaatatacatcctgttgagaaacatatcttcttcaagagttgtcttcttaacattataactctcaataacttccacacttttggagttggcggaatttttttggattaatgatgctacataatccatttgaagattaatatagaatttagttgcacttgtagaagagaaattaatttcatctatttagaaaaaatttaaattaatatacacaaacatatattattgtattcaaatattgaatggtggaatctaaataaataattacctcaaaattttttaacggtagtagaagttactatcacaataaatggaccaccatctttcttatataaatttagatttgaacatctcactcaatttctcccataaggttatctttaatgtgatcgaactatacataaaaataaacagaatttaataataagtaaaaaagaaaaataaataaagtaaaattgtatataaaaaattataatacttactaatctattataattttgatgtctctttttttataacgacctctaacaatagcaatatcaccgaaaccacataaacatccaataatatctatatataatataaaataataaaaaagatagaatattataaagatgaa

SEQ ID NO: 404102 - DNA, 511 bp, Cannabis indica
gatgtctcgatagaaacttggtttgaatgatcccaatagtgatctgggacaattcttcctttcgagatcgaggatgtgtgtctggtgtcgatcgctgttcttatttacaaagacttcttcgaggcttacctcacttacttggttttgagccgaaatgaccgttgcacttagtttgtaccctaaggacttttgtgattgatatatgtcgctttcgtcttccaatgtgtactgtccttgatgtctcgcaattcgcattcagcgacatatggtttctcgctaatatgctaagtaccagtttgtatcttagttcctcgctttagacttttcagtctacaagttacaaatatactctgatactcacgtaattaatgagttattccatataaggcaattgcatcgattcatattcccattatcgtgacacgtgtcctccactgagatcgcaaccaaattttgggtataacaattgcccttaaaaagttctttttagtaaaaagagctttttaataat

SEQ ID NO: 404103 - DNA, 579 bp, Cannabis indica
tggcccacggactgaggcccgacccgtgggacaaaggtgaatcgtgtaaagaccgcatatgattaataccttgaattattaaataattaaggtttatgtatgagattttattattattaataataacacaattatgggaatttatttgagttcgtatatatttattatgctatctatgtgaatttctcaatttctgtgtttgtgttcggaagcggtggaaagcggcgttgggcctttagagagttatattttgtatttcttaaatattagtgggatgttatagttaaattttagaggcgttagaattctcggggttgttatttgaccaaattacccttaggagtttataactaaattatttaacttgaaggggcaaggaggtcttttggcaatggttattttgtcttgttgtgggaattttgttagctgaagttagcttaattactaagaaaagggggttttatccttttattacaatattaaaagaaattcatctttatttcatcaatcttcttctctctctctttttcgaaaccacaagaacctatcctaggtttgattttgcttgctgaatctttg

SEQ ID NO: 404104 - DNA, 808 bp, Cannabis indica
ataagtaagatttgatattaaataagttacaccaacaacaatattacatctataggggtgtttatttgatcgcatccaatggattggacccaactgatccaatccaatcgaattgagtcgtccgatctgatctgatctaatggatgtattagattggatatgttccaactattagatgcattaactagttttctattgaattagattgtttccatccaatttattttagctaccatttgatttgatttcattaaaaaatatatataaaaaaacataatttaaaatataataatccaacatacataataaacattagtttagtccaacctaattctcatgatcccataataaaaccgccaaaaataaaacttattcaatacgcattgacgattttattagggtttaggaagatgagaattgatattctagatttaagattttttttctttaatctcttgtgttaaaatatattaaatcaattaatatattttttaaaataaaatgtattaaatatataaaattataaatatattttaaaaatatataaatataattggatcagttcggttcagttctccattggatcggatgtcccatccaacaaccgatccgatcaaactgaatttttaaaatttacatccgatctgatccaattatgattagatatctaattctattagattggatcgattgggattgaatcaatcggtcgtaattagatcggatgactttttgcatactcctaagtaccctttagaatttttcgttgcaaaagttacatatcgaactctaataagaatatgtattt

SEQ ID NO: 404105 - DNA, 551 bp, Cannabis indica
gagagagagagttgaagagagaggaaaagtgttttatgtgattttcttaatttcttatttctttgtaaaataaattgatataattggttttatctaaataaaactagccattaagatcaagtttattaatcaattaaactctcactaaatgaaaaaatcccattagacaaaaagaccataatgcccttgcccatagtaaaagtcataaaatcacttaggggtattttggtcaattctaaaatctcgactaatccctacatttccaatatctaactatattgccccgctatactaaaaatattaagatgtgattctaatagccaaacgccgcattataatgttgccgggcacaaaacatgcaaaattatgaaattccatttatgacatataaaatacattttgaattcaaataaaatctccgcaaaaatgataattcataaataattaaaccttatttatctgctaatttctaaattaaagttaagcagtctttacatgtatagcactctctctctctctctctctctctctctctctctctctactctact

SEQ ID NO: 404106 - DNA, 520 bp, Cannabis indica
tggaaaactcgttggtgtcagaaaagataccggaaaagttagtgtcacaagaaaagtcatcggaaaagtcattgtcgccagaaaagtcatcgtcaccgaaaaaagtcactgaaaaagtcaccagaagtaaatgtcttggatataaacaaaaaatactggttctataacataatgaataaaaacaaataatttaaaccggttataacagaattataactagttttgtaacataatgaataaaaacaaataacacaaaataactcaaatcagttataattaaaatagttacagttctataacagtgttataatgaataaaaacaaataacacgaaataactcaaagcggttataactaaaatagaactagttatatagcataatgattacaaacaataactcaaaccgattacaattaaaaaataaagaataaattagttcctaaaatactgaaacataaataaaaaacaaaactagttccataacaaaatacctcatcaaaccgattataatttcttttaa

SEQ ID NO: 404107 - DNA, 511 bp, Cannabis indica
ctttaaaatttgtcaaatgagtagctcatttcttagcaagatctttgtgttatttctgatcgtgtttattgagtgagtaatgctttctcgaagttcatttttgtaatagtaaacaatttattgatttaataaaaattctttcttttgtcaaaaaaaaaaatattttctcattaaaaattattattatttttgttttagcttagtagtttcattcaaggaggatgtgattgtatttgaccgttgttttttatttaaaaggtgagtgacagctcacttactccttttttgaccgttttgttttttttttaaacttaaattgacaacggtcaaaaaaacggtggtcggcaatgttggatttcgatttccccccaaaacccaattctccttcctttctcttcaccatcttattattcctccgccaattaacgattccatcaattcaaccataacccaaaccctagctgaccttaatcattgaagaatcaagtgctctttctgttctctctctctc

SEQ ID NO: 404108 - DNA, 874 bp, Cannabis indica
aatattttttttcaaaattcttttcatgatgatgttcgttatagttattgttagaattttatgtcttaaataaaacttaatttcattataatcttatttatttttaataaagatctgaaatcatatcttgattttgttatatgttttgttcacatgtttattatgtgattataagttttattaaatcccaaacatatagttattcacaattacagtaatgtcatcacggtggaaagtaattataattatatgcttcaaattatttagtctcgcaatttatctgtgcactaaatttacactgacgtgaaaatagtgatgaggtttaattgcttacacttagataagtggaatgtcttttccagagctttagtaaagtaaatcaggatcagttgtatgggctatacattggactagaccaacattgacaaaagaaaagatatcataaacttactgttatatcttttctaagtcaatgttacttagttgatcatggatcatttgatctcaatcttgagataattgagttctagtttaattgtattacacaggttttttgacttgttcgttactagcttacctgtagaaatagcacatacttacatcttaggaactcggtagtgcaattgagtaagagtattgtaaatcatagatgtggatatttatagcttccataactatttaaaagtgaaacgaaggtttccttttagcttagctaaaggcgttaaatggttgaacgctccttttagtaattatattagtttctcgaaatgtcatttgtaagtaactaaggaggcgtttggttgggaggaatgaaatataggaatgggaatgggaataggaataagaataggaatggaatgaaataaaatttaaa

SEQ ID NO: 404109 - DNA, 781 bp, Cannabis indica
ataaaccttacgagcgatcctaggggtcctccacaggctaacgaggaatcaaagaggaaagttggcgtggtttcaggttaatctaggaagaaagttggcatggtttttatcaaataatcccaccaacccaaggcccaaacctgcactagaagacctttgtgccaacctctttctggtatcgagaaatttcatgaggctggaaatgaggtctcagttgcaggaaatgggatcctctgatgtggagaatgaggtcaatgcaaaggtcgagaccttctacatgtagacggtctttttctgagctatatgaagacgggctttctccgagctatatgaagacggtctttctcgagtttacggatccctcattcttttgttttaggaagatgactttaatggtttgcccctatggcattttggtaaagataagtttgtagcccttcttggggtttttttttatcttaaatgccttgtactcttttcatttgaacttaatacaactgtgtttgcttgcatttttattcacaatgtaaacaactatattttgatcaaatgtaaagtattttggggttcttccattgcttgtaatcttcctgtttaagtagttagttatctaccaaactttctgatttttgtagctgttgtcaattttgcctcgctctggcagttataatctgccttaagcaaacttgaatatcttttaatgattttatcactttgtatatttttaatttgtctcatatgaatagtttagattgtctatccattttctaggttcaagtgc

SEQ ID NO: 404110 - DNA, 555 bp, Cannabis indica
caaccttatcccatgaaagttggaaaataacttttctcacttcatcaacagtaaaatcttgagcaaaaaactcaatttattggtcctcaaggcgaggccccaaagaagcaaaaattgaagcagcaacttcaatatcacttccctaagaggagaaaaggtcagaaaaataagaggttatcaaatgtgcaataccatcctgggtagttgataacagtttcatcctcaatttttaaaatacttaatatgattggactttgtacgagaagagacatatttataaaagaatttagtatttttatcaccgcatttgtttgctatatatatgaattatttttttaatggtaatttttaaaaaataactataattaaatgttaattttaaaaatattaatttatatatacatatagggcccgtttggtacgcaggactggattggattagacaggctaatttgtccaatccagtgtttgggcatgttagaagtctggataactaatccagttaacctcatctgtctggtattatttatcccatccagcagggtgggataaata

SEQ ID NO: 404111 - DNA, 507 bp, Cannabis indica
aataatttgttttgtttttggaatttaatatacttgtcgtattattaatttttactttatttatttgttttcttgtgttaaaatgtggaggagttgttgtattattaattcttcaacaagtgtagctattttttttttcttgaaaaatttttcaacttattttacgttttactttttaaatatttaaataaaaaaattaaatagttaagtgtatttaaattatgaaattatatgtgtataattttaaattatacaaagttttgctataaaaatttaaataatttaagtgcaaaaaaataaattactaaaagatccttatatagtaataaattgtaaaaaattaattaataattataattaatttaatattaaaatataattaatcttaattaaagttttataagaaaataaattatcaagttactttcaggttacaagttatttattatttatttttatttaatttctaaattaattacaaccatttaatagtaatccaatggctta

SEQ ID NO: 404112 - DNA, 527 bp, Cannabis indica
aatttattttataatttaacaaaatcgaagtacaatcaataacttttgtgaaattcatgtcaaaatagtattaactgtaattaatataatgttgtttaatatatgtttaattaaataagattcaaatattttattacactattttttatgtatatatatatttgtaaattaaattatttaaattttatttttaatactataaatcattcaaaatattttaaaaatttacctaatatctttaatagttatatatattaaacacaatcgtatttaaaaaaaatttgattatatcaaattttggttacgtacgtactatgtatacatattttcaagaaaattgtcgtttttatataacattgtcgtttttcaataatattgtcgttgctcatgaatgctgttgtattataattaaagaatatttctaataaagatgtcctattaaaataataaatgaacaaaaattcttgactcagccactagtaattaaataaaaattgtggtggatccaaattaaaaaaaaaaaaaaa

SEQ ID NO: 404113 - DNA, 633 bp, Cannabis indica
aaaaaaaaataataaataaattccctttttcaaattttacaatttatctcaactatttatttaaatacaattttttttattttaataattataaaaaaaaattaaatatatgtattaattagacccacaaagtgtcttaattaacaaataaatttttatttctcttttcttctcaaatttgctaaaacttaatgaaaattttgaaataagacatactctattttatcattctaattgacttaattattaaatcaactaattgagtctacaaggtattattatcccagataatgtggggacaatgggcctataaattcaagctcacaataagtaattctaaaatttactaagtaaattaattccctgacttattaatttcttctgactctactatagatttagaatcacattcttaattaaatagagcgctctatatatccaatacaaacacactatatatgaattatctattgtttcaatctaaataattaaagatcctctatgtataatttacattgagtaggaaataattttatgttttatccttcgatgtatcttatccttaaaacacttagctacttataaatgatatttcagtaaactaatataattaccgaaataagagctcttcca

SEQ ID NO: 404114 - DNA, 968 bp, Cannabis indica
attatacatgatcgatgctagctagcaaggtcaatagatacactatatgatataatcatttagtaatttgattatatacattattaactttatgatatctttagaactatattatggttgactatgggaaaattttatggtgcatccggaaactagttacttttctttttatattataatatacattgtattatttggtatattatgtaaaaaaatttatattttaaataactacaatatatatatcatataaaagaattaaattataattgtttaggtgggtgtgtgttagaagtcatagttcgagttcccgtgaaacatgattgtaatatataaacgtttaaataaaaaaaatatatattaaaaatacaaaaatagtgcattaggacacccgattttgacttttgaggaatcacattagaaataccatatattttatatatataattatacatcttcagagtggaattaaattaacttgagtaaatatttccaataataataataagctctacaaaaaaaaaaaaggcaggtaagaattgacgtttatcaactaaaaagtctgtttttttttttttggtttaccaaatgtgaaaaagaaaaagtatatctatatgatgattaagtgcttgcttatattacaaaaatgactcaatgcgtggaggagacaaatgagaaggaatggcttgaaaagcctttttccttttattacaatttcttagccatttatataaaccatacaaatatatataatatacatgtaaactgaatgcatccactaccgtaaagggtcccatatcaattatatatgagttgcattaggtttcgagaaagaaaagagtaaaaatctggtttaattagagaaaaagagaaaagtactgggagagaaacatgatgcccacatttttttttgtttgttttgtttttctttcgagaaagaatctttttaatcaaaaaagaaaagaaaa

SEQ ID NO: 404115 - DNA, 511 bp, Cannabis indica
attttcctaacctttatccaactaaagaaaattagagaaattagaagaaaaaatgaaaggaaaccctctctttcctttctttctcttcgaaccagccaagaccaagggaattaattgctggagtttgtgttttcaacaagggttggaggaggattcaatcaaggtaaaccctagttactctctagttatgtttttctcaagattttagttggtttcaagtagtgattttgagttataggggctgttagagttaggttaggttgtaattcgaattctaagtttgatttgagttatatttagcttctagcagctgattttgatgtacggatttggttttgtgcaactttgagctttggtctttaatagcttaaattgatctagtgtgtttttctgtgaatttctggttggagtatattgtgcataccctaattaggtactctggaaggtttggttgcatttggtggagttttgaccaagaggtggggtttttgggtgaactggtgtaaactgg

SEQ ID NO: 404116 - DNA, 498 bp, Cannabis indica
gttgaatatttctcatttttattttgagggggtacgatttgataattattaatgtttaagagacaaagttgctaatttaataaaaaaaaaaaaataaataaataaaaaaaaaaaaaaaaattgctaatttataaagacatatcagcatttaaacagaataatgagacggaacctgacagaaggactaaatttctataaatgtaaaagttcaaggagaatttttaacaatctgtatattttaggaggcaaaattactaattattcttttttttaatcttaaataatttataatctttaaaatgttttttataatattttaataattaataggattttttttatttttacatttcaaaataattttttttgatttttacgaaaatccacaaaaacccccattgcaactaacaggataacccaaatcgcaactaaaaatcatatagcaacctacatggaaaccagcagaacaaccctaacaataaatttaaaaaaaaaaaa

SEQ ID NO: 404117 - DNA, 729 bp, Cannabis indica
ccttcaacacgccaaggtcttcttcacgtaccacaaggacgggttgaatgttggggacttggtcacgactgcaaactgcaagaaggccaagttgatctcagagagccagtcagtggatgactttattatccaaggtctttgcccaacgttcgcaatcctcctgaatccgagaaggcactttgggcggacatcattgcctcctcggaggatcgatataagaagtacctcttcaagaaggaacaagaattggcctacatcaaggcccaagtcgccgctgagagggtccttcagatcgaggctggaaaagagcaggtgacctcccggcccaggcttccgttctcggtccccaacactagggctcctaatgccagtatttccagagctggtaagtctctgttgattgttcatcatgttccttctgttcaggattactctacctgtaggctggtggaatttaatgaccggctttataggtttaggatgcccccttttcgatggggcgatcctgccaagagtttttatttttcaaaccttagtcattttttaggccggtcctggatggggtctggtcctcccgtacctatccctttggatcattctgcctatttatcttccaattggttcctcccctcagacatctttctaggggatgacgacaccagccttttaatacatatttttgctaaggcagaattagatcaccagagtaggattagtttcattacatta

SEQ ID NO: 404118 - DNA, 692 bp, Cannabis indica
aaagaaagaagtagatatatcatacgaatataagaaaataaaaatgtcatgataatatggaccaatttgactaactgtaattcttttcctcttttacataaaattaatgtcaaagatgtattcgttaattttaaagttactcagtacaaaaagacactaccttaaacacatgtttaaacatctcacacgatgtctagcacacaaaaaaatctacagttgactgatacccaatcatctaagataaccaagctatttaagcaaaattgattggaaggagaaaaaatctaccaaatcaatagttataaaaatagttctactgctttcagccaaaaaaaaaaaaaaagaagaaagttctacaattcattatattgaaaagatccaagtataatatgattacatatgtttttaagtacgtgttttataatttaataattaacaactaaaatacggttgaaaaacctgtatgttttatctaaattggtctattataattacttaagtagtcatatttggattgtattgtattttttcattttatcctcaaaaactagtttcttgcaaagaagactcattggagatggatgaatttgttatattgcagtgatcttatggtatgatacactgctacagtatgcatttctttcttgttcttcaattttttgttaaatttatagtttggttgctcgaaaatg

SEQ ID NO: 404119 - DNA, 594 bp, Cannabis indica
tgattaatattttaaaagttatttgtcagtgaaatactttgtgtgctcaatgatatgagatgatacaagagatatgtgctattgtgtgatgggcattatattttagagtggctagtaaaaataattaaatagtaaaattatgaaatctcattatttattatttaacgataatggtgtttttataaatattattattatgttattctttttatttgacaattcgcctttagaaaaaaaaaataagttccaccgactttcttaagtcggtaagcttccccacattgtttagatatttaatagagagtcattagactatcttgctcgatatcatgaagtagtccctctctcttcaaaataacacaacaagaaacctttagttaaggaacactagagtccggtgttcaaggagattaataggtaaaattcccattcaatagtataagattatattttcttgtgatattctttgagttatatataaatgattgtttgaattatacctcggtatgattgctatgcttgctttctttagttggaataattgttttgaaatgatatatgaattagacacttgggaacaaccttaatgcttac

SEQ ID NO: 404120 - DNA, 804 bp, Cannabis indica
tgtttgaaccttgtaaatttgattgttttctgatctttctctcccatttctatttgatttcatttgcttgattacaactgttagatttcagttcttgttgctgatttcactactggtttattgcacattgttcacagtagttttgttcaatattcaattgttcgtttctgttcttgtttaacttctttgtattgtgttgtttgcgaggtgattgatcatgcattgatcacatcataatacttattaactttttctcgtattacattttactgattaattttattttctaaaagattcttacaacaatttaccctaagatcttgattaaccaaccaagattcaaatctaagtccacttaaattcgaagaaaagctcctcttgcttctattgagctgaaatcccttcaactatgactctaaactcccttcagatgaaacagcttccattatcacttcatcacagaagtttgcactcttcaacatgggaggaaccgacaagaaacaaagaagaagaagaaaaagatttctgcccttgcagagaaaaacctctgtcaaagaatcaaaatgagtgggacttagttagaatattcaagaatcaacaatgtatatcaccaactcacacaaaaccgactttgatagatcactaataactcattgacaattgtccaaaatattttaacatgaaaatattgatctatcaaagctaacccataaaccagtagcagacatactcagatggaactattgactgtctagatggcagaaaactcataatttgacaaacacaaaaacatggttcttacaa

SEQ ID NO: 404121 - DNA, 725 bp, Cannabis indica
ggtatccaacacaactctacgtatattgatactactatttcaatgtaatctaacaggcttcataaacatgcacactaaacatgtaatcacatatgcatatcattatattaatcttaccttgtttctgaatgtaggtgtactggtcaacctgagtggaactgctgctcgacgattaacaggcctttaagtcacaatattcgtaaaattggtgagtgacatgccacatcacttttcagggacttaaaatcaaaactaaaagtttctctgtcgatggataacatggcaataccttaaatatcgtaacaatgagaaaatctagggtgccctaaactgccccatcgcggagaccggttcccaactagaaaatcaattcaatggggtttgcttggggatgaagcgaaattttggttcctacaggtttatactgaaccggtcgaccgtttcaatacaagaatccccaaaaaccacaaaaacacctcaattcgaccccaaattgaacgtaactttctagatcacctattcaagccataatgaacataaaacatgaaaaagaactgaattaaaattcccataatcaaaaatcaccatgagatagcaaagtttgagctctaaagttcaaactttactcaaacacaacaacaacactcaatttagttctaaatcagctcaataacatcaaaacaacatctaaaaacaaaatcaaacatcctttaaaactacaaaac

SEQ ID NO: 404122 - DNA, 576 bp, Cannabis indica
ctttttcttcctctttcgaatcactctacaaccagccaagattttgttattctcaactaaaatcaagggattcttagtagggttgaagctgaaaccaaggtatggggttttgatcttattctctcttagttttctcaattcaagtttgatgttcatgtgtgaattttgggaaattggtagctgtttgctttggaattatttgggatagttttctggtgttaaatagagattgttgttattattttaagctaagaaaggtgggttttttaatgcttgagtcaaaatagagtttatgagctcaagttggagctctaatggtgattttgtttcatgagcggtttgttgagttttctggcttggaactggtttattatagtgcatacaggtgttctggaagttataggaaagtttgggcttgaattgatttaaggggatcgaatttttgttcccagctcagaaccggtcgaccggttctgggaagcctctagcaaccggtcgaccggttggtacccaggaactggggttccggttgggaaccggtctgccggttggggctttttcccgagccctagtttt

SEQ ID NO: 404123 - DNA, 497 bp, Cannabis indica
tcagtctttattgcttgtttttttttgtgcttcggcggcataatttctatttttctaatttttttctatctctatctttaccgccttctttttctccctctcaatttttttgtgaggtgtcatccaatttaattaattttctttattatttttttgttttaatattttcaagatgagcaataattatatgcacaggtacactgaactattaaatacttatatagcaaggttttttctttcttaatacaaggaaggttttctatttcaaatatttatatttaattaagcgtaaatattattttggaccctctgttctaccaaagttactaattagattctgtattttattaaatgacaaaatggaccttatattttctaaaatagtacaaataagaccctgaattgatttttttatcaaaataaagtttaattataatctgatctaaaagtgttatatgacaaaactgtttatattttttgtatctgttcgtattaag

SEQ ID NO: 404124 - DNA, 950 bp, Cannabis indica
agttttaggttagtttttagtttttggtttagttttaattttaagtttttagtttatttattctaatttagtagttaagtagtacgttccggtttactttagttttttttttttttttttttgtttattatctgagactatttactttttcagttgacgtttttcggtgacgatgactttttcggcgacgatgacttttctggtcaatttttttcggtgtcgtcttaacttttttggcaacttttctgacgccaatgaattttttggcgaaacttattattgttttacaaatatgagatttctatttttttcttacaaaaatatggcataaaaatcccatataaatgtaagaaaataaaaaaaaaatccataaccccatagcattatttaattatgtgataactcaaaagtaaagggatttttacactaggtaccaaatttaattacttttttacatttttaatgcttatcaatttattaaacatttttacaaaactacttttacttttttaaatctcaaaaagtattataattacaaaaatactacattcaccatttagtttctctcattttcgttcttcttctttgtctccgactattgatgaagggtggtggttcggcaactgagtttgcaagtcggagaagtcgagctctaatcgccgcttccaactacacaaagccaactcgttcatggagtccttccctcaagaacacattgcaccgactccgttgtcgcaactcactcaccccatcactcgttgcccgagtcatcgacccctttcttcttcctcaccactcacttgcacttggattcttcaactgggcagcccaacaaccaggtttcagtcacactttcataacttaccaatcaatcctcaaatctctttcttgttcccccaaattcaatgccattgatgctctcctcaagcaagtgaaaactcaaaaagtta

SEQ ID NO: 404125 - DNA, 584 bp, Cannabis indica
gtttgggtcgtcatcttgcatactatttgtcttgtttttgagcttcttgactttcatgccttatgtttctgatgtctgttttctaaccatgttgtttttcgttctgtacaaacatgtctcggcagatgtttcagggtctgaagaagagaatgggcggaagctctagtgcctctcctccggccaagaagtctaagggcggtgaggggtcctcttctaaggaaaagaggcctgctggggaggtcattgatctttccgaggagctaactgctgtaaacccctctacccccaaagctgctaagtccaaggagtctcagggaggaagcttggacaggtctagaccaccaaaagttgggtctgaactggtcaggagtgatcctgaacgggtgcgagcacctactccacatttgccggtgcttccagaggccaagaagggcaaggagatactggcccattacatgaaccggctggttcctgaggtcagtgagcaactggcttgaggagctttcggccgaggtggcaaggttgaaagagaaggtcaatgccttaaaaatagccagtcttgagctcttctttgacttttggaa

SEQ ID NO: 404126 - DNA, 1618 bp, Cannabis indica
acaaaggctttgccacaagaatagaggacacgctatgaggttctgaccaggctgcttctcgcaacaattggcatttgccttcagagatttcttgcaagaaacgcctgtagcagctagcaatatcttcctggtgggttctcactacgtgttccttaatcgtagcatcgttcaattctagtttggaagtggattttgaatggttgggtttatacgggatggctgattctgtaggaaactcaaaatttaaaacttttggacgataaattcctgaaccagagtgggacatagctgcaggcaaaaagcaatcccaatccctagagagaattttatcaaacccgaaggtgatgagttggatattatgaaacaacctacatattgcttgagccctagtatggacataaatacaatttaaccctaaaaacttccaaaatcaaatgagatgaaaatgatacaaacaaactaagtagaaatttaacgcaatatagcaagcatgtgaaggaagaaagcattttactgtctggagttagggcttggggcaatgacttgtcactccgtctgcaaatcttcgaacatagaaaggagcgctttgagaagatgaagtcggaggaaactcgtagaaaaaaatgtcaaggacagagatggcatgcaagtcctcagacaaactcaatggtgattcttggcaaaaaagcttaagagtgttccaaactttctaaaatggaggaaataatgcaaaggtggttccttttcccttactttatactcatgatattggcttcgtcagatcagagaaatgtttgatcctacgaatataattcaaaaccaaagtggaaaagatggtcctttaatgctgatgtacctcgaaaccgcacaactgccaaaatcagaggacatgtgtcttttcaaaaaaagaggatgatcatgacgaaaataccctttataatcattaaaaaactctttttattaaaaaagaactttttaaggggtaattattatacccgaaattcggcgagcacattagaagagtacacgcgtcgagctcggaaggatgaagaactcaaacacgcgatcgtaattacacttgacgtggaataactcgttaaaagcataattaacagagtatgtttataactcggctgactgaacagtcttatgcgagataaaaatgtactaactgttgacttgtgtctcgatgagaaaccatgcaactgtaagtatgcaagacgaggcattaacctcgtcgcgtggaggagatataatgacaataaaaatacttagcgtataattcacggtacataaactaagtataagcagatgggtggatcaaagtgatagatagcgaggcgtccatctctctgtaagagggcatgcacacgagaaagatcatctcgacacccgaaactgtagttgtcaaaattaaagtaaaagcaatatcaacctcgggaagacatatgacaagctccagcttgccatcgaggttaactcagctccattcccagcgaggcatcccaatgagataaggcttaccatatatctttaatacgcattcattttggcccaataaaagcgggatatttacagctgtctcgcacataaataaaaaccgcatttacttagcgtg

SEQ ID NO: 404127 - DNA, 636 bp, Cannabis indica
ttgtatatagaataacctacaagctactttccgttggcttaatggttatgtacttgtgtgggaaaatgtggtttaggttttaagtactgtaaaatgtaaggccattaaaaatttgaggcaaagtaaaaagtcagtggaaaaataaaatcaaaatcactgaatgtaaccataaggatctgaaagatatcttacctttgagtttggttcttacagatttcttgaaacgggtggtgatgatctgcgatggtaactggagacaggtggtgacgatctgcgatggtaattggccaggggcagtgacgatcagcggtggtaatactcaaggggtggcggtcggactggtagaggcgagatggtcttggtgttgagggagaagaaagagagttctctggacacatgaaaataacatagggtagaaagttagggtttgttctccaagaaaatgagaatgcggtagaaaattagggtttattatctaaggatataattgtaatttcatcatcaaatttttaaataaatggacattttcttaattttttataaaaaatgacatttattaactttattgttagatttagggccattttgcatcttgccccgagaaaaatatcccaaaaaagttgacaatcaacatgc

SEQ ID NO: 404128 - DNA, 525 bp, Cannabis indica
tatctgcattaaacaatgcattttgaaatttagtgggaatcgattaataaatattttgaaaattattctaatttaagttgttctgaaataaaaatttccagtttaaatttaaatttaatcttcatctaattaaatatcacgaaaataactattatttaagtttctagaacaaaatcaacttaaatatttaattttctatttaattagatatattggatattagaaacaaataattaagtatctagaatagaatcaacttaattattaattctaatttaatactagaaaaaatattataattaaagttgatctaaaattaatttattaatttattttcaacttaaatatacttttctaattaagtattagaaaatataaccaattactagaaataactacctagaatatatctcattaaactaagtgtttttctaaaattaattttaaaataatcttatgaaaataaatattttatattttaaaactaattatgttgctagattcaattttaattaggttagacta

SEQ ID NO: 404129 - DNA, 548 bp, Cannabis indica
agttcagatcatctggtatgtcgttgttgcctgaatctaagtatgtcaccgtctgcgtacttggttggatgagtacaagcatccagtgaaacatcttttttgcacaaataaatatgtgtaagactgttaatacatacataataataataaattttatgaagagttatactgaaattatttattttaaatctacatatactgattattatatagggcaataagccattttgtgtgaattagtcatcctagtcattcgagtgacaagtgcttgacaacgattactatcagcctctgcatcggtggcaatcccacctggattcaaaaatttatatactcgatttagcccaccaatgtccaacagtctttctttcatgtacctgataaaaaacatcacaattaataactgtcgctgtcaaaagaacaatatcaagtttattattaagagttagaaattatacttgcaccaaactcctattggttgggctctgaaatattgcatggtgcacaattcctgaatgtcacttttaacaagccaaatagagtcatct

SEQ ID NO: 404130 - DNA, 1053 bp, Cannabis indica
gatctcacattagcttccaaagcatcatctatatgtttatcaaattaaaaaatttattaatatttctccaattttattatcaccaaataattttgaatcttaaataatcaaagtagtaaagaaaatcgatgaaaaatttgttaaactttaatataattttgggctaatctcaatgaggagacaacgttaaaattatgaataaaaataatcacattttttgtaagtggtgatgtgagtttgatatttcagttttgttgagaggagttataatttgttgtcacttgtaactcttgtgttgatcacacataattagtgtaataaaaggtttgttacacaatttgatttaaggaattcaagactacaatgatatagttattacaaaatggattaatatttatttatgtgcgagaaatgaactgcggtgtgtctgaattctaagtgtgatcacctaaacattataaaaagaggtttttggtgctcatttatataaaccaagtttctatcaacaaattaagtactttgttaaaatcctaaaaggcttgataattctcaaaactattttcgtgagagttctcttagtgcttagagatagagaaaataagtttttagacaaatgtttaatatcttgttcaaatcatggtaatctctactaatctacactcaaagttataagagagtgtatatatacatatcttcttcttcttcaaattatattatatatgttgtatattatgtgtgttgcgatttatctcttgtactttttttatatttaatatactatatatatattgtatacatgtattgtaatatttattataataagtctcttattttaattctttcttattaattttactaattgagttgtaatttattttgaattatcaatccattgatatataaaatctctaatatataaatcgaacatgactcatattgttaaacgggtcatattggatccatatggaaagagaaatttgaaaaactatactttaaaaaccttaatattttattcttaaacctatacatttcaaactaaaaatatatgacact

SEQ ID NO: 404131 - DNA, 808 bp, Cannabis indica
atttgtttgtcatttgattaagaatattttatatataatatttagatataagtatcacgaaaactaataagtaagatgaaaagaagcattaaattcgaatacatacttatttactcactattgtaacctacccagggcgggcttttatagtgtgcaagttgggttactgtacagggctcctaaaaaaataaaggatccaatacatttttttaatgccttttaattgttttttaatgaactcaacttttcaaggggctaacaacttgttattggatacttccattctaattaccaaagttcattttcaattctattattattttaagcaaaaaaaaaatgttatttattacttttttcaaacatttcatattccttttttctattaatttttgttgtattggaatcaataacaagtttaataaaataattggagtttttggtgttttataaaatatataaccgtatgataatatttaaaaatattttttataagggtctaattttaaaaattagaacagagcttctaaaatatttaaaatgaccctgaacctacctacaacatataataagatgattgttgaaattattttaccaaaatcttagatttactaataagtatgttatttaacatcctaaatatgaacttctaaaacgacatgaaataaacacatataaagtataagaaaccttacagtggttgcagcggaatataatgtcttccactcagatctctaacccttgtatcatttctgtagcagagtatcaccaagatttgagtccgaatctccttctcttgaaactggattct

SEQ ID NO: 404132 - DNA, 711 bp, Cannabis indica
tgagttgttgtttgatactttgctacaacaatatcaagaaagaaaccaaagacaattcttactgatcaagatgctgcgatcgctgaagcactaggttctaaatagccacaaacatatcatcgcttgtgcatttggcacatatattaaaattcagcaaagaatcttagtattgtatttgaacaaattcgagaattttcaaaagaatttagtaactgcaaatataattatgatgaagaaagtgaatttcttgaggcttggaataagatgctaaagaaatatagtcttgaagaaaataaatggttgaaaaagatgtacaattttaagagaaaaatgggctttggtgtatggtagatagacattttgtgcggatatgacaactagccagagaaatgagagtatgaacaatgcaataaaaggttatgtttatgtaagctacaaacatgatcttttacgattttttgagaactttgaatgattgcttgagagttttcgctatgaagagttgcaagctgattttagagcaacgcaaactaaaatgaaattatcatttgaagttgaaattttaaagcacggggcaagcttatagacaccatcaatgacaaatatgtttcaaactcaagtatgtaagagttatgattgtgcaatgactatgtggtgagaatgagacattttcaaagtacaaagttgtccttattggaaattattttacca

SEQ ID NO: 404133 - DNA, 676 bp, Cannabis indica
acataacattatcattatcattataatagatcttaacaactcacagtactttaaaatttataatttactaaacactcaactcagctttttttcacagttttgctacagctgctttttctcacagcacagctacaactgctttttcccacagcacagctgtgccaaactggccctaagacgcttgttttgtggaatatcgtgaaccaacgtcatatttttggctttaatcatatttatttttgagtcagattgtttgaacactttcataaaaactaacaattatgtcactttagtataacttctttttttttttttttttttttatttttttttttattactggcttcaaaaaccagagaaaaacaacaaaaatggggaagagacaacaaccaaaaaaaactaattagcatctagctagacaactacaccagatcaaactaaaacttaaaaggaaacacaacaaagtttaacaatccaacaaagaaaataacacttaaacaacaaactagccctaccgaggcttaccaatacagccatctgcaatccacgattgcaaggaaccatcaaaattggacaaattaaagacaccaaattggttatttcaatttgcccatcgagccatagtatgggcctgttgggttttgtgccctaaatttcttgattataaattctatta

SEQ ID NO: 404134 - DNA, 669 bp, Cannabis indica
ataggcaacaactcagtttgaaagtagggtaaaataaagacgctcttgcaaactcatgaacgactctattagctgaccgcttaataaaacactcaatttatcgttctgttaattgatcaataaagtgtcacatgtgaatattatattgactaaactaataattcttttaaaaaaaaataattttaaaaaaaaaaaaataattaaaataaattcatattattaaaaaaaaaaccactatatacatattacatgaaataaaaattaatttttccatcttcttccagccatattatcttttacagattaacaataaactttctttttaaggagattaacaataatctttgattctcaattcaaatgctatttttcaattctattttcatatattcaaaattctcattctataaactttctactaatgtttttcgatcaatgaaacgaaaaggtaaactttaattcccgtttgaaaaattaaactttcaatctcaataatcaatagaaacaacatcaaatttcaagttctcaaaatctataaaaataaataaataaataaataaataaaaatagattcataaacacaaactcaaacattagaaccccagtaaaacactaaaactcaaacataaaaaacgcacacaataaaatttgaacccagaacttaagaca

SEQ ID NO: 404135 - DNA, 809 bp, Cannabis indica
attaattaaacaaagcaaaaattcttgcaattcattcattatttccacaaaagattacaccttcagctcttttcataacacaatccacaaaatcctcaaaaccattactaatctgtgaaaccccttttctgtatttgtaataataatgtcataatatataaaattaattacattacaaaggtctaaacccctcaaattgtctttattgataaacaaaaaagtatctttaatttaaataaacaaaaaaacctggaaattatttgagtttcaggggaaaaagctagggctacttttgtgattgctgttgaagcttgggatcctggggtaaaaccactggtttgttctgaaattcacgccatttgttgatgccaatcacacaaatgactgaatcaaatagattcaaactcaaattagatcataaattggtattatatatatgaacatatgtatatatatatatatagagagagagagagagagagagagagattacaaggcggcaccgacgaagtagacgaggcgggtaaccttagggccagggggacctgctaattcttctccattcaaattcatggcttcttcttcttcttcttcttcttcttccctaatgagtagtatcacagtgagctttgagaatttagttttgacttttgaccatttttttattggaatttattttgaaaaattgcactttagatttttaaagggtaaataccattttggaccttctgttttacaaaagttaccaattggaccctatgttttgttaaatgacaaaatagaccctgtattttctaaaatagtacaaa

SEQ ID NO: 404136 - DNA, 743 bp, Cannabis indica
aaaaaaaatgaaaaaagaaatatttgatgactagataattttttttttgatacctttgactagatttttgtggaaattttttttttcttaaagaaatacgaaattcattaagaaaaattcgttgttacaaaagaactcaaaaatcaaggacaagcatctgtccaaacacaatctcctaacctaataacagagtttgccaatgtatgggcaacattattcgatgatcgcgaaatggcactgcaagaaccaccaccaacaacagctaataatgaatagatatctaataaaatatactgaaaaataaaattaatgtaaagcatattcatccaaccaattgccacagtggaatcactattaataatggagatattgaagccaaactgatgcgcaagaaccaggcccagaagaatggcaagcagctccgccacattagcagagaaatcacctagcacatctaatgaccacaccaaccaaaccacaccctctgcatcccgtatcactcaccccaatcaaaaaaatcccctccctagaatcaccgaagaatccgtcactagtgtaaaggatccaggaggaggtggttgttgggttttgtgccctaaataaaactcatttcaatataatcagatttacttattaataaagatcagaaataagattttatgttgcatggttcacatgatttatttcatgattatatgtatataatgtatgtattctttttaagtccagaacatatgagtttg

SEQ ID NO: 404137 - DNA, 630 bp, Cannabis indica
cagctagaactctttaaaatgagctgaaaattcacaatccccagctggtttcttgaagatagagaaaaagagagttgtagagagagagagttgcattctaggtttttcttaacttttttttttttaaagttaaatactaatttcttatttattaaatataacctcagaaaatcagattcttaaagcctataaaagacaaaaagacttccctagcaaaatgaccattttgcccctgaacacaaaccaaaagtttaatgacacccacgagtaatttggtcatttctaaactccgactatttcccgacacttccaatgtctaaccatattgcctgctactcaaacaattctaaactataaaaaaacgtgactctttaattgcccaacgttgcgtttcactactaccgatcacaaatatggaaaataagaaatttcacacataacataattagcacattttgaattcaaataaatctccataaatgcataaatcatggttaataacttaatttcataattaaatcctaattatttaataatccatcgtattaaaatttagcgatcattacaattgttgaaacaaattcacttgtggtggttcaagcatttgaaagcaatgttgaaatgcaatct

SEQ ID NO: 404138 - DNA, 888 bp, Cannabis indica
gacctcaaggttcaggaccaggaggcaagagaataaccaagggaatacccacaaatgcttaggaagaacaacctgggaatgtgagggatgtcccaatggatagagaaaatcaacctaacacaagtaatacaagaaatcaaggtcatcgacgtgatgctttaggaacttcccatggatttactaaccaagggaatgaacaaactgatgtacctgagtcatctcacatgaatgcagaggcaagacaactgcgattaggaaaccaagaaattcctcgtaatgatggaagaaatcctagaaaccaacctggatccggtcgacgcccaaggcatccacaaaggccttctcgcacggacagagagaatatgcatacttatttgagtaagggacgtgtgtctaatccctttcggagaagaagaccaatgcgaaatgagatgcgtgaagcaagtttgaatacagtagaatcacgatcctacgggcatagtaggttgacttgaacaaatagacaaacgcgagacgggagcagatcttgatgatattttactgaccaagaaagtatgagtaactcgcgtagttaccagtctgaaagttactcatggactattgggattttatgccataaataaaacccatttcaatctaatctgatttgttatcaataaaagattagaaatcatttatgtttacatctagtttttatgtttatggtttaatgtgtacaaaatttgttaagtccagaacatatagttattcacaattacagtaatgtcaacacagtggaatgtaattgtgattatatgcttcaaaagatagtgtccctgattcatcagtgcactggatttacactgatgtgataatcagcgataaaatatacttacaccttggataagt

SEQ ID NO: 404139 - DNA, 508 bp, Cannabis indica
ataattagaaaactatatatctgaatcaaatatggagtgggtagtattaccccgaccccatcccgaacccactgtagatatatgaaattgcacctcaccccgccccatttggggtgggtacccgcgggttaaatttccttcactagtcgtttttgtagactttgatattcatttttttttaatttaatttgttattataattgcgtatgttgtaattatttaagatcacgtgtaaattttatttatatataaagagagcttcaggtattattcttcatccttgcgttttttatttttgatacttcgatatattgagttttaattttttaatcagtttatattataattatagtagtcatcatgttcatttttgacaaattttaaataatttatagtactaaatataaaatttaaaataaagctacacgtattattcactatttaaattttatttttagtactattaattattatttttttgaatgaaaataatctttattagacagaa

SEQ ID NO: 404140 - DNA, 631 bp, Cannabis indica
gagagagagagagagcttgaagaaaaaattattttttgattttctaatttgaataaaatgaattattgattaattggtgtttatctaactaagataatggaataatcaacatacactacttaatttagtcttactaaaaggcaaagaaagtcaaatggcaaaatgaccattttgcccaagcacacaccaaaaagcatacttgtcacctaggggtaatttggttgtttcaaaaacaacaaatagttccggcattcccaatgtctaactaagtcacccctgctattactaaaatattaaaatgtgattcaattggccaaatgccgcgttttaattttgctggacataaaacataaaaaatatagaatttcatatatagcataaataacacacctagaattcaaataaatctctctaaatgcataaatcatatttagaaatctaattggtgtcaaaattgaagtgattgaagattactttaggttcaatccctaccatgtttgtaacaccctaactacataggcgtattacgtgatttttaaacatagtgtgcaactcgttgctaatcaacgaggtttatgaaaatcgtgattaattaaaatttttgctttttaattaaacttataaaatcttt

SEQ ID NO: 404141 - DNA, 789 bp, Cannabis indica
aagtgttaccaaacggcaccattattaactatttacaaatggtcttagtgctaaagaggaatgttctattactattattattattattattattattattattattttatatgaaatagaattttataaaatgtttatacatttagttagccgcaattattaggctgcaataaaaaaaagtcagatatgtaatgtatggaaggatatttttgttaaagaaatagtttgaatatattcgtatgcatgtacttagattttttattttatttattttttggcagaaatacttagagataataaaaatttaatgtatgaatttgaatgggaaatttgattttctatacttacatatacctaatattttatttctaaactaatacatatcatcattgaaaatatatgaccactttatctaaaacccaaaaatacccctctcaaattttccatacttttttttagtgcaaaaacataaaaaaaaaaaaaaaattggtagtccgatggggtccgatggtagtccgatggtggtccgatggtcacctgatgctacttttgtatgtacaaaaacataaaaaaaaaattggtagcagatttggtccgatggtagtccgatgggtggtccgatgggtccgatgggtggcccgatgggtggtccgatggtggcccgatggggtggcccgatggatggtccgatgggtagcccgatgggtggtccgatggtgtaaatggggtgatgtaaatgggggtattttagggatatcataaaaattgtcatattttacaaatattagt

SEQ ID NO: 404142 - DNA, 574 bp, Cannabis indica
ctcattcttatgtgttgagtagaataattgaaagtttctgtaaaccataagaaatttatgcttcggggtttggtaccctattaccttcgcgagattttattatatccactaggtggattcggtctttgtctttttggattgacgattgtgaattaaccgccaatctaatagagctgcaactgtctgattttgatataatcttgagaatggattttctagtctaagtatggggcaacgatcgactgcaagtggaagatggtcgtgtttgagctcgatagtgctaatccagcagtgtttgtgggtaaagttcaggggacacgcataccaagaataacacttttgaaagcaaaggatctgatgagatgaggttgtctgggattcatagtcactgtagtggataccagccaacctgtgacatctggatctgaaaacacaagattggtgtgtgagttccttaacgtctttccagaagatttactgagattgccacctacctgggagattgaatttgtaattgaattagttcggagcggaaccagcatcaaaagtaccgtatcgaatggctccagcagaa

SEQ ID NO: 404143 - DNA, 986 bp, Cannabis indica
gttttgcatttattgtttctggtttttccatactctattcatccccatttttattccgattatttttcttgatttgttaatcttgtcattgtcaattgtttgattgtttagagtttagttaatttgattctgcactgttagtcgtaattttcccataaatcatagcttggtaatcgatcaagaacgcagaattaagattctttctgctgctattcttgaagaaaactttgaatatcatcaatggcaagatttgaattggagaagtttgatggaactttgaactttgcactatggagagaaagtctaaaaggaattctagtgcaccagaaagtctccaaaggtttttggagatgagaagttattggcagaaaagaaatcagaggaaaaagtaaaaatggaggagatggcgtactacacagtcatcatgtatctatcaaacattattcgaagaaaactcatcacagagaagacgacaaaaggagtttggaacaagttggaagaactgtacttaaaaccatcaatatctagaaggatcaatttgctagaaaggttatacggttttagaatgatttcttccgtttctttagatgagaatattgatagatttaatgagattattataggattggaaaatataaatcacaaggttaatgaagaaaaccaagccatcatcttgttgagatttcttccaacaaggcagccatcaaatatggtagacaagtgattgcattggaggatgttcttgccgcacttaagtcgaaagattttgaattacagttggagacggaatccaagaaagcgcaagtgtacttggcaagtggaagatcgcccaagaaagtaagttcaaagaataaacaccatcactctcaatcaagatcgaaatccagagagaaggaaataaggaagtgttacttctgtggtagatctggacatttgcaaagattttgcaagaagtacaaggagcaacaaggtttcaacaaatctca

SEQ ID NO: 404144 - DNA, 707 bp, Cannabis indica
gttctctttctggttgaattttttgagtctaatgctccagtttctattctagacattttgtactcagaaagttgatttaatgaagttgaaatttcatacaaaaaaaaaaaaaaaaaaagaactacatctatagaaagaaaaaaaatgttcaaccgtatataattattgtatcattaaagttctttctacaaaataaatatctacacgcttaaatattttcaagaaaggaaagaaaataataattatatataactaatgcagctgacaatgattttattttattagacactaaaactgctaataatatatcagaccagaaagaaaataaatgctataatatattactactttatcgcgcaaccatcgcgcgactacgcagcaactcaatacaaccgaaacaaaaattcaaccagaaagagaaccactattaatttcgacgactttatctgagaagacgaccagaatcaatcaaaacagggattgtttcgaattcatgaaaaaaaaagtataaaaaaattactacgaaactaaaattcaaccggaaatccagtttaatttgcataaaactaatgtcctgacttcaatttttagatcaatgaaaggaagatctcaaaaaaattaaatggagttcccaaacaatccaactcaagtagaatccaaaaaaaatttacattaatactatagtaaaatatttatcctggtgtatt

SEQ ID NO: 404145 - DNA, 555 bp, Cannabis indica
aaatctccgtaaattaataattcttaagtaatatgcaagtttcataattaaaccctaattatctgctaatttctaaattaaaattaagcagtctttacaattgataccatttgtaacgtccccgctttaagcctccactgggcccttacacccacggaatgatggctcttatacacgagtatgtcactctcgctgcttcatggattgatggacagtctgaaaggacaattcagatactagaagatatgtaacgagcctgtgttatggatttcaagggctcctagaataagtatctaccactgatagagttttcgtataataacaattatcagagtacaatatagggatgactccctatgagtagttgtatggaaaaaagtataaatctcccattcactgaaatgattcaagagaaaggtaatactaggttcggaatcagtgcaacagactcatgaggccataagaagataaggccagaacgctgcctctcagagtaggcaaaagagttatgcagatccgaaacgcagaaatgtagacgcttcgaggtaggagatc

SEQ ID NO: 404146 - DNA, 776 bp, Cannabis indica
gtcttgttaggtgggtcctactgccatctggttcgctcttgaattgtcgtatattttgagaaaaattatagacaacaaatataataagggataattttttttatgtaacttttgatgttttagttagaataaaagatactacaatgggatgaatttattttatataatcttactatataattatttttctatttttgtaaagctttttaaattaaatatttttaaaaataaattaatatttatatacattacttttgttataattagtttttaaaattctattatttcaatagtataagaaatattgtattaatttttttactcattttgatttacgcatattgttaatttagaaatcatatccatttaatgaattatattttggacggttttatttttcttataaatttgtattttctttcaaaactatatttttcaccatattttattttattttatttcgtacttaaaaaagagtgatatagtattctaacaagttctcagtttgtcattgcatttttgttgtgttatgtttattgtgttatttattttttaagtgtataaatatatatatttatagactttaaaaattattggaggatcagtgaatatcacagataagtctttcttcttattttaattgttatattgaaattttggtttttgaatttagatttttataagttaaatccttccctcatttatctttttttagtattttgtaggttgtttatctatacttcaaaggtggaaatttcacacattgcaaaagatct

SEQ ID NO: 404147 - DNA, 552 bp, Cannabis indica
atctgatactagtatactttacttgaaataccctagctagcctaggcgtgttaacgtgattttaaacttgatgtgcagctcgttgctaataaacgaggttaatgaaaaacgtgattaattaaaatttgcttatttaattaataacttataatattacatacaaaatatttcgggatcccgtttacaaaatacttcacaacagacttctattcctttacaaaatatttgtcgcccagcgactaacaacaaaagccctaatgtttagaggatcgtacgctccaagcctaaccgccccgacatgtacaaccttcatctgctcatcctcacggttcctcaactttagccttgcccttacctacacataaacatagcactatgagtcgaaagactcaataagaaaagcataatataatatacatactaaatcccgggttataatcaagcgcccatacatctgaccataaccctaactgaatcaggaacgtccttgacaaagtatgattaaccgcgaatccagcctatactcagtactctaatcgtactgatgtggta

SEQ ID NO: 404148 - DNA, 799 bp, Cannabis indica
ttttcttctggttgaagattgggtgggtttaagcttgtattaactaaatgaatgtactcattgcttcttgctgacttggctgtagcttctttctgctctattttttggaggaaaattttgtgatactaatttatggatggcataaatgtgtctgggtttttagtattacttcaggtgatatttatgtttgtatttagttgagatgtaatgctatttctgacaaatatagtattcaagatgaagaggaatattttaataatgttatatttatttatttaatttttttttggacaaaatgctttatttagtttaatctgtcacaaatgtagtgtaaattagtttaacaagtcaaaagaaatattcaatttccattttaagtgcatatattataacacttgcgtttttcattttgatagaacatatgttctttatgtgcatctctatgaatactatgttttgattttttagggtgtttggttgttgtgaatattttactaggatctagatttattaacaagtatgtatgttgaattaacactctaaatatgaatatctctaaaacaatgaaataaacacataagggtttaagaaaatcttacattgattgcagcggaatataatgactcattccgttcaagatttgtagcccttaatttctttttgtagtagagcattatcaagatttgaacctggatctctttctctcctttgggtttggttaccactgtcttattcactataattgagtacttgacttgctatgtgtgggcatgacactctttcactcaaagtttcgaat

SEQ ID NO: 404149 - DNA, 767 bp, Cannabis indica
ttatttcttttactattaaaattttagtcaccttattttttttatttattttatttttttttttttgtcttcgtatcaattctttttaaaaaaaaattcattgtttttttgttttttactattcccttaaatttgttcttaaatttttctctgttaaatcaattagttttttgcctattcatgaaaagaattttttttacttaaaaaaaattaaataaaaataaatggatctaacacatactattaactaggcataatcatatttagtttattttttttcttttgttgtttctttatatgtagattataacaaacataaaataaaaaataatttaaagaataatataatatgaaaaaaaaaactgatgcaaaatttgttgaaaaaaagaaagagttaatattttttattttttataacataacatagtacatattcaaagtaactagccaaagaaaaaattggtaaaaaagaattttacatacaacaatatactcatgaaattgtggaaatcttcaccgcacttcaaaatttaataaagagttattgatgcatggttggaggttctgcaaatttattcacgaattaaaaagatgtgtttcaagatctttatcttatgttgtcattaattttcttattcatattctacattccactttgccctttttatgtacttttacaattgataagaacaagtagattgtaagagcattaatcaatacgttttcattttcaaaaaaattttgtcattcttgctctatgaaagtaa

SEQ ID NO: 404150 - DNA, 719 bp, Cannabis indica
taatcaaaccccaccacctaagactataatttaatttggtatatttatatagtaagtttttttagaaattttgaaaataatttaaaaatagagttgagataatttaaaaatagagttgagctataggcattatcaatttttcctagtatgtgtagatattctagacatgtcacttaacgattggttagcgctactctctaaaatctattacattaaactatatggacttgatacttaattgcaccaataacaattgtgacacgtaggaagatactaggcaccgcgagtactttttaatatttctcatattctatctatcgaaaataacaataatacttgtcaataataataataataatataaataataagaataatactaataatacacttacatatcctactattctaaattatattttcaatgctaaaatattattatttattatggatgtttaattattatgattaagatttagttgtattttcatttattatattgatttattataaataaagattagcccaattgaaataaacattaaaaaattcttatttaatttatcttcttttttttctttcttatatattttatattattttataactatttaataatttttttagtaaacttgtgggtatgactacacccttatataaaattaaaaactaacaataaaaaactaagttcttatatgaccacgtactaaggaattagct

SEQ ID NO: 404151 - DNA, 800 bp, Cannabis indica
attttattaatttatgatgtatgagttagttgacacgtattttaactttattcggtggacagtaaagcaaaccttatttggttcttgatttgattggatacaaacaagtatactttaactaatatgtacatcccaagatcatacatatcaatggtcagaaaaacatccccatactataggaacaaaataggtgtacccaccatagaaattttctatatatatctattatatataactaaattgttggtttatgagaaatttatgagtgactttttatttatattgaataaaataataaaatattatttatatataataaaataataaaataaaaataaaacaaatcccattaatatttgaactgatatttgatcctaattattagagagtcagaacattctttaagtttcctattaaaaaataacagttttttgcgtgtagtttggttggttatttgatggcacagagccaatggaggcagtgatcaccattgatgttctgtgaagagctagagctgatgttactgttgcttttgtggagaaggagcttcgtgttgatgcttgtcatggtgctaatatcatcgctgatacttagattaccaattatggagaacaaggaatcttcgtactcactctacctgtatgtattatctactttgattatttattttgattgtttggatgacgagaaaatttcgtgttgttgtcgaattgaggcttttcacttatcagttttggttttgcttgatgtcttcagtaatttcgattttgttgatcgacatttgattgagattgtgtcga

SEQ ID NO: 404152 - DNA, 566 bp, Cannabis indica
tgtttatatttcaaaattaaagtgatttaatagttaggaataatgatcaaaatcaaacataagtttttttaataaaaaaaaaattgtattatttattaagtagtaatgaatattaggaatataataaattaattatggataaattaaaataataaaagaaataaaataaaaattaattataatatgaaaaatgtgatttatattttaataaaatatattataattttttaaaaaataaataattttgtaatatgtaatatataatttaaaatttaataaagtgataatataaatttttaaaaggctaattagcaatttttctccccgaactttgacatatactaaatcatgctccctgaactttttcggccgttaaaatttttccctcaactattgagaatgttagatttaaggacttttgtcttaatttcattcaattttactgttttcagtgatttttatgtactaaaccatggtccccagactttgatatctaccaaatcatgtcccctcaaactttgatatgtactaaatcgtgccccttgaacttcatccatgttagaatt

SEQ ID NO: 404153 - DNA, 573 bp, Cannabis indica
tttttttaaaaaaaatagtttctacctttaaatcttattattaaaaaaatagttacatttttaattaattaaaaagtcaaatacattatcacaaaattcaaatatattatacattattcattattcaatatattaattattttctcatataaaatttataacattataaaaaggttactaatacactacaaaaatactagattttaggtaaaattataaaattttataaaacaaccgtaaagtaacaaaatagaagaattaaaacaacagtagaacaactaaaaaacaatcgttgaataaaagtgaaaacttaatatagcgcatagtattttcgaaaaaaaaattaccgctttacagtaaaaaaaataaaaaagttaaaatttttcagtatatagtgtaaaaaatacttaaataaaataaaaaaaaataatatatattactgatgaaaaaaataaataaaatattaaatgggaatcatgtcgccatggagagtgttatcctaccctcgctccgtttaatataatgatatttatctccaacaagttctctatttagataggatattctcaccca

SEQ ID NO: 404154 - DNA, 663 bp, Cannabis indica
ctctctctctctctctctccgattccctttcccatttcgttcaggggtatttatagagatgagcaaggatagttcaaaaagggatcacttgtctttgagtgccaataatgtatgagcacaaatttccaagagatacaaaatagggcatgcctaacctatgccataggtatcatagggattaggtgagactaatctttatccctctttgattgatgtgatgcttcataatggggtcgtcactagtcccattgattactgtgtaattgtcgtaaatgaggcatacgttgtctaacatatcctcttatgggcgttccaagacgtttttccccatgctgcattaaatgtgaggtgattgttcgagtatatcctcgtcctcccggagatgcttcattatgtcagctcccggagaggaagggcttgcctattgcacttcttcgggggctcacatcctgacttcacttgtccatttgaatatgcctccgctaattctagggtgaggtgtccttttggttaggggtgtgcagaaagttatccaatccaatctcaaccgaccgatccaatcccaaccgatccaatagaatcggatatccaatcataattggatcggatcggatgcaaattttaaaaatccaattggatcggatcggatgttggatgagacat

SEQ ID NO: 404155 - DNA, 1214 bp, Cannabis indica
ccttaaaaatccacttcccgagaattaaccctctcacaaagaaacccaattttactcacaacaacaatattgaacaatgtatggagcaaaaatctcaaaaatccaacaaaagttccaaaattctctaataatccacaaatgatccaatgaaaattgtatagagagtcttaaaattgttacctcaatgagaatccatctttatgcaacctccattgaagaaaaccttgaagtttttgagaaggaagaagatgaatagtgatttttgaaatttgggtgagattttagggatttggggttgattttgagaggaaaagagggattgatgaagggaatgatgatttagaaaggtttgggatgaagatttatggttagatgtgaaagaaaaggatttaggatgggattagatgaaaaagaaagtgttgtgattggtatttttgaaggtggtggttagggattttgaatgagagtgtgtttgaaagtgtgtaatgttttgccccttttaaacccgtctgaccatcctcgccgcggccagaaatgggatcgccgcggccaaataggcccaagaaaatggcctctctgcctagaccttctggccgcggccatactctccctcgccgcggccagattgcttcgaaaaatggcctctctataagacccttttggccgcggcggcactagatctggccgcggccactgggtcgtacccaaaaaacttttttttttcattactatacagtacaaaaataataagaaaacccaaacttgttttaccagttttctaaacaagactagaaagaacgactaaaacgtaaaaaaattcaactaaaacataaagaaaacttgggttgcctcccaattagcgctgtttttatcgtcgcacagctagacgttgatcgagttcttcatagtggcgccagaatcatggcagacttggtttgatcaatttgacctcccaagtagagctttaaccgctgcccgttaactttgaaagtattagggccttcacctttcaattctaccgctccataaggaaacactttgaccactgtaaatggccctgaccaccttgatttcaatttaccaagaaacaacttcagccttgagttgaaaagtagaacttgttgcccaggttgaaactccttcctgactaagtttcggtcatgccaccttttagttctttccttgtagatcttagcgttctcataagcctcatt

SEQ ID NO: 404156 - DNA, 595 bp, Cannabis indica
attatatgtaattagtgtgtacagtgtatttctaacattactcattatttttaaacatacttgaatttttatagggtgaattttggtaatacttatttaatttatttttttgtttttaaaattagaaaagtgaaaatattttccaaaatcatgttctataaactgtttttacttattaattttttatttaagaatctattttttttttttaaaaaaatcacttttaaattttttaaacagtttctttttattaatattttagactctgacccccaacttagatcttggagcccagacttggaccccgtccccgattccaacctcatacccgacttaaataaaatcaacaaatgaaaataaaaataaaatttacaaaacactcttttattttttgtttttaaaattgaaaaataaaagttttttttttttttgaaatggaaaaataaaagtggttatataacacatttttatttttcaaaaataaaattttaaaaacaaaaattttacttttatttttgtgattaaaaaatataaaaacaaaaattttactaaacactaccataatattttattttatttttttaaaaaaagtgtt

SEQ ID NO: 404157 - DNA, 732 bp, Cannabis indica
attcccgagaccaacctcaccaaacgatcaaactgagccatgtattcagtaacactcatgttctccttatgagtcagctgagtaaattcttttcttttagcacttctaactgcctcgttgtaatacttggcattgaactgttcctaaaacttttcccaggtcattgtcgtaacatcgtgaatcatggacaccatgtcccaccaaaccaaagcgtcttattgaaattggaaatagacacgggccaccctatcatttctggtgatgcccataaagttcaagattctggtaatcactgttagccattgctcgactttcatggcatcgggacctcccagggaaacttgaggtgcctacttacggaacctttcatacaggggttccctccggttcactgcaactacaggttcggcctgcacagcaggggcaggagctaatggtatttctggagcagggattgcaagagcaccctgctgtctcaaccgccgaatctcttcatcttgttcattaattctggcttgcatttctacaaactggttttcccaatcatgggcagcctgtggcgggttagcatcaccccgaccacgtgccctacttctaggacctctacaacggctacaaatatttaagggaatctaagctccctgaccaccactagatccaaccgaatttccctggctcctggtgttttgcctggcgtccatactaattagaacaacctacgtaaccaagagc

SEQ ID NO: 404158 - DNA, 664 bp, Cannabis indica
taagcttgtatcagaaatattggctatacatcgaacatgatcgacattgacagtggaaaatatactataaacttatcataatataatttttaagtcaatgtcacttagttgatcttagatcaatgatctcaatcttgagatgtttaggttctagcctaactgtactattcgggttctttgacttattcatcatccacttacctgtaggactggcccatacatcttgagaacatgatagtccaattgagtgggagcactaattatagatatagaatctatagcttctataaacatctagaaatgacatgacagtttccttagagcttggctaaacaagtttaaatggtggagtactcatttcagtaattatattagtttattagaatatcctttataatagctaagtgttttaaggataaaatacattgaatggtaaaatggtaaatttctccctacttgatgtaaatcgtccctagaggatcattcattgtttagattaaaacaatggatattcatagcgtatttgtatttaatatatagagcattttatgtaatcaagagtgcatttttgaatctatagtggagttaaaatgaattaattagttagaaaatttattggggtaagttgaaaaatacctcttttattaatcaattaaccaaattt

SEQ ID NO: 404159 - DNA, 668 bp, Cannabis indica
tacttagcagtgtcagaatacgtaattaattcagtactaattcgcgaagatcaaggacgacaatacccggtgtattatgtcaacaaacgattactggatgctaagacacgttatcctcaaatggaaaagttggcattcgccttggtaatatcgtcgagaaaattgcgaccttatttccaggctcacagtgtcgaagtcttgacaaattaccctttaaggcaagtcttagcaaaaccagagacatcagggaggttgttgaaatgggcaatggagttaagccaatttgatatcaagtataaaccaagaactacgatcaaggggcaagccttggcagactttatccttgaattccccagcaccgaagtggcactcatagaagatcaaatcgatgtagctataaccaataaggagatgtggacattgtatgtcgacggagcctcaaacagcgaagctcatggtggcgggatcttattaatcagtcctagaaattttaaggtacacgctgctttacgttttgagttatctacatctaacaatgaagccgagtatgaggctttaatcgcaggattgaagctcgctctcgagatgaaaatcaaatatctacaggcgtttagcgattcccaaatcatggtatgccaggtgaatggagaatatctggccagaggtgg

SEQ ID NO: 404160 - DNA, 628 bp, Cannabis indica
agtttaattaggtgatgctaagtataatatatgtatgtataatttttttttaataaataatgtatttctttttaatttttaaaatgagatttgagtttttaatttttgacttttttttttaactattgcgagaacattagtgtatatatgccttctattaattattagtacttcatataatcatgatatatcaagtttgacttaccttacaaatatagtttgacttaaaatactttccattttgataatagaaaataatttatagaaattatatttcaagatcatgtgcctttaaaaatcatttgaaatgtgttgattgataaaattataaaaattattaagtttcatttcacttatatattgatcaaaaaaaataaataatataaacacactaaatataaccagaagactaatagaaaatatttataattaaaattttcttatataaaatatctatatacactaaaaaaaatcatacttttagtcacaacaaaacaaagtgaactaaaagtaaaaaaagttgtagactaattatataaattattattcttatgttgtgactaaaaggtctgtagctaaggtatagtcacaaaatcacaatttatgtgagtcaatgtatttaagtcac

SEQ ID NO: 404161 - DNA, 990 bp, Cannabis indica
taaatttcctaacttattatttctcttgagtccactacagatttggaatcgcactcttaattatatagaattctctatacgttccaaaatatagatacaatattaattatctattgttatagtccaaataattagagatcatttatcgatgatgtacatcgagtagggataaatttactgttctacccctcaatgtattttatccttaaagcacttagctttctataaatgatatttaagtaaactaatataattactgaaataagtgctcttccatttatctctattaagccaagctcgaaggaaatcatcatttcacttttatgtctagtaagaagctatagattttgtatctatgattagcgctcccacttaattgtactaccatgttcccaagatgaatgtgttggtccgattcaataggttagctttaacgaaaaactctaagaacataaataacatagttgagatcaaatctaaccatatcaggattgagatcttttgatctaagatcaactaagtaatattgacttagaaagatacaacgataagtttatgatatctttaccaagttcaatattggtctagtccaatgtatactccatacatccaatactagcatactttacgaataccctggaaaggacataacacttatccaaggtgtaagtaaactttatcgttgatgatcacatcagtgtaactccagtgcacggatgaatcatgggacataagctttgaaacatataatcatgattatattccactgcgtagagatactataatcatgaatagctatatgttctcgatttaatagaatttatacattaaacatataatcatgaaaagaatcatgtaaaccatgcaacataaaatgattttcgatcttttattaattagtaaatctgattatattgaaatgggttttatttagggcataaaatctcactaaactcccacttgcactaatataaaactaaaagtgcattt

SEQ ID NO: 404162 - DNA, 757 bp, Cannabis indica
cttttagacaaacgggacttgaaatttccagtcaagtgacgaccccaggcagccaattgaactccacagagctcaatttttcttgttatgcaatcggcttgtttcgagctccagacatcagccactatttgcttgcaaagaggctccctatgccaagcattctcatatcgaaaaggggcataataggttgtaccagtagccatttcagggagtaaaataattggtgaaggatcagaagatgaaaattcaagattattaagagatacctcattataaatatccaaccagctttgtgtaaccacagccctgtcgagacgaatttcaacagcacgtgaagaacctctgcttcgttcccaggtgaacgggtagcccctgagatccaagtcgataagattacagtcacgaacagcagaattgaaaccagtaatcaaggaggaggggtatggccggcctcctttcttgtcttcattgctcagaatattgttaaaatcacctattatgcaccagggtaaagttgattcagccgccaagtctcgaagtagagtccatgtccgatgcctgagatttcggtttggctccccatacaagcctgatagacgccaaggttccataccaggaagatgaacttgttggtattatatttatccaggatcttagatctactcacaagtatgttgatttaacaacctaatattgaacttttaaaacgatgaactaaacacataaaagttaagaataacttacagtgattgcagcg

SEQ ID NO: 404163 - DNA, 1011 bp, Cannabis indica
cttaagtctcggtcgggtttgggatctgatctatgtcttaatcttggtccttgtcctagtcctagtctagttccagttccaattgcgattccgagtttgagttttggttcgagtttgggtcagtgttcgagtcctagtttgagtttgtgtttgggtcccgatctcggtctatgtctgaatcaggctccgggagtgggttatggtcctgggtctggatcaaggttctggtccgagtcccaggttttgatcttgatctgagtctgagtttagttcttggtctatgtcctgggttctgatcctggtctgggttcgagttcgggtcctggtgcaggtctatgtttgggtctgattctgggtctgtgtctgagttttggttcggtttcgggtttggtcttggtataggggcttggtctaggtccaggatcgagtcccgagttcgagtttgagttcaggttcaagtctgaatcttattctgggtccgggactgagttcgagcacgagttttggggctgggttctgatctagttttgggtcccagtcttggtccagatcctggtcactatcccgatcatgttccatggtcctgataacgttttggttcaggtttcgattttgggtcccaggtttgggtgtgggtccaggtcctgctccagcttcgggtccttctttgagtccctgggacaagatctggatcccattcacgggatccagtctggtttcagttcatgtcccaggtcccgatctgggtcttggtctagctccgagaccgagacttgggtgcagttttgggtctcgatcctaattgtggttcccaagtcctgttccatgcttcggtttgagttcaggtctgggtttgggtcccaagtcccaatttgggtttggattcaagtttgggacccaatcataaggtgggtctgtgtccgagtccgggtccttgtctggttgcagttttgtgtatgggttcaagtcctcgtactagtcttgtttctcggtcccgatctccttctggtt

SEQ ID NO: 404164 - DNA, 566 bp, Cannabis indica
gcaaaagactaatctacccctcagaaaacttaagcattaaaaataatctaggggcattttggtaatttaactaagccatcaaactgacattccaaaatactaaaatagtctcaaatatttccaaaataattcatcccttattgtcgtgacatcacaaaccactctgtccagtttccacgatcactgggcccaaaaatattttctttcaaaaatggtatccacgacacccacatattccaataaaatcttcgtaattgataaattacgctataattaaatcatttaataaatccatactaattaatctacgtaagatcataatcttacttcattaccaaaattaaatatttaataaaatatgtctaattatttaccataatattttttgggatattacaacagtatttattatagttgtcataaggttatttttttggttaattattgttgttttatagtttatttagtttatttatagttgtcgtgaggttgttttctcattatttttagttgttttcttactttttatcgagaaaaatgtactttttaactttaaaagcgtattt

SEQ ID NO: 404165 - DNA, 541 bp, Cannabis indica
attttttttataacaaattagaagttattcttaaatagaatattcttaaatagaggttctactgtatatagacatataagagttaagacaggaaataataaatgaaccaaaattaattacagtattacattaacgtaggtgcactcattttaaaacttgtagaaaactattcatcgttaaattctcttttgcaatataaaaattttatgtttccaatgttcaacctaattttcttttgacttttttttctaccaaactttattttttttttttgttaagatttagaaatatatcatttcaatttaaatagggaaacttacaaaaatattagattttagataaatatatacaattttattgccacacaacaaaaattacatttatactgtcttaattttttttttcttttatattgtagacactgaaaataaaaaacaatgcctccattgtaaagcctgcttagttaatttggaaattagcagttatttatgattaatcaagaaattatttatagctatttaaataatttatcattgttatt

SEQ ID NO: 404166 - DNA, 547 bp, Cannabis indica
ctaatttcttgaaatttgaattttggatttaaaattgagaattatagtaaatgaaccaaaaatatactactatgtataggtaaatgtcctcatgaaatttgtagagaaataattcttttacaatatttattatttagattatcttttgtcacataaaatgttctcacattctttttcttttattttgaggaaaatgtctcaatcactaaacaccaagtgcaacaagtactctaaaacagagggacgaggatttattcaaagatagcatctgatcctgaatagagataggactctctcaccactacaaaataagcctttagaagcactttttttagcttagtaataaataactgacatcataggatttgaaatctactgaagggattttcacgcctctaatggcatcagttacttagaaataaccaacggcatagggtgtgccccctataccgtcagttatttctaaataaccgacgccaaaaggggtttataaccctacccagcccttcgtcttcctcattcgatcagccaacccagaaacccccaa

SEQ ID NO: 404167 - DNA, 603 bp, Cannabis indica
ataaggacaaccctacccgcaaatgatagattccttgtgctccatgttcgaattcgggttgtcattttttcagcaagtatgttacattcatgtcttgagatccttttgaagcaaatgggcatgcccaagtatttgaaaggaagcttctgttggaagaaaccagaggcattaatcacccttttaacttctatgtctgccatgttgctgcaatatatggcagattttaacttgtttggggtcaagccggatgtcttggtgaagagttgaagcccttgaagcattaagataatgctttcatagtctccattacaaaataaaaggacatcatcggcgaaactaaggtggttaagtttcagcgaagcacatctttcatgaaatgagaaatcttgcttgcatcctatctccttcattacccgagacatgtattccattccaatgacaaacaataaaggggagatagggtctccttgtcgtaatcctctcttagattcaaagaaaccgtgtaaggtgccattgaaaaaaagagagaaccttggggttttgacacaattcatcaccaaagagatgaatttatcagggaagagcaatcccttgagaacctcc

SEQ ID NO: 404168 - DNA, 461 bp, Cannabis indica
acataaaaataaacatagccaatattaccatatatataataatcaataattattaccatatatattatacaagaaattgaaaaaaagtttttaattatatataaaaatgtatgagaaaatgataataagtttttttgcacatattttgtaattaattaaaataatgtatacaaaattgtaaaatgcccaatttattacagattgtcttatattttattgtttaaaataatggatttttttttatttagttatggctgtaattagttccatttgccctgaattgtacaccaccgtgatgcttttttttttttttacattccctcatcatcacaagtaccattaactttctccgcgcacaaatttattacttttaacatatatgtacattaaaaaaaatcaactattatttattgtcttttagtggttcaaagattacagacatttactgttggaaattattt

SEQ ID NO: 404169 - DNA, 524 bp, Cannabis indica
tcttcattcttatcatgtatagagggctatacatcaagactgcatattgatttcgttttttattgggccaatattcctcttttgatgttgatgtttatgaataatctgtttcatatatacaagtagtaattatgtatgaattattattttaagttatttggaagtaattgtgtaattattgaggtagtacatttaattacatcaatttacaattatttaggtttttttaattatttccaattatacaattacaatgaatattccagttcattacaatatatatttagatttacacaagtatacatgtactcaactcataaaaaaatatagcaatcgttacaatatatatttagatttacacaagtatatatatgtatccaatatccaatactaaaagaaacaaactagtatatataaaaataataataataaaaattatgtgtatctgctaggaacaattcttatctatgtcttccatcataaaataaataaaatgtttggataaaaaaaaaaaaataataaaa

SEQ ID NO: 404170 - DNA, 875 bp, Cannabis indica
gtactgttttttaattcagaaatattgttgaaaataatgtactcagttgaaccaatggaagattaggtagaagtttcactatactctttttagtttttctaataatattccatatattaagacttttttttttcttctattttaagatcacacattcactttaatttatgttacataatatttgctttaaaatctgtaaaacttatgacttgttcctccaaattttctataagtaaatattaagtattatttagttatgacttatatatacccaaatttatttgaataaccaattataataccacaaatattactttaataaaacgaatcattcgtatgatcataccttcacgtacaatctaaataaaaaaaaaataaaaaaacttaaactttacctaaaactaatatttacgtgcctcagcacgtaactcctacctagtatatatatatatacatctaaaatatttatcttaaaaatacttaataataatgcttatatattcatatattaaaccctaattaaaccgaaacaacaccacaagtcggtgatcccaactataaatattaatgatattatatttacacttagctctacatttacaaacaaaaacgatatcgttagtaatacaaatgtctttataactgactgggtgtcgtcttgtcatgatgttatatatatatacatatataggccatgaatatttataacttttagtacatatatttctattgtgtaggcatacatgcatctattaattatccttttaagaaaaattatacaaagtatatatatatttatgggtgactattcaatggttacatttttattgtaaccatatagttacatttttttttaacctgtaatagcaggttac

SEQ ID NO: 404171 - DNA, 633 bp, Cannabis indica
tattttaccagaatttagaattattaacatgtatgttttattagcattctaaatatgaattctagggtgcagcagaatacataagagtttaaaaaaccttacattgatggagcagaataataatgactcatctttccgctcagatctctaatctttgttcttttttgtcacagaataatacaaagatctgagcttggatctctttctctccttcgggttggttactgttgggttttgtgacctaaataaaactcatttcaatataatcagatttaataattaataaagatcaaaaatcattttatgttgcatggttcacatgatttatttcatgtttatatttaatgtataaattctaataaagccaaaaaaaaaggaattggtcaagaattatagtgttgtcagcaacagttagactataatcattgattatatgttgaaaagtttaattccgtgatttgttagttcactggatttagactggcatgataatcagcgatatgtatacttacaccttggataagtgttgtatcctttccaaggcattggcaaagtttaccagtatcggatgtatggagtatacattgaagggaccgatattgaacttggattattagatatgataaatttacc

SEQ ID NO: 404172 - DNA, 803 bp, Cannabis indica
aaattcatttggatccttgtagtatacattctttaagatctttgattaagagcttagagtattcaagtttgatccctattgaagacaccatttagaaaggtattctcttctccttgattgtttacttttcctaatcaatttacttagcaaagaattttatttccatgtggcatttacgtcttccatggagtattttaggcacgtgtcattttacatgaagtcttttactttatgatttttcttctctttcctctttttctttccctttttaagtcattttccttagggtggaaatttgtagctcgtcttccccttaggcttattttctttaggttataaagtgttggaattattttaaataatatgtctcctcccactcagatctctaacccttgattactttctgtcgcaaagtataatcaagatctgagcccgaatgtccttctttgttgattctgaattctgcacagccttcctcactatgattgaggtattacttgatgtgtgtgggcactactctatcacttagagggatttcaaaaaacagagaagaaagagagagagagagtggcggctcaggagtgtgtgtgaaagaaaagaatgcagtaatgtgtctttgaatcctggagcctttaccttctatttatagaataccacatagggttaggattgaattacttggcattaaaaatgaaaaattaaatgacaaaaaggcaagtaaagtggccggccatagcaatgtggaaacaagcctttcacttttgcaactttcctattttatcatttctagtttcccattttct

SEQ ID NO: 404173 - DNA, 951 bp, Cannabis indica
atctcatgtgttaaatgtatataaaatcaattaatacatatttttaaataaaatatattaaatatataaaattataaatgtattttaaaaatatataaatataattagatgatcattagatgataattggatcattttggtcggttatccattggatcggatgtcccatctaacaaccgatccgatccgattgaattttaaatttacatccaatccaatccaattacgattggatataggattctattgaatcagttgagattggattggtcggtcggttgtaattagattggatgactttctgcacactccatgagtaggagattgataagtccaccaatcttcttttttgatatacacattatgcacacatatcaaacccataagttttcattcttattcgcaacagcccaaacatacttaaacagaactgtaatattccactcaacaatcctcttaaaactagctcctccatcagccttagattcgcaaacactatcccaagcaatgggtcccgatatgttggcctttttataaagataagcacgataaatagcttcgatttcattaaggactttctttgacaagatcatattttggctccaataagaatgaatggataacaacactgaattgataaacacaactcgacctgcaaatgataaattaatttagtatttttttaaatttgagctgtataaatattttggtaatacaatggcattttttatataaccaaaaaaagttttaaaaaattcattaactttctaaattttattaatttataaatatacttatatattaaatctaataaaaatataatgcatatatactaaacttattatatatattgcgcatatatgatttagttatatgtgcatatatatatactagatagatgttacgtgacatggtatgttaattttattttagtttttaattttttttaat

SEQ ID NO: 404174 - DNA, 638 bp, Cannabis indica
aaaaacattcatagtaaactaaaatattacactacaaaaaattttgttgtaactaaaagtaaaaaaattatgacaaattataaattattattcctatgttgtaactaaaaggtacgtggcacaaaaattacaatttattgtgactaaatgtatttttaatcacaatatttgttgtgactaaaactaaattagtgacaacttgtaactaaatactatgttttaatcacaagtaacattttgttgtgacttaaagtcacatttagtcacaaaattattatattgtgactaaaaggtgaggttgtcactgatagtagcagtttatttgtagtgttaaaaactatatatatattatcagtagaaattattcgatagaagtaatgttatagctataacaaacatcttcattagaaagaatattttgacatttatttttagtgttaatttaattaatgttttatccacaagaaaatgatatctatgttttttatcacacaatatataattgaaaaaaaaaaacaacttgatatatcaagtgacaactataataatcatattatatatatttttatatatatatatataaaagagcactaaacaagtgaattaaaattgttaaattgtttaaatttagctaaaaa

SEQ ID NO: 404175 - DNA, 710 bp, Cannabis indica
aaaaaaaaaaaaataagaaataggtagcattaggccaccatcgcacccccatcagaccaccatcggtatggatgagaattagagtatggatggtgaagttagaagagaagagaagggagaagggtattataggtaattgttgtaaatacaggttgagttttttgacacgacacgaaatcggcacaagcccagaaggcacgagcacgactaggaacgaaaaaatacaagcttgggcacgacacaacacgatgctacaaattggcatgacatggcacgaaaaatatgtacttaagcacaacacgacacaagaagcacgaataaactagcccaaaaaggacgacacacaacaagcctaaaaagcatgacatgacatattaaaaaactttataatttattaataataataagatctgaatttatcaattataaataagttaaaataataaaaaaaagtataatactaaatattataattttataattaaaactattaaaatataaaaaattaagattatatattaatttatttatagagtacgatataaaaatttgagtatttataaataaatatttaaattataataattaataatttttgtataagataatctgtaaaaatattattcaaaagttatataaatataattaaagctttgaaatatacatataatttaataattgtaaaaaaaaatataaaaagtaaaacaaaa

SEQ ID NO: 404176 - DNA, 540 bp, Cannabis indica
taatacaaacggaggcacctaaacaagcctcgtttacttcccaccaaacaaggcttggggggtaaatgttgcccttaattttgcccaaaatacgtggaccaatgagactacgacacgtggatttgaggaatatggttttgagataatttgactgtctttttatatcaagagtatcaacaagaaaacacctcccagagaaggtatgagggatccacgtactcccagatggcagagctatagcaaagcagctccgggaggcaccagaccccatctgaacagtcacctcgcatttaatgctgcatgggagaaggcgtattggaactgcaataagtattaagtctgacggcgtaacccctcttctgtagctattacgctatgattagtaagcctagtgacggctactttatgagggatcacatcagtcaagaagtgataaaggattatatccacctaacccctaagatacctagggtatagaccatgcatttcctatgttacatctgttgggaatgtgtgcccctactgaaaagatacagaaag

SEQ ID NO: 404177 - DNA, 658 bp, Cannabis indica
tcatagaacaactgagaagacaataataggacatactccattctcgctggcatttggctcgaaggtaatgctgctagtagaagttaatattgcaacccacagacgagatttctataatcaagaagaaaaccaagaactattgaaattgtccttggatctacttgaagaataacgtactgagtcgcaaattactaatgcagcataccaacaccgagtgacaagatacttcaacaagaaaatgaagaagaggctcttcaacgttggagacttggtgctaaggtgagtatttacaaaatgagggacgcatctgcaagagtatttaacccaaactaggagggtccttatgtaatcgaagtagtagtaggaactggggcttacaaattagctcggcttaatggctcgctaacaaagaacccttagaatttggaacatttgcgaccctactaccagtagagtgcttctgtaacttctatttctgatgtaatattttgaacttcaattattaataaatttgaatcattagtcaagtaattacaaagtttcaatctttaaaattacttgaggggcatatgtaaaaccctaactattttaggcatgttaacgtgatttttttaacgtactgtgcagctcgttgctaatcaacaaggttatcgaaaat

SEQ ID NO: 404178 - DNA, 640 bp, Cannabis indica
agggcataaaatcccaacatcttagagaaaatgagccttcagagaattgaagaatgtccaagattttagctttctccgtagctttgacacccccaaaaaacacctaagacttggcttcattagatgtcagccatgtcacctccgcaaagttagtgagagcctctttaagatgtgtaaccgcagttggagtacccttgcaaaaaaggataaggtcgtccgcaaaacaaaggctaatcaagtttagagttttgcacattggatgatacctgaaagtcttcttagaagcctctaaatgaagccttcaggtaagataatccatgattagcacaaacagtaaatgtgacatcggatccccctgtctaagccccttccttcctttaaaactttcttgcagtactcttccattcatcattaaagaatacgaggtacccttcaggcaagtcattatccacagaacgaatctagaaggaaaatttagagctacaagaaactcctcaaggaagcctcaatcaatagtgtcataagctttactcaaatctatcttgattgcacatctaggagaaacccccttcctgccataactcttgattaagtcctggaagatcaaaatattatgagctatcgatctattcttgatgaa

SEQ ID NO: 404179 - DNA, 809 bp, Cannabis indica
cggtcctcgtattatatatatatatatatatacatatataatgaaatcagaggattttggactgtttttttctctgattttattttagattttaatgtatatatataatatatatagttttgatatgttattgagaattggtctactcgtttttgagttctgatcgatccatatattttatttgatatgatctttacttctgtttctatttattaattattaataaaaaatatatatatatgttagaaaatttactctggtttttttctttttttttttttaagaaataattagagtttaatatttcatctaaactagctaatcatttagttaatttatatatattaatattagtcgataaatatgaattagaaatgttttggaaaagttcataataaactatcaatattatttaaaatattttgaagaaataattagagttataatatatacattagaggaatgaaggaaaagtattaactgttaatttatgtgcgattatattagtggaacaacgaatatgtattagagatgttttaagaaagttgaatagtaaattagcaatattatctaaaatagagagtgttttttttgtcaatctttcgtgctcaaatatatattaaaataacttttttaaaaaaataaaaaataaaaaattcataacggtgttgttgttataattataatatcatcattgaaatagtttaaagtgtcaaaaataaatttagagatttttgaatatgcttggtagattggaatattgaaaacaacctataatttttttaaaaaatttactaaataataatatt

SEQ ID NO: 404180 - DNA, 628 bp, Cannabis indica
attcattcataaaattaataacaaggcataattttttacacttacaatatttaaaatttacgtaatcataattaaactattttattttaaattgattattataataattaccgcgacatatatataacctagtttagtgtatagattaatagtgtattttaaaataaaataatgtgaaaattttaagaatattatacttttgttcatgctctaaataattacttttgtttttcttaggccatcccaataggacactaaaacactaaatatagtatagtttcacactatatttactccaatgggacactaaacttattctcaaaaaaggcctttgtctagcatgtctcaccaaatttagtgggacactgtaaaccacactatttttttaattttttaaaaaattaataattaaataatactttaaagaagaaaaagtaaataattatatatatttagtattaaaatattcttattatattaataaaataataaaataataaagaatataaaatttggtgtaatttttagtgttgtggttggaattgaaaaaaaaatttagtgttgaaatagtagttttttagtgttgatttaacaccaaatttgagttttctcattgaagatgccttta

SEQ ID NO: 404181 - DNA, 530 bp, Cannabis indica
tgcccaggagggctgcatgtgcaacccatgaaggctgcgcgcagccctgtttgcgcgcatggaaggatttgcaggggtgggcgccgagtttcctcgataattgcaggggactcaagcacgtgcagcatgtccgaacctggtgcaagacgcgacttcaaacagggatttttgtccctattccgtgagcgtaagggtgttttgtccgagtctctggtgcgattaagcaccctctcgacacccatggcaacccaaaattcaaaccttcataactttgtcaatttttatcggaatcgagtttcgtaaaaaccaaaattgcttaatttttcacaaggaatccaaataaaatattttcagaaagaaaataaaattattttcatgtaaaaatttcataaatcacatatattcatcaagtaagcacataaaccaacgtgaaaccatctaaatcaacacaaacatcgttttaattcatatttcatgaaagtaaatcattaccatggctttgaggcccgttgttagaattattttaccag

SEQ ID NO: 404182 - DNA, 610 bp, Cannabis indica
ttctgggaatgctaatggggcggtttaggctgaggcaaacgttgcctctagttccaaatccaacaacaagaagaagtggaagaatagcaagaagcatgttcaagctatgaaaacagttaaaaagaaaaaggttgctactcccagtgataagccaaaaggaaaatgcttctattgcaatgaaaagggccactggaaaccccaatgccctaagtttctagcaaagaaacaaggtatttctttctatgctataaactcatgtgttttagagaattattatccccttgggttattaattctggacctactaaccatgtttgtttttcttcttatttcagctccaacggcttgaacttggattgctatcctagcaagttgaatcagatggttggacaaatgggtggagatagtccaagatgaagatgaagctcgaaatcttctattttattatcatttttgcattaattgttttaattcctaaacaatttggatttcaattattggtttgggatttttattccctattttttataggctaattagtaatttttctccctgaactttgacatgtactaaatcgtgctccctgaacttttttgggcgttaaaaattc

SEQ ID NO: 404183 - DNA, 558 bp, Cannabis indica
aaagagcgcttctgaaaagcagaaatcaaagctaaataatcagactccacataactaagaggaagagcgacgtgtgaaaccaatccagcactatcactaaggctaatgctcctgcttgaatgactaagaagtaaccaataagtttatatttgtaaattttatatgcaagtgttttaacaaataataataataataataataataaaaaaaagtattagtgacaaaaaattaagacgataaattcatatatatttctatatatattaagtttttttttttttttttgattcatctatatatatataagtttgaatgtcattcttctcacctacttgtgttttaaaaaaaagaaattaatgttgagggaccacgtgtctcacttttggttgatctcattaacttctaaaaaaaaaaagttaatattaaaaggccacatgtataactttatttgttgtgatttacttatacttacacaaacaatatcaagttcaacaatactgaaccacttggggctagctcaagtggccatagttgggtgtgtgagtgttggaggtcctg

SEQ ID NO: 404184 - DNA, 596 bp, Cannabis indica
ggcctttatataggagacctaaaccctagattacagttttgaaccctaatatttgcatagtatgttagaaaattactaaagactaaattacccttgaatttagatattattcaacgatcttgttcggcttttaagacctaattcatagcccattagttgttttccacgtgttaaagtgcataggaaaccatacaaagcacctccttaccggccaagcctctatggagggcaggctagccggcaatggtgcaatcccaaggctggccggacagctcttgtgagggagctggtctatcacttgatgcccatttgagtgtcgaggtctccgtttgcttaggtgctgacttggccttctaattggcgagttgtattgccacatggtactaattttgtccacataagcatgccatgtcaggaggacaaaaatcaggataacaagtttttaatgtggttagggcatgaactagccttagttcacgagtcaatattattcagtaagtttttcacttataaatgcattaagaaatacacaaaatgtatgttctcaagtttccctgagcaaagtttataagagagttttgttgggttttatgccc

SEQ ID NO: 404185 - DNA, 779 bp, Cannabis indica
gtaagtaataaatagataatatattagagaatatatgaaatacatttataacataaataatatattaattataagagtataattattaaatatttaaaaattctttattcatatttagaaggtataatcttgtgaggatgtacaagagaattaatattatacgatatgaataaaataagttggtattgtattaaagtaatgggaatctttaatatggaactgttaagtacagtttactacatactatacatctaatgtgtgagtgatatttattcggatcacatatatagatggacatgtcgtaaagcaagtgtgtataattagattatgcatgactggaccggtatgtaataaatatttttcattaacgtgctatttaccatgaaagtgtcattcatatcacaatgatgatcattagtatatcagcctaaatactaagtatacatgaacacctatttgtgttcattgagttctttaattcactcattaaagtttcttagagaagatgattcatacaacttttatttagggagcttaataacttgagttactaggaacatgttatacaatagtggaatctaaactttcctaacggatcaaatattagttacgtaccttatagtgttaattctgggagtgctgatagttggatccaaatctataataagttatacattatctgttgacattgaattaatggcacataaggaataaagagataattagaagggtaaaatagtattttgaccaactctcattatgaactaataattggaggg

SEQ ID NO: 404186 - DNA, 894 bp, Cannabis indica
ccttttaattgaggagtactatatatgtatagaaaaaactataaatgataaggacatgtataatattgaacgtttttcataaggggaaacaaacaaaacaaaagagtacgtaaaaacgttaataaataataataaattgtgtctgcaacttgcaaatttgattggtttttgaatttaattttttgaatacacataatatatataaaatcatttttataagatttgctatcgaagtcaaataaatatatggatagggcttttttcgggggcacgactgacataaaaaatatgtgtttatgcataatataaaaaaatatgaatttaagtacgacatgacatacgataagtctaaaaatatataagcacaaataaattaacttatgaacatagtacattaaaaatcttaataatttaataataataataatcatataaatatttatttattaattaaaataatactaagatttaaattataataattatacttatttttaatatgattatgtgtaatgaaaaaaaaatataaaagtaattaaaactataaaatacacatacattttattttagtattcagattataaatttagtattcttcacactttattgatgtttcaaaattaacagactcttgttggtccttttgataaaggtgattcaaaatataaacttataactttttatttttatttttatttatctattcatagatacttctattttttctctaaattaaataaaattattacaccattttaattatatataatgggatgcttaatattgagtaaaattagataaaataaatttttcgttacaagaacttagaattaaaagttatgtttgacaattatatttatataaatttctctatactatatatatatatataat

SEQ ID NO: 404187 - DNA, 754 bp, Cannabis indica
tcaagttcattaaattaccaggaaaaaggagtagggattcacaggaagaaatccctagctcccacatacattagaaaggagaacttgagaagttgcaattaatatcattcacaaacagaatggcttgctaaattcaagttaattaagtaatttcttgcatcacatatatattaatttataaagatgtctatatcaaatataatattacaactgatctatatatattatcttccccagtgaatgcatatattctctctatatatatatacacgcacacgatcgtaagtttcaatattgtgtcaaatattatatttacagctatatatgtcatgatcatacatattattattttttcttttctttttttttttttatttttggtatggagctatcatatgatcatatataattacaaatatatattgtttaattttgtaaaactgaaaaacatcatgatcacattcacatagcatatgtagagatcctatatgtatggtaatctagacgagttgttctttaaaaataatatataaagatatccatatatgccattaatacataacatatatatatatagtaaaatttatgcatgatacatgtctatatatatatatataagttataacatatacgtaattgtataaatatcatgaatattacgttgtaaaaataacaaagtattacaaattgttaatttgcatattcaaataaatatatcaatatataaattaaattaaatgatcaatatccttac

SEQ ID NO: 404188 - DNA, 927 bp, Cannabis indica
ctgtatggatcacatcactgccaaataatggaccaatatttttaaaaaattttggattcaacattgtacccaagtatatttattacatgagaagttcaagaaattttattaaaaaaaatttcgtaaagaataataagaagtattcaatccatacaaaatcctaacaaccaaattttaatatatacactaataaagaaatacgaactttaatatatacactaataaaaaataatcaaatatgtagttctcttttgaagctaaatggttttttaaaaactatgtccacgtggtgttagtgaacttagggtgacgactatgtttttattatttatgctaagattggtgaaaattaaatttatttattttatttaattataatatcaaatgtaaaaaatacttgtagcaatcaaaacccttcatgctcttaacaacctctcaatagttcaataggagcctcacatgatctagtaagttcctatttcaatgtaaattttaaaatttaaaaaaaaaaaaaaaagaatcaatagactcctttgtctatatcatatactttcaaaaaatatataatttttgacctcaaaaagtgatcaaccgacagcggggtcatgcagatttgatgcttgccacgtgtgtgaacaaataagaataaaaatcaatagacaataggatttgttatagaggttccacccccttgggatagcgggtatcgacctaccgccattttagttgtattataccgagagagttactatccagatcaatataggttggatctgctatagtacccttaggattacaatgtatgaatcaatacctagcagttttcaagtttggacaacctagggtgttggaaaacttaaggtaggtgagtgagagagaacgaggaagagagagaaagtttatcagacacttagagtttgagatcag

SEQ ID NO: 404189 - DNA, 523 bp, Cannabis indica
taataaaagaaattttagagcactcacaacaacaagtaagttataatagctaaaaaatataaatttaaaattaatcaacaattcatttttgattaaatgtgctaaaataagctaaaaaatttaagctaagtacctactatttaatcgctaaatgtatccacacactatttgttattcaaatttattttattttagttattatttttattatttcttcttttctctttctttctctcacttatttttcacttaaataaattaataatatctaaatatataggaaaaatttaataaaatatgtttacattaagaaaaaaataacaacctcaacaaaagttaaatcactatttgcaatgtagatttatatttcatatcccaatttcccaaaattatgcctcttatatcaaaaacatcacctattctctctttcttttaaggaaatttacataatatacttatttttgctattttttttacatatatactatgaggcggtaatatttacatttttactgtgtatatt

SEQ ID NO: 404190 - DNA, 524 bp, Cannabis indica
taattttatcttgtgaatctgcagaggatgcgtgtgaaattcttcgaactcaatttgagggtaccactgatgtaaaaagatcacattttaccatgtttgtaaagaccgcctagtcttaatttggaaattagcagataattagggtttaattatgaaaattatttattagcattgaattaattatttatgatgatttatttgaattcagaatgtatttttgtgtcacatatagaaatttcataattttgcatattttgtgcccggcaacattggaacgcggtgtatggctatttgaatcacatcttcgtatttttattatagcgggacaatagtttagacattaggaatgtcgggattagtcgggattttagaatttcctaaaatacccctaagtacccttttatgttgttttagtgtgggaggagcaaaatggtcattttgccctataagcttttgtcttttttgtgtaatttaattagataagtataatcagattttaataatgttttggctgagaatgattt

SEQ ID NO: 404191 - DNA, 633 bp, Cannabis indica
tgtgaatatatattcccagaatttttttggcctttctaaggtctttcatttcaaattctttactaattttcatagagtggttatattattagttataaaataataatattaattagagttatttgcgtcataacctccttaagtggttaggtttttgtaactaacccctaattctaaaattttggtggtaaatttcctaaactcaggtttttaatttttatttttctaaaattgtttttttaatttttaaagaaaaagaaatttttttatgttttttatttttaaaataattaattttttattttttaaatatttacttacgtggaccaataaaattatgtcacgtgtatactgtgtctacgtagacattccaccatggcagttaatacctaaaaactgattgaaatgttaaactgctaatagaacacgaatttagagggttttgccactaaaatttttagaatttgggttagttgtaaaaatttgactacttaagaaagttatgtcgcaaataacgctattaatgatatagtacaatttttattgagtaatttgcggcaaaaccccctcaactatcaatttacttgcaaaaacccatctaacctcatattttggtgggaaaaccctccaaag

SEQ ID NO: 404192 - DNA, 594 bp, Cannabis indica
ttttttaactcaatacaattgactcgtgaactagtgtttattaatattcgaaccatacaaaaatcttggtcttattgtctttaatttatttctttacaaagtttatttattttattattaatttttgaaaatctcgataaacaacaagaaaaattatataaaaagataaattacattgtttacctactttactttacatattttaaattttacctttatttccatattttttaagatatacccttttataaatgatgtcttcattataccccttaagttaataaaaattatgtgttagacttaagtggagggcaaaggtatattggataacctactcacaaaaataataagtacattttaataaaatataaaatgagaatatttttaataataaatacgaaaaagaggtatttctcaacttattacatttctttttgggttatttacataaatatgggaaaatatactatagtttacatatattatggcaagaaaacttaatgccactaaatatggcattcaaaacaaaaaagttaacaaatatgggaaatgacatgtctaataccataaaaaatattaaaaatcaaatcagat

SEQ ID NO: 404193 - DNA, 503 bp, Cannabis indica
aagttcttttttagtaaaaaaagcgttttaataattatagagggcatttttgccaaaatcctttcttggaaaaaacacatcttttaattctggcagttgtacagtttcaaggatcattatgaatcatctcttcatattttgtctatcgtccaaccgttagatgtcccaatctttagctttcttgtcaatagattttgtatataaaaggacagctcaaacttattatttttcacaaacctgtggctttttagtgagatcccttttcagaatagatcatttctttccagctagaatgtcccttttgagttcagaagttcatccttccaaaattataatattcagatgcaccaaccgatttccatttgttcccaaagacttaaagcctcaattagagtcagaaataatggattccaaggttgaggagctttcgaccaatccaaaccaggagaatcctatagcctaccatggtcgatcctcagaagtgatccctgagggtatatatc

SEQ ID NO: 404194 - DNA, 1943 bp, Cannabis indica
tagttttcatgaataatttcatcacatttaacttttaatttatatttgaataaatttaacacatattttttaatttcaaagtttccactttgtttaaagttgaatgttattaattcaatttttttttcaattaaattatgaatttttaatttataaaacttaaatttaacctataactgataaactagttttttttgtaacaactttaattatcttttcaattttctaatttgtttaaattaacaatttgtttaacattttaaagtttcaaattatttaaaataaaaaaattaatttttaacattataaaagttaccaattaacttatttaaatgaattttttcaaataaattatgacctttttaatttatcaatttttaacttaataatgtttttaattatttaatatcaacaagtaaatttgtaatattttaaaattaccaacttatttgaatgaatttttgttataattaaattaccaatatttaatttaaatttaattattgatgttctaattattttttaaatttaacatattactaatatttttgttataattaaagtattaactaattttttaaatttaacctattatcatatatatgatattagtgatgttctaattattttaaaatgtaacctattatcaaattgaaaatgttatgctaccgaaaatttgacagcataacactttacaattgatcattcccaaatttttaacacctacacaaaaatcacaaacataatgtcaatacagtttacatattaatttttgtcacccatccgaccgcaatatatttttcatatgtattttcaagtaaacactgttttactaattatataacatataatataagcatattaacctgccaatataacgaggagtcactttttgcaaaaacactaagcaaagggacactaaaaatctgtttaccaaaaaaaaatattaagtaaataaaataataagtatagtactattataataaaacacactattcatatatactatgtatatatgtatatgtagtattatgtgtatatatttatatatattatatatgtatatataaaatttgagcctcacagtagtaactttagacagaaaaaataaaagatactaaaataaaagtatgaacacagggttttttacgttgttttgtagttaaacttctgcataatctacgagtcaatcttattcagatttctgattgtttttcaagtactcccctgtatgagttttttcgtcccccttttcatcttgtctgccactatttataattacatagtgggcagtaaattacaaaagttgatagtaatctttacaacaattattctctcaaatcatgggatttgagtacaaattatgctaagtaaatgcgttttttatttataattcacacagctgtgagtatcccatttttattgggctgagattaactcatatttaaagatatatgataagccttatctcatggggatgcctagctaggaatggagccgagttaactttgatggagagctgtggctcatcatacaacttctcaaaattaatattagtttaattcttataactgcatcttctcgtgtcgagatgatctttctcgcatgcatgccatcttccagcgagatagacgcctcattgtctgtcatcttgattcaccaaactgtactttatacttagtttgtataccatgtaatatacgctaagtttttttatcgttatcgtttgtctttcacacgacgagattgaagcctcgtcatgcacacttacactcacatggtttctcgtctatacataagttagcagttcgtacatttttgtctcgcagaagactattcagccagccgagatagaaacatattttgcaaatcatgtttctaacgagttgttccatgccaagtgtacttacgattgcattttttgagttcttcgttcttcccag

SEQ ID NO: 404195 - DNA, 966 bp, Cannabis indica
cacagatctcgtcttcgagtaacgtttgaattgataactttgcaaatagctaatatttcttggtcaacataacatcgagatctactttcttctcgcgttggcctactcgattaactatgtcctcgaggccttgaacgtcccgaacttgaacttgcttcattttgtaccggccttctcctataaaagaggttagatacacgtcctctattcaagtacgtgtatacatcctctctctcagctcaagatggacgttaagggtgtctcggaggtagcccacttgatctcggttgatttccagggtttctctcattactatgaagcattccctagttccctggttgaggctgtctcgcctcttcatacctagagatgcctctggcacatcagtttgctcattcccatgaattgcaaatccatgggaactttgaggaacatctcgccattattcttgattatttgtttgattattcattgggacatcccttgtatccccaggttgttcttcctgggtgttttgaggatttccctggtttatttcctgtctcttggtttagagcctcgaggttgtcctcgtggttttcttactgcaggattaggttgattctgaggaattgttccctgtgccgccctggccgttgcgcctctctctccaacttagcgtttcctaggttagattcggctaaacgttgtcgaagttgcctattctccaactccactaatcgtacatatctagttgggtcataagaatcctcactcttaggtacgtatctagcaatattattggcatcttcattccttcttcagaaatttgatcaccaccactatcattcctcctcaaacgtgaagtttcagtggtatggtttctttgagatcccatgggctcttttccaaggcgacaagttgtttcttcagggcgatttccatcgttttgattgtcattcgtcattgaatgtgattagatcaagt

SEQ ID NO: 404196 - DNA, 1023 bp, Cannabis indica
ttttcttttctaatttgaaagaatcatgaatgggtattgttagaaaaatttaaatttttatgtatatttttctatctaagaacaattattatttttatattatatgggtttggattgttccattaactaaaaaaaattaagaaaaaaagttttttggcaaaaaaaaaaaatatttgagtttgatttagaccatctccattaagagatataaaaattgtgctatatttggcacaaaaagtagttttgtggtaaatttacaccaaattattcttaaataacattaaagagagaaatatattattttagagaaaataatatttattttaatcattgttaataagagattaatgagaattaatcaaatattatttattggtataataaataataaattttatttatgaaaaaaattagaaattaattttagactttaaactatggcccacacatgtaggcctaatttacacgtgtagggtgacatataaaagtccgtgattaatttaattttaattattttaattagttaaaataatttaaattaaattaagttaattataatttaataaattattaaataattgtttgatgaaaaagataattattaaaataaaaaatctactaatatttattatttaaatattagatatttatatttaaatttgtattctaattcaaatcaaattagatatttacttttactttaaataaagaattaaataaatttatttgtaacactatatatatatatgatatatagtatcataaataaacagagagttaataaacaattaacagacagaaaatgcataacaaaatagagagaaaatatgaattgattttttcactcctacttctctctatcacgcctaccactatctctctccatctcacatgcatacacctattgtgtaagatcaaaaccctaattcaattacagtctctcataagttgagtacacactgtattacctaaatttatttatctattaaaatctaatagtccactctattcttgagtgttgag

SEQ ID NO: 404197 - DNA, 580 bp, Cannabis indica
atttctttatgtaactattattagatatcattattaattactataaaaaaaattgattacctattattcattaattgaagtatatttagattttattatatcattatttataatatattgttgtgtataatttttttataagtatattaaataccacttaaaatagaaatgaataaaaattagaaaaaatagaatcctaaaataattggatgttgcctcaaatatatattagataaatatatagatttgatttgatgactcaaaataataataataaaattataattaattggagaagattaagttatcaatcactcatatatttttagacaaatcaaagcgaaacgaataaaaaatattttatttatatctcacaagcatcaccaaaaatagctcttaaaccatgtaaggctatttaaaaaataaaactgtgaaactatattagcaaagttatctagaaaactttaaaataattataaaaataaataaataccaattgaatgatttttttctcttcttcaaaatttgtaaattgtccactcatggttatatatatatatatatatatatatatatatat

SEQ ID NO: 404198 - DNA, 694 bp, Cannabis indica
aaaaaaatctacctttgcagctctagtccttgctctagaccaacgagaaatcgcggtttcatgcttctcaatatcgaaaaaagatatcgaactcctcttgagttcagcaaaatctaagagcttccacctaaaattgatgcaaaaaattgtatatcagaacatgacagaacaacacaacacaacaaagactagaattgaacataaaagattagttacataccaactctgctctacaagaacagcacaatcagctaactttcgtctagttcggaagcttttgtagaccttttgaagcttaagagcagccatgtgtttggtactagcaggatcaggaatcaaaggtttagagtactgagaatctaattgtttcctattcaaaatggttgatgatacaatggccatattttgttctttcttatctaaagaaggaacctttactaaaataattttgtctaaatcactacccttaaagctaacagatgtttctaatgtcatcttttttccagagcctatagatttcaaaattgttggttccaaatcagtactattgaaactaacagatctaagaggtgtttttgcttgttcatctccaaaactaatggagtttacaatcatagactctaaaccagtctccacatcactgtaattggcaaaagggcatgaaaatgaaatccccattcctgttaaaacagat

SEQ ID NO: 404199 - DNA, 740 bp, Cannabis indica
aaccaattcacttttagtcaatattgtttttaaaaaacactaaccaaacatgacttgtttttaaaaacttcaaaaattattttttgttctcatttttaaaaacaattttttgaaaacaaaacacagaaaacaataccaaacatctcaattttctctatgagtttatgtaaaactaatatcagttttcattatatagattcaagattgggttctatggccttaccaaagaaagtaaaaaaaaattgggctcactactagtaagaggattgatttaaaacaaaactctaccctaattaggaaatttttatacaaagtacttaaaatcacatttttatatatatatttttacaattttttcttcattatattttcattgaatttttttttttacatttttttttatttattcgtatttttgtaaaaaaaaaatgttaaaatccataagaatgttaaaaactgtaaattcgtatatttgtaactttttgttatttttaggtatttatggaaatatctcttaaattaagtaaatgaataaagctttcagttaaagaagcccaatggcccaactgacaacttccagtctcgaacttgatccataatctttcggacttaataaaaatgtaacatagttctaatttgtacccaaatatttgagagcaaattacactctatactctttttatatttttctcttttatttttactttcttttttaaaatttatcatttttacttcttttt

SEQ ID NO: 404200 - DNA, 930 bp, Cannabis indica
gtatatttaatgcttttcttctaggtgctatgaatatgtttgattagtttagtatatttatatgaaaatcaacatcccttatttattttagctaaaatgtttaaagtttggttttttttttaattcattaattcgaaaaaattcaaaggaaatggttcgtcaagccgaagagcttgacgaacacatagaatgaaaccccaatctacatagcactagcttcaaataacaatgcttgattggctaacatgtacgccacatgattggcttcccctaaaaataaaaaacaaaaccacaaacttggacatgttgcactagacttttcatctcaataaaccagtccatccacctctatgcagcaatcttcttgttcattgatcaagtgtatcgccttttgacaatttgtttcgactataaattgttgaaatcccctatgaataccaaccttcagatcttttggaatagcaaatgtttgaacttaataatggagaattttactatttgaaaaaaaaaatgaataatagaaaatttttatattaaaaaataggggatgcctacactacacccctttaaaggggtgttttggtagatcccctatctgtttcaacactaaaattagttcaatttttttttttataattgtgcatgttatagttatttatgaccatttgtaaattttcaaaaaatttagaataatttacaatgccaaaaataaaatgtacatatattttaggctaattaggatttttgccccctcaactttaacatgtaccaaattatgccccttgaacttttaatgtcgttaaaaatgccccctgaactattgagattgttggatttaagaatttttgtctaatttcattcaatttaactatttcagtgattatttatgtactaaaccatgctccccagactatgatatctaccaaatca

SEQ ID NO: 404201 - DNA, 912 bp, Cannabis indica
atacaataatgtttccactactctgttcctgatcaatttatataatattatttatgtagttacagtaaacaatacgcttcactgcacaaactaatctacctctaatcttattgcttaaatattagcaataccaccatatctcattttacaatctgaacaaatttttacttttaattatattctttaatcatatattttataattatttaagattataagtttctgaatttaattcagtcaatttttttttttttaaatgtaatacattttgaaagattatattcgatacataaatatatatcagcatagttgacatttacatattacactgtaaaaataagattgaattacgtgtgtattcagttcaaaattagaattgaaaaaaaaaaaaaaaaaaagagagaatggagtaagatggtttaagagtaacatcacaattgcacacatgatgtgcccaaaaaggcaaaaagtattttgagaaatcatatattaaaaaatatataaaaatttataacaccgtgtgtgaagtactatttgtgttataaaagttggtttttatatattttgtacaatatttttttattaaactataaaataagtaaataagtttagatattataaataatataattttaacataaaaataaaaaataaaatgttaaactaataatttcatgaaacaattatatttaatataaaaagagacataaatatatatttttgaacaatatatattaaaagggaaatttgacaatatatgcttaaaaataaagagtacactaaaactatgctagcattctttatattatgaaaactatacttaaaacatttataccttacaattttacccctaaaacaaataaaatcataacactttctctctctccatctctcggatttctctctctctct

SEQ ID NO: 404202 - DNA, 522 bp, Cannabis indica
atatgaaattactataggtttggagttaattaattttcataatatttttcaagtaattaattttattatttatcattgtaattttatataaaccacactaataattatttttatagttttgtcattactttaataaaaggccaacttttttccagtcttgacaaaatatgctaatatttataaattgttgtatagtgtatggtgtttatattttttaattttttacaaagagaataaattgatgcttttaatatatagaaatcgaactgatggtttgatagtaaatttgtattagtttagatttggaataggttgatattgttagaaaatatgagatatcaatagaagaataacaataagatgaataaaaagactaagaaaattacaactctatgcaacaaaattacaaggactatagattaaataaaagttataatcccaaagcacaaaatacaaataaaaaaaaaagaaaagatgaggacaaaaatacaactcaaaagcaaatatatacacataaatgta

SEQ ID NO: 404203 - DNA, 805 bp, Cannabis indica
attttatacattttacattattcatagatatggatatgtaataatagaagattcaggcattttacatcataatggtatggcatttgcaaatgataaacatatttatggttatttattgttgtatgctttggcacacatacattccaggagacatgagtttaaagcaactagaaaatgagcagtagcaccagtaaatatagttgatgctaagagactaatgattcttctaggtcaatgattcaaaattttatgcccaaagattgtgaaaagtgatcaagatcagaaagtttccatgatggtatgaaggagatttctttttcaatattcaagactgtgtgatcagttctttcaacaagtaaggttgattagtaagcaattgatgcaaagtaatgatgatggtaagaatatagctttggagtttaaatcaatagaactttcagatgataatcaagttgatgcattgatttgcatatcaaagaaatcatattatgtatcaacctttaagtcgatagatggctcacttcgagagaattttgtgaagagaattattagagaagttaaatatattcagtgatctacttatgagaaacttttattttaacttggtttagtttaattatctagttgtttgatagttgataattgatacattattaattagtttgtgtatatttagttatgtgaacttattaatatttttaaaagttagattgggtcaaaattagaatgaataagctattgaggtaaaatcaaattaagaatcgggttaatgttagcatctcatatggtatgaaataatattttt

SEQ ID NO: 404204 - DNA, 235 bp, Cannabis indica
tttttttttttgtcttttttataaattttttaggcaatttggactctctttttcctttttatttttttaagtcagttgttgacttttttttcctttctttctcttctctttctctatttttcttttttattttttaatttctctttgtgtgtgtctctctctttttttttttaattttttttattctttgtatctttatctttatgtattaaaagtgtctatctaacggtaattc

SEQ ID NO: 404205 - DNA, 651 bp, Cannabis indica
tgaaacttacaaaattttatttcatctcttttatgtctcggatgcctcatgggcacaggtttacgaaatgcgaccctgtgctcatgtgtgagatagatattttcccgagtttcattaagcttggtatacatagtgtagattggcacgtacttgtcgtacttcttctttttttttttcttgtctttggctgattccttagagtcatctttcctcttagagcctcttgaattgtcaatctacgtcgagacagtacttgtcgagacagtgttgggtttacttcctgagccagtctttaacaacttcatctcttttctcgcttcttcttttcgaacaaacacattagccctcttattgaactcgctgatgtttttcactggcgaccctgtaagtcatcccacaactcgcctcgagttgttgatagattagtcgtgatccctgcttgaagggcagtaaactggatactgtcattcaaatttctgacccttgcagcagctgtgctggaacgacttaagtaggccttaagcctctcacccggttgctgctttatgttagtaagggaagacgcctcaggtcgcctgtctcttgctgcctgggactgttggaaatattttaccaggatctagatttactaccaagtatgtttcattaaca

SEQ ID NO: 404206 - DNA, 593 bp, Cannabis indica
acgtcttgccagctggcatggttgaaagtttctctctaattttttgaaggttttttgcgtgtgcgactggtttgcgactgggttgttttctgttctggttggtgcggcttcatcggtggagcacgacgtcgagtgttaggttccttcatcgactctcataggtttccaggaggttcacgattgagtttgggattgctttctctcgggttctatcgttcattgtctggttttgatggcttcgatgagtaaagctatggatgacatggagttccagtatgggcatataaagttggatgatgaagaagaatgtggtttcgagattgaggacgacgttgaggaggcgattctggtggacgatcgttggtgtttggtggggcggtttttgaatgcgagatcgatagattttgaagctatgaaacacacgttggttgggttatggaagccgggcaaaggcttgttcgtcaaggaattggggccgaaccttttcctatttcagttttaccatgagatcgatatcaagcgtgttatcaatggcagtccttggactttcaatatcacagttatccaaatcaggcaaatgggccttcacaatt

SEQ ID NO: 404207 - DNA, 503 bp, Cannabis indica
atttcgaatgcacctttgactttactgttgaaaatatttaggaaacccttagtttagaaactctgcgattcttctttgtcatagcttcatgcgattttactgtccataatgcttttttttttaactacgtaacgtctgtctttcatcttgcttattctaagcttcatgaaattttttgccctaactcgagaacatttcaaacttctcaagttttgacttttcttcgaacattcttgttttttaatctgttgagtactcctggtcggcatatttgcttgtttatccttcgatattccggccaaacactcatcttgtgtgttgtcttttgtagatgaacccaggtgagttttgggagagcaaacatcgaatcgacaaggacctgcttcaacttttgcacgaggatcatcctcgtcttcgttctagcccaccttcttctagtgaaggacattctccaattcttataccctgcaatagaatgatggctcgtataaagaaaacaacgc

SEQ ID NO: 404208 - DNA, 655 bp, Cannabis indica
ctaagagtcagggcgttacaatactagttcctccaatatgttgtttccatacactagaaaccttactatcatattcagggtgtgttttccacatcctaaaatatttgaaaggttttttcccacacttccatttgggaaataatgacagaatacctggggtatgatcataagttccctcattcaaaaataaagcttcagcattcgggtaagtatctaaccatttttgattggccatgattctatcgatcttcgagaatattctgtcttgaccttgctgtttgttcgtccatgtaaaaaaggtaccagtggctttaatgtcttcaagatggcattcatgaatgcactcaacaaactcagcttcggtctgatatttaactttgagccccactctctcatctttgcctaaaatagcattaaaatctcccattaacatccagctctcatctgctttcaaagtctgtaaatccttccatagctctaatcttccttgcctgtcattaagtccatacacaacagtcaagaaactttgaaaagtaccatccattattgttattttcaaatgcataaattggcttgtgcatttgataatatcaacaatgaaacgatttggattccaagcaatcacaatcctccccccttggtgccaagctatgtt

SEQ ID NO: 404209 - DNA, 656 bp, Cannabis indica
accatgatttgccaaggatcttgcgattggagcaaaaaaccaaattttacggtagtcattaagaccatcgctatacgtaatcagatcgatatacataatccatagtccacatttcctaaaccagcaaacactatatatcgaacgtacagaattattagaatgtatgcccccaaacgtgtagccttgaacagttgtgggttagattgttcaaagagtttgggatccattggtgtatggacagcaatggggataagaagagttctagattatggcagcagccatttttcaggctatttggctagaagaaatagtaggatttttgaaggcatagataacgtcctttggaagaaggttaaagtatggactgcaatatgggtctacaggacaaaaagctttcagggtctaccttttcaagacctgactaggcaatagggttctattttgtattagtgccttggtatggggatatagacataggcctaaatttatcaggttttgagcttattttgtattgggaaatttgattttctatacttacatatacctaatattttatttctaaactaatacatatcatcattgaaaatatatgaccactttatctaaaacccaaaatacccctctcaaattttccatactttttttagtgcaaaaac

SEQ ID NO: 404210 - DNA, 504 bp, Cannabis indica
tttttttcttaggtttatatggagaatttttaattaaaactgtttcaaacttacacggaacttgaacaaaaaatatatatatataaaaaaatacagagggacattaatataaatatagctttttttttaaacaaaaatttacaaatttgttacaatatattttcttttaggatttttgcctcctgaactttgacatgcaccaaactatatccctgaaattttttaaccgttaataattttctttgaacttttgagattgttaaattgatagatatttgtcaaatttcattcaattttactaattttgtgattgtccatgtactaaattatgctctctaaactttgatatctacagaataatactcctcgaactttgacgtgtatcaaattaaacccttaaactttcatttatgttagactttccttactaaaattagccttaaaatttaagaggtattattttatacatgttaaagttcatgaacaaaaatcctaattagccat

SEQ ID NO: 404211 - DNA, 736 bp, Cannabis indica
gtgatctcaactcaaggtaaggctcctaggcacttctctttttggtttcttgagttttaagttaaggaattatgcatgttttgtgagttttgctactgtagttgttgttgatgtttgaattgtgtttttgaagttaaataatggttagatatgttgatttaagctagttttgagggttactatgttggctgagcaagctttgagttttataactcaagcttggctctttaatggtggatttgtttctgtgcatgttgtagtgttttgttgccttgaatatgttctttgggatatatagaacaggtttggaaggttttgtttgatgtggggctgattttagtgagatatgaattgttgaaattctcctgcactgaaccagtcggccggttcagtgggacctgtaggaactggaatttcggttgctccctaggaaaccccactgttgcccttaattttgtccaaagtacgtggaccaatgcaactacgacaagtggatttgaggaatatggttttaagataatttgactaagtcttcttaagtcaagaggatcagcaagaaacatacctccaggagaaagcgtgaggggtccacgcactcccggagggcaaagctatagcaaagcacctccgggaggtatcaaaccccatctaaacagtcacctcgcatttaatgccgcatgggagaaggcgtattggaactgccataaatattaagtctgacggcgtaacccccctt

SEQ ID NO: 404212 - DNA, 633 bp, Cannabis indica
ttagtttattcaattctcggtagaaaatgcacatactcaaagatccatctttcttcttgacaaataatacgggagcttcgcagggtgacacactaggtcgggaaaaccttaggtcaagcaacacctgaagctgaattttcaattctttaagttttgttggagccattgtgtaaggtgcctcagaaagcggttatgctccaggtgccaaatcaataataaaattaatttctctttgcggtggtaaacccaaaagttcatcaggaaaaacatccaaaaattctcgaaccaccctaatgtcttttggctgaacgatctcaggccgtgtggtatccaatactacggccagaaaccctaaacattcgtcttgtaacaattctctagttgttaatagtgaaatcactgggatccgggatccctgaaccgatcccacaaaaacaaacggttcctcatcctctggttggaagattaccatcttccatttacaatcaatactggctgagtacttggataagaaatccattccaagtataatatcgaaatccgctaaacccatttctattaagtcagcacccaacttcctatccttaattctgatcggcatagacctaattcaccttttggagatgactaatt

SEQ ID NO: 404213 - DNA, 453 bp, Cannabis indica
cttcatcttcttcatcttcttctccagtgcactacacaaagcttcacggggatctcaaaggctgcaaatctgagcatggagatctcgtagatctgggcaagacctcgaagatttgggctagggaagaagaactcgcgcagaaccccgaagctcatctcgcgtcctccttcgccatagtcctcctcttccgtcgtagccgtcctccactgtagatgaactcgaagtcaacattcacgaagggtagtgactctctattacagatttgacttccaaggttgatacagagaagaattcacataagaggagttaatatttcaaatctgtataattttttagcttttagttttgaaatctaggaataacaatcggatgccaatctccttggtctggcagtgagaagaagaagaagttgaaggagacgaagaagaagaaaagaaagaaaaagaaaaaaaa

SEQ ID NO: 404214 - DNA, 687 bp, Cannabis indica
caagtttaagtaaactacatcaccgattatcacgccagtgtaaatccggtgtattgataaatctcaggactaaataaatttgaagcatataatcacaattattttctactgtgatggcatcactataattgtgaatagctatatgttcgggatttaataaaacttatatattaaattgatgcatgtcgtaagccacaatacttctaatactttcgattattttagtataatcgtaagtaagagtcgatcccatgaggactatatttatttaattattcacaatttagtgttgatgattagaataaaaaatagcaataattaaaattaaagaaaagaacaaatttaaagtgagactacgatatgagaaactagttaaaggttattcgtcaccctcaacaatcattcctaattcctattaaagaatgtaattttcagtttctaatcaaactattaatctcgcagataacgttgaagtagtcaattatcccaatctccctattgtatgtagtaatcaaggcgaagcgctcaataattaactcttttacctaagcagtaaatccatgaagcatgcaatttatttaacttggataaagcatcgagatttatggagatagactaatctaggcaaaaaatcaatgaagcatataatttatttaacctaggttctattcttcatcacaaataaaa

SEQ ID NO: 404215 - DNA, 589 bp, Cannabis indica
gtgcggctaaaaaataacaaacactacgttagatgtacaggaatgattgatgtataattatgattgtaaataatagtgtgccatgaatccaatacgtggatttcgaatttgttatattgatgtaactcaaacttaagattctaagagaagagagatgagagagccattcaagattagtactaataagattagtagtgatgttgatactagaagcaccatttagtttaagaaattgcaaccttgtgaggttcccaagctgagaaaaaggaatgaacgtgatcatataattgaattcaaagttgagatatgtgagtctacttaaagaaccgataaactcaggaattctagtaaaatcattattactaaaatcgaggtacctcaaatgttgtaattcaagcaaagaaggaccaatttcaccacccagataatgaagatcaagagtgataatatgatgagttaagttataacagctgatacctctccatgcacaacaatttgggctattacttgtccacgaggatagaagattgtcatcatcgacaaagcctttcttcaagtcgagaagagcttgtctctccttctctatgca

SEQ ID NO: 404216 - DNA, 553 bp, Cannabis indica
gctagagagagcacccaagaactaaactagcactaagtttttgagtataactattgttgattaaagcatcaatacaaacataagtgaaaaatataaggattgtttgactttataacttaaaaactatttttaatttttaaaagtagaaaataatttttaaaaactaatagaggtatttagccaaattttataaaaactgagttttaaaaaattaaaaaacagaattatcataatgttattttttattttcaaaaatatttttttgtacatattttttttttacattattgctcacatacccggaccatgctcggactcggaccacagaccttcacctcgaactcggatccagacttaaacctgaatcgtagacccgaacttggacccagccctggctcaaaatctcaaacctagactctaacgccctaaataattaggcacgctacccaaaaatgctcatgaaaccctaatcccctaatcgggattactaattaaaatagcgcagaatttaaacttttatattaaacaaactgaaaataaacttgtaatatat

SEQ ID NO: 404217 - DNA, 784 bp, Cannabis indica
agtattatcgtattatttatatttttttatagaatttatattatctaatttaacttgaaaaaattatttgcattatattttatttattactttttttttggaagttattatattattacttaattggattgtgtatattataatatattatattttttttatgacgccttatttcaaggaaaaatagactttatgttatgtttaatatttttaatatattttttaatactattatttacattaatattagtaatatatttgggataaaatctaattttacttaagtgtgtttattattattgtttttatgaataaggatcattgtattgctcaataaccaaattacattctccaattacaaaccagacaaaattcctaacaaaatcaagctccaaatacctctcatactacttcttattttttacatctttccataaaccaatctctatctatagctttagccttttctggcattacaaggttaattctaagttgtatttctttttcgattttctgtacagtattctggatataccataaattttaattccaatatacatcatttcggactctccatatgaggtacatgactaaggatacaagagcagcatggatgatactcttcctagtagaagacgaaatttttgatttgtcaatccaccttactaattgcagcagatcccatgattttgctctccaatctagccatcctttgatcccctgtaggcacatcctgctgtaaatgatagctaaaaaataaatggcttaaattttcatctctatt

SEQ ID NO: 404218 - DNA, 416 bp, Cannabis indica
tagctttgtaattttttcttactagagaaagattatataaatatatccattatatataaatgagctatgaattaattaagctgctcccaattatttatagtagtatatataaggaagcaaagcattaattacttaataatagctataatagctaacccaatgcggatgttggtgataatgacagataaagagaaggattcaagcgaggtgttgcatgggcatacaagggcttagccttaaacatggagtttccctctccactactcaaatctatgctctccattccttcaggaatggtccatgtaaaaccttgcaatagtcttcccaaaagcataactgccatgttggtccccagctccactccaacacaccctctcctccctgtcgtaaagctgataaaccgaagctccgtctct

SEQ ID NO: 404219 - DNA, 556 bp, Cannabis indica
tttttgttaaaataagtggtaacttcactaaattatttctaattttaaaaaataaagtatttgagtgttttacttttattttatttaatatttgtgatataattctcattacataacaattaatattccattacataatgtaattaccattacattgtaatgctattaccattaaaataaaatcaaagattataataccaattttaattctattaatctatattactttaaaccaaacatggccttacatataaggttaatccttttgtattgttttattagtaaataatgatggagaaaattacatgggcttatatttaacaatataacaaatgatatatttttttaagaagcaaatttgtatcacactgttcatggcgagccaaagggtggggcagccggagcctaggccccaagccccacaattttagagatcccgaaaaattaaaattaatattatatatataaataaaaatataatatagttatagatatagatataaattttggttcaacaatttttataaaaggacttacaacacaattggtaagagag

SEQ ID NO: 404220 - DNA, 1277 bp, Cannabis indica
atgattcttgtggtaagggaaaacctaaggtgaaacacaaacagacgaaaggaaatagtaaaacatacaagttacctgggtttccttatgcatttatggtatggttaaatgaaaccattcatttatgtcttaaggcctctatttgctaatatgatgcttcgccagagtataggatttgcaggttgtaacgccctaacatttaggcacgctacccaagatgattacgaaaccctaatcccctaaatgggatcactaataaaatgagagtggaaattaaactttaaacgaaaacgaaataaaaaataaacttgtaataattttaacctaacaaacaaaagttacatgttttggaatcccgaaaattgttttacaaaatattacaagtcttttcccttagccgacctaagcggcaaaacaaagttacaaaagttccaacactggtagaccccaacccgcttggtctagtgtggcctgaacatgtacatttatcgtcccactcctacactcatggctgattagaaaccgatttaccctttcctgtagagtagagcacccgtgagccaagcccaacaagacaatataattatcaacaatcataattaacacatcacataaatattaatgccatttcatttttgtctgtatgacacacacccgcgtgttacgctcacacgcctatttatatctatgtggcatagacctacgtgttacgctcacacgtctatttacattaaggccttagaacggttcatctcggttctagttaccgagtccaacccgattatgtcttgaacacataaccctttacttcaatatacacttatatatatcatggcacaacaattacatattaataatttacttgggtaataaccctaagccaataaaccgctcactttagagtaataactctaatctcggtttctagtttttcatatatatcacattccatataagcgccattgcgcatatctctacgtgctaactactgtcttacctgatgtcccacaaatatggagattccaaatccccggtgctcctgaccaagtgacggtaatcctagtcacaaacccggagtacacaagtatagggttaacccctaaattaatttccacaaattataaaattagcatttaaattccaaatattcacatagagctcgaaaagagctttccaacgatataaagaacatcccaaacggagtgccgagtcaaaagttatgactaaaacaaaaaaaaaaaaaaaaaaccaacaacatgctgccataaaatggccgc

SEQ ID NO: 404221 - DNA, 779 bp, Cannabis indica
ttatttgaattcagaatgtatttgtatgtcatacataaaaatttcataattttgcatgttttgcgcccggctacgttggaacacggtgtttggttattagaatcacatcctagtatttttagtatagcgggacaataaaattagacattgggaatgtcgagattagtagtgttgaaatgaccattttaccctttaaccattttgttgattaaccttgtggggaagggtattttagtcatttacccctttatttggtggctgaattttagagtggcagctgacaacaatatgttaattaatctaagtgtaatattgatttattgaaaaattaagaaaattagaaaaaagtcgtaatttgattttctctctttctcttgttcgaaaccctaaggaccaacagctttaggagtgttttcttgctgcaatcagagtattagatcaagtgttagtgatttccaagccaaggtaagctcctagtcatttcttctttagttttcttaagttttaagaaattgattttgcatgaaatggagtgtatagttgttgttcttgctgtggttgtttgttactatttttcaggggataaattatgtttaaataagttgatttgagcatgttttgttaagtagtttgttgtttgagcaagctttgagttttgaaactcaagcttggctctttaatggtgaaattcaattctgaacttgggtagttgttctattgcttgggaaatgttttttggggtctaatatgaaggtctggaaggtttggatttggttagg

SEQ ID NO: 404222 - DNA, 620 bp, Cannabis indica
ccatagaaataggaagcctctttgaaagtatctagccttttaacaacctagccttcttgaatatatgtttcttcgggttacccctaccaaaatctggcacacatacgatgaatctcattaacaatacccacaagaagtcaaaacaaccctatagcataagtagaaatcgcttgaatgactcacttcaaaagaaactcacacccccagaggagaaatgttttgatttccacccagtgttcttattctagatcttatccttaatgaaatgaaagagcccactcttagttttccctgcaatgcacgagagactcaaatacttatcatggaaatgcactaaccgaacacccaaatcgtgagccagagcaatacacaagtccctaaacatacgaggagagaaacacaccgctaatttattgaggttacctaactaagccgatgcttcttcataatcttatggaatcgaatacaactctcctaatttgtttcaaggaagaaaaatctactgtcagcaaataacaaatgtgaaattattggaccatggctcccacagactaaacacataatagtattttggccaatctcatgcttgatgatagaagaaagactttaggagaattttg

SEQ ID NO: 404223 - DNA, 770 bp, Cannabis indica
cagtgggttacgggaaatcgacacatgggaagggtggcgtgtgactacttcaagcagctattcacttccaatccgactactaaagatagagttggaagatttctaaagaattatcccgaatcgtatatcccgagctacaaatgcctacctgttggagcctttcaccaaggaggaggtattgaaggaaatgcgtgacattcatccccaaaaagctccaggaagtgacgggttgcttggcctactttacaggaaatattggtcaattatcggtgatgaagtttcaaaagtatgcttaggaattctcaatgaagggatgcaggtaaaggacatcaatgacacactcatttgcctcattccaaagatcccaaagccaactcgaatgtcagaattccgaccgataagcctatgcaatgtggtctataaaattgtggcaaaatgccttgctggctgaatgaagcaaagtatgcatcaagtcatttcggaggaacaaagtgcctttgtggggggtaggctcattcaagataatgccataattggatttgaaagccttcactgtatgaagactaaaaggtttgggaatggaaggaaaatggctctaaaattggatatgtccaaagcatatgatagagtggaatggaacttcttacgaacaatgatgaggggattgggatatgacgaacaatggatagaaaaagtcatgagatgtgtggaaagtgtttccttctcggtcctcatcaatggtgagaaacttgggaatttccaacctaccc

SEQ ID NO: 404224 - DNA, 811 bp, Cannabis indica
tatataccaagctaaatagagcctaaaaacatgactagtttaataattaaaccaatcaatcatcaatatatatatggcaagactatggtaggacctaacaaaagttccttactggtagggaagtttttttgaccattgattttagatcatatagttattatgatgtaaggtgtatactcttatgataggactgcttatatacaatcaaaactttattcatattataataatatttaaaaatatatttattctaaaacataaaataatattagtaaattaaaaaaattatttattttaatttaaattattattatttttttaaaacttaattagaattatttttatataggtatttatttttaaaaaattattttaattatgaagtttgttatcaatttttttatactaataattaactataataaaattaattacttaagtatttttgccaccaatttatttacatacatagttctaccataattatcttttaagttaatttactttaatattttttataaaattttgtatttatatttttatttgaaatattttattattatttttatcaagaaagataatttctattaattaaatcgagccaattacatccacaaggagatttctcttcaaaagataaacttacaaatcttatacatttttaagaacaattttttatgatgctactatctatacaactcgaatttatacatttttttttcatttatatacaaatttctattaagccaaatgtcataaattgcacctactaacacattccgaatattaagagtttagttttttttttttt

SEQ ID NO: 404225 - DNA, 1075 bp, Cannabis indica
catcacggaatgcattccgtgaaagtacaatcacaggacaaaatcatatccctatatatataagtaatacaaatgtatcttgatcaataatataatataacttaaaaataaaattatagttttgaaagtaactaattcctatataaacaacaatatgatattaaaagtaattaattggtaggtaacaaaaatgtaaatgagataatactatctcaaagtaaaacttgttaaaaagaaatcaattagtatcgtagtaccttattttttaataacatctagtaacttttaaatatagaatttatcttttttggataaattagtcacaatataaaatacttttattatggtacattttaaattttgtttgagtttaaaaattttgttatttttttgtaacaatttataaaagaaacaaaataattaattttgatttcaaatatattctttggtgatgataagaaaaatatacgtttctcacatatcaagatgatcaacttgaggagtagattgcaataatattattttttattcaaaataattaacgatataattgctattttgtttttaaattataaataatagaaatagatatagatgcaaaagaaaataataaaaaaaataaattaaaaattttagtcaccataaaaaaaaaaaaatgagaatgatgaaaaaaaaaaatgtgccactcaacactatcgatagaaagtgaatatcatatatttttttatatatgcggtacaagtaccatttattgtaccatttaaataattgatggtatatttgataattattttataattaagtatataattaaaaattcccagcactttaagtaggacacaccacttttgttatagcaacttaatttattgtctctcatatggagaaatgataattcaatttttttcttttattgcaacgtatattaatttatttttaattattcaaaaaaatttaaaaacatgtgagatatatgttataattataatatataattttataaaataaattaaaataaaatttctctaggtaccgaaaaaaaatcttacaataataatgcccctgcctaaaaaaa

SEQ ID NO: 404226 - DNA, 576 bp, Cannabis indica
gctactagcggagcttagatcgctaggtttcaagtttagaaataaaagaataggataaaaaaaagaaaagatttatcggaagggggagaacgagagttcgttcggtcgtttttgtttatgtcaactataacttataatatatatattaacgataattttttatatatatatatataaaataatattataataatataatattaataaaaaatttattattaatagttattttattatttattagccactaatctctatttttagaatatttggccaacttcgagtatcccaaaataccctggtatttttaaaattaacttatccaataataccatcaatatttttttaactaaaaccattgtgacatttttggcctccaatcgggtctccagggtcgccgaacttaaaaatatttttatttcacaaataactcatattatatccacgtatttcaaataaatctctgtaattaataaattacacttatatatctacttatcgaatcttcagggtcaccgaacctgaaaatatttttattccacatatagctcatattacattcacacatgctatata

SEQ ID NO: 404227 - DNA, 507 bp, Cannabis indica
gtggttcgatgtgcttttggtggcacgttgggttgctgtgattgcgatatttattattgttattgtttttgttgggttgttgtggcagtccgaagggttgtagtgatctgaaagtttatgttttttttattttttttattcttttgaactgaagtaaaaaactaacttgcatcagtgctttactatttgttttgttaataaactgaagcaaaaatcttttagcgtctgttactaagtgaagcaaaaaagaaaactatttgcgtctacaattatagcgttggttacacaaaccgacacaaattctttatatgtcacttaaaaactaaagcaaaatgtcatttttgtagtagtacactaaaaccaagaaaaatacatatttgtcctttgtcatctagcttctttctcttctcatctggaatatagacataaggaattgttgggattttatgcccttaataaaatctatttcaatgtaatctgatttgttatcaatagaagattagaaat

SEQ ID NO: 404228 - DNA, 561 bp, Cannabis indica
gaatttagaatgaaagtggttaaagtacatgaattttattttaaaaccaattagtaataagacgagtagtccatgcattatcttatatataataatttatttctataaattaataataagggactaactctaatatcaaaatattatcatattttaataagcatgataccctttaatggtatatccatagctatatttttcaattaatcaaagagacttatacttagggaaggtaattgtgcatggattaatacataaaagaaaattaaaggtttttggcgttttatttttgaaatatttttgttgtaaaagaaggtagaatataaataaggtatgatagatgtgtagtatagtagcaccacgtgatgatgtgcaccaacctatatatctaccaataataaggagtttgttattttttatttgaagattattgttattatacaccatatgatagtgtctaaagccatatcaatatctatggtacattaatttttgagattatttcacaaatacataaaataataaaaaaaaaattataaaaatacaattatacagaatttt

SEQ ID NO: 404229 - DNA, 802 bp, Cannabis indica
gcactggatttacactaatgtgaatcagcgatgtagttttgttagacttggataagttgaatgtcttttcaagggcattagcaatgtaaacttgtatcggatgtatcagatatgcataagactggattgatattcattgtgaaaaagatatcataaagttaccattatatcttttttaagtcaatatcacttagttgatcttagttcatttgatctcaatcctaggatggttaagctttagcttaattgtactatacgtgttcttaaacttgttcgttaccagcttacccgtaggactagcccatacttacatcttgagaacatggtagtataattgagtgggagcgttaatcatagatatagaatctatagcttctataattgtttagaagtgaaacaatattttccttaaagcttggctaaatgatataaatggaagagctctaattttggcaatataatagtttaccaaattatcatttatatggagctaagtgcttcaaggataaaatacatcgaagggtggtaatcttgtccttactcgatgtaaaccgtccatagaggatcattgattattttgattgaaataatagataattttagcctatctatatttggtatatatagtgttccatgtaattaagagtgtaattttgaatctatagtatagccaggagaaatttataagttaagaaatttattcatagatttcaatatctacttattgggagcttggttacataggcccatggtccccacattatctaggataatatttgtaacaccctaactatcttaggcg

SEQ ID NO: 404230 - DNA, 567 bp, Cannabis indica
agtttttacaaccatactgtttgcgtgtcaaaacttaagacaaataacttgtgtttttgctcttaatgaaagcaccgaaatgttgacctcgcttttagccaacgacagtgagtcaaataataagtgattgaataatataattaaaagagaacaaaaataataaagtaaaatgaacaacaaaatttcaaagaggttcggccccgtgcgtgtggtaatagctactccccttgtattctattgacttaagagaagcaacaaagtgttcttcccctttgaaagctcttacaactgatctcacagtaattctcttaaatcactattttctctttagaatctctctctctctgaagcaattcttttgattcccttcatagtgaggctaggtcactatttataggggcttaatgcatgagggatggattctcttttgcttataatgcataaaataggaaattacaatgattacataattacaagatatgaaataggaaactgatataagttgccctatttctctgactcaatcccacgattatagggattctcttcatgtctagacataacaag

SEQ ID NO: 404231 - DNA, 550 bp, Cannabis indica
gctcaagcataaggttgagcagttgatgaagatcactgagaagatctctaggaagcaaagttgtgtcatgtctaattctgaggaagaggacacggagccttgtgtgaaaagaattattgatacaccatttccagatcatttcaggatgccccaaatggaactgtatgagggacggacgaaccctagggaccctctgtccaaatacaattgcatcatgcaggtcaccaaggcaagtgataatgttaagtgtttgtgttttttttattaacattgagcaagtccgcgaaagactgtggaagagattatctccaggatcgatccacaactagaaagatctacaggtgatgttccagaaacagttatagtagccaaggcttatgacttagaagctagctccctgacaagcatcaagcaacaacaaggagaaaccttgaagaaatatatccagcgtatgatggatgtggctagcaaaatgaaagtcagtgatgatatgaaaatggtggctctaacatcaagacttgcaactagatgttaggttttgtgccctaaa

SEQ ID NO: 404232 - DNA, 318 bp, Cannabis indica
cttggtccccttagaaaatctgtattaaacttaatagtgagtctattatagtcgaccttgtacaatgacagggtctggcaagtacccttgggtacggttgtctagagttttgtctatggcttggaacctacaaggaactcaacctcttggcttagaacctgcgaggatctcagccttagccttagccgagtacatggttcctataggaactttgtgttggaaattattttaccaggatcttagatcaactcacaagtatgttgatttcagatatctagcccttgattcatttctgtagcagagcattatcaatatctg

SEQ ID NO: 404233 - DNA, 707 bp, Cannabis indica
atgtttagaattttttgtactaatattagacaatttacaatagttacaggggaatttttaaacgctaaaaaaatttaggggacatatttaatacatgtcaaaagttcgaaacggaaaaattactaatttagaccatttttaaaataagtaaaaatagtaatcgttaaacttaatttttgtataattttttttaatataattaatttgaattttttttttaacatgaacagatacaaaaaataataaaaatttttgtacacaacacttttaaatcgaattattattaaatttatttgataaaaattattcaaaatcttatttatactatttaaaaaaaataaaatttatttattttttaataaaacataaaatccatatagtaattcaaaacaaaaatatttcatattattacaaataaaaaattaaagagtagcctttaaaaattcagtctatcattggaaaatgtcaagagtgatataacacatcacaacatacatgaaagatgagttgtcaaagtgttttgtgacagcatcattgtgccagccaaaagaatgtatgtgcacaactttcaagacacttttctttcattattttccaagcttataattttcttctcttttaagctaattttaaataaaaaataatggagtagaagctgtatttttcttacttaatatgagtatgtgactgtattggagtctgtacat

SEQ ID NO: 404234 - DNA, 787 bp, Cannabis indica
agctcaaaacgagctttctaatggtactaacaacatcccaaatggatcccgagtcaaaagttatggtcaaaataagtcttaacacattctgccctaaaaaaacctctagtgggtcgtggcactcaaagaccatgccgcggctcttaggttaaaaactcaaaaaaaaaataacttttaggtgcccaaaaatacaacaacttaccaacaagcttctcaatcaaattgaggtgtttttccaagcattatacaccagaaattcattcatgaactcaagctcaaaactaaaataacgcatgtccaatattaacaatgaattttaagtataaaacaaagctttacatcaagtacaagaacaagagattcaagtttaaagcacccgtaccatagttatactttaattcaaagcttgaaaccccaagcatacatgcttcaatgaaaaacctagaatttcatgattaaaacccagaaattcaaactttattatactccctaaaatcatacaaaaataacctaggagcaaacaacatacatcataagctcaaatacacaaaaatcatcacatctcacctcaattcatatcaacatgcatatataaactcaaagaacgtcatgaataaggttcaaagcttcaaaaaataagaataaacataagcaacaaaaggagattagaaagcttaccaaaaattcctcaagcttcaaccaaaaaaatcacataaaacccataccaattcaagcctttttctcattaaaatagtcttgaactaaatcatagagagagagagagaga

SEQ ID NO: 404235 - DNA, 563 bp, Cannabis indica
tattggctatacattagattggattgatataaacagtggaaaagatatcataaacttactattatgtcttttctaagtaaatgtcacttagttgatcttagttcaattgatctcaatcctaagatggttaaattctagcttaattgtactatatgggttctttgacttgtttattaaagttgaccaataggatcaacccaatacttacatcttgggaactcgatagtttaactgagtgagaacgttaatcgtagatataaaatctataacttctataagtacatagaagttaaatgatggtttccttagagcttggctaaacacgtttaaatgattgatgcctcatctcggtaattatattagtttctcaaattatcatttacaagtagcttagtattttaaggataaaatatattaaaggtaaaacggtaaatctatccctattcaatgtaggccatctataaaggatcattgattatttaaattgtaataatagataattcatagcgtatctatatttgatatatagagcattctatgtaatcaggagtgcaatttcaaat

SEQ ID NO: 404236 - DNA, 674 bp, Cannabis indica
ttgaataatgattttgctaatacgatatcatagtattataaaagtagggctcgaaattgtcaaatacgcgacttgaacagataaaacacgattgttgtaatatttatttgtgttaaatatatggaatcattagttgttttgaggttttatgttagttggcttgcaacagatataactgttgcattacagtttcatcacagttgtcttgaagttgacttcttctttctcttctgggtgttagagttgtaatctttttcaagcaaagataccttcaacttcttctttactggacgatgactttagccacggggggagcaaaatcggagtcatcatcaacgatgactgtgcgtttccctttagccttgttaacaactgatttatgaccccttttgaagctttttttggcaatgaatcaaattgagaatcagagcgaaaggtaatagtcattatatatacaaaatgaatgatatatatgaaaaaaaaactgacaaaggaggtagttggaagaagaagatgacgaaggttatggctgagaggtggttttcgtgggttttgaaagggtaatggctgcaaggtggttttgaaataaaaaattgagaaagaaaatgaaaaataaattgaattccaaatttgaaaataaaaatgagaaaaaaaaaggaaaagttgatatttgg

SEQ ID NO: 404237 - DNA, 598 bp, Cannabis indica
gaaaaaaaaactgagattatggttcaacgaagaaaagaaaaaaaaatgaaaaataaaaaaaaaaatgttttcaattttttaataaacttaaaaccctccaagtctttttttttttttattttaaaataattcatttacatttttaaataattatattatgtggattaatatgaatgtgtcatgtgtataagattgtacacatcaactatccatgttggcagttaatggtggtaaataaatagcaccttaaatttgctaacagttcagtatttcgaaggattttaccaccaaaatttgagcatgtagggttcaatgtaagtaaaatgatagttaggagggtttagctgcaaaaaaaactcaatctatactctcttagtattttacaacttccatctatttttaggtgttaagtgttatgttggagggtccatgtgtacacagtgttttgtctacgtggacacaatgtacacatgacataattaaattggccgatataaataaatactttaaaataaaacaaaattttaaaaaaattaatttcaaataaaaaaaaaacatttgaaaaaaaaaattccttttccttctttctttctttttt

SEQ ID NO: 404238 - DNA, 843 bp, Cannabis indica
tgccaaaaagatttccaccatttactattcaaatctgaagtcgaggcttcttgttgttcatctaaggtagcagttaaatggaagcctgacttgactgtatatatataaagataaacacttaaaaagaaaacaatattagaaacattgattctattatattgtttaaaaataaaataataatagaaaatattttttttttagatatgtagattgggtaaaaaaaataataatagaaatatatatttttaaatatgtctaatgagtttaaatttaaaataaaatattaaaaaaatattttacgctatataactacatttaatttaaaataaaaacatattttatattatataggaactttatgttaaagaacaatactttttctaatatattatcatttaatataacacaaataaaaaaagtcaatactttttattatataaccacatttaatatatcatagatacaatcataatgatgtgccttcttcaatcaatctatatatatctataatgctgttgttagggatggtgatgtggcaagttaccatgttaggaacctaattttctctttttttcctaatttctagctaaaaatctattaattgcgtattattatttattattattattatttattttaaaaaaactaatttattcaaaaaaaatctaatctccattttttagtcactcctaacctatctgccgcccatttttttcttctcttctcttccttttctttgcttcctcttccctgttattctctcttctatattccctcttctctatgatttaaggctttaggtcaatttcaagtaaacatcttttccctattacctttggcaac

SEQ ID NO: 404239 - DNA, 957 bp, Cannabis indica
attttttttttgataatttaaatcacaaatatttatatcctatcttcttcccaaatataattaattgatgtacttccacttacctacaacttctactatccaatattgttagccatgcatatacatgataacaatagccatatttacataggaatattcttataacaattaattaatgttgattggttttagcataacaatatataataggatacatacatatatggtcaaactgatccaacccctcaaatttcatagagaataatatatttaattattagttgcaccaactaaaaactagaaaaacgcattatatatatacagataatgtaaaaaaaataaaaatagtacaaattgtcagacatgagaaacacatggcgttcaaagtaagggtggcaaagaagtacacatggctttcgttcacaatggtaacattaaaaattgtttatcttcttccatatatcatgattgaggggcatgcacatgtatgacagtggtctcagttggaaaattgagtaacaatttagtgctggctatggaagatgataatttcttccccttcatatatctattttctatataaagtctgcttatataacagaattttttgtttatgaaaaattcatgactcattttttatttatattaaaaattaaatgatttattaagaaaaataaaataatttatgagaaattcataggtcactttttatttatatataataaaataaataaaataaatcacattaaatctaaaaaaatacaattgagttaatcctttgtacatctactattggtttttttaaatatacttatgtcatttagttggattttattttaaataagaatttactactatttatatattatatatatggaagaggtttcaatggttacatttttattgtaaccatcatggttacatttttttaaaccattggattactattaaatggtt

SEQ ID NO: 404240 - DNA, 536 bp, Cannabis indica
ccttgccactccatgattatttttgagatgtggcaaactactttgacgtttcctcggtccatattgctcctcgtgggtacctggccttatctgctttgttcataatatatcatcagaaaggatggggaatgccttctcctcacaaaattcactacctcctttccttccagacttgcccatctatgaaccattcagaatacttctacttcatgaaccgagaacaggatcagtcgtatgtttctagtatttgtagcacaaaccgcggagacaagcatcggtcattctacttttttacaaccccatggacgctacccactgtactttcaaccatacgggtacatattccagactagtcccgaccgaggagatgatacaacacgcgacaactttgacagccatgccagcagctgaaaagcatgcctcaacgattgtaactgcggagatgctcaagttagtgggattgtaccctcctaagcatagctcaactgccacaagtacgattgatggacctgatgctcctgttgttcccattgacc

SEQ ID NO: 404241 - DNA, 534 bp, Cannabis indica
taaaatatatatatatattatttttttatttatgtgtatttatattactaaaataaaatattattttatactagttttatttatatattattttgttatattggttttttttttattttttaaatttatttctacaatttaaaagtatttttttttttttggttatttttttcaaaattcaataaaaaaagatctttagcagcttcaagaaggtggacacaaaaatttcttttgtgaaatgtatgtgttttattaatgtgtatttttttctattatttttatttttatttgatttaataaatgtgtatctatttttttatgtttttattaatgtttttattttgggtttgatttaatatcataaaaaagtgagaacaatgaaaatattaaaaaagtttaatctaacataattttttttataaagataagtttttaagtttaggaattattaaaaaattagtttgtattttaataaataatataaaattttaaattgtaataatatgttttaaaaaattattaatttatatttat

SEQ ID NO: 404242 - DNA, 1009 bp, Cannabis indica
agagttagttgactacttcaattaaataaatgatatctttgactcccgcctactgggaaactatatcagtttgttagaaaccttggaaattatttaagatgtatttgttttatattttcatatgtctttattactcactgaatgtatgataatttctgaatgtgcatgtaatttatattgaatcatgttgttttctgttattaattgttgtagttttaattttgaatcttcattgttagtctaactaaacttgttgttttaatgggacaaatcccaaaggattttcatccgttacacaaacataatagtgttagatcttgacagataagtatttgtaaatgcagcatctagttgtatatccaaagatgacaacttaaactagtgtttataatatgaaataatgaagagatttataaaatcagaataactttgactcttgcctaaacgagacatcattggattcttttttaatcgaaattatcctttagtttttcctcttagctttttcatttagaatttccttaaatagtatatcattagatatattgtttataaatcattttcttatgatgtcattctattttcttctatgaaattgaatggtgcagatgactatatttccaatattttatcccgaaatgatttaaatccttgatcttaaaatctcctacttgtgtatgcttactatatacaacctaaacatagagttagatgagtagtggtggtccaagaaagaatcattacttaagatatattttatataaatttaagtctttgactttaaattttagattctaaatagaaattttaaatttcagtttccaagactggattgaacattacaatttgacttttacaagttgataatatccattttctatcaatggagtcgaactgtatgtttacgtatggaatatgagttttgtattctgtgatcaggatccacttcgactattctaagaactctttgttgtaactagacctaaatcatcaaaagaccacaaccaca

SEQ ID NO: 404243 - DNA, 781 bp, Cannabis indica
cgattctgcccctaataacctctcactaacatagtaaaagtgttgctggtgctttccctcttctcgcactattgcagcactaatcacattttttgagacagccaagtagaggagtaatgtctctccagttactggttttgccaaaactagaggtgtcaacaaatgcctttttatggtcttcagtcttaaaggcctcctcgcactcttttgtccattcaatttttttattgcctcgaaatacattgaaaacggtaggcacttatcagtcgacttcgaaatgaatctgttaagtgctgccattcttcctgttatggcctgaacttcctttggtttggttggtgatgacatatctatcaaagccttgattttttcagtgtttacttcgatgcccctcacgttgactatgaatcactataaatttcctaaggagactccaaaggaacactttttcaggttaagcttcatattgtactttcttaatatctcgaaacactccgcgaggtctgtagtatgatctccactctttattgacttcaccaacatatcatcaacgtagacttccatgtttcttccaatttgtctagcaaacatttcattcacaagtcgctgatatgttgccccaacatttttcaacccaaatggcatgactttatagcaataaagtcccatgttggttacaaagcttgtatgttcctaatcaacgacatgcctttttatctagttatatctctttatagtgaaatttttctcacctagaaactcgagactagactcctattta

SEQ ID NO: 404244 - DNA, 667 bp, Cannabis indica
tttttttttttttatatagtttccacgtacatatgtattgtttgttaaatttttgtcaattttttttgagtgttattatatgttgaccttgcttttagccaacgacggtgagtcaaaataaagcgattaggaataaattaaatagcagaaagtaaatagtataaaataaagaaaacactagattttatagatgttcggcctttatggttggtaatagcctactctcctttttgttgtcttgagttgtgagaagatgaacaagaatgacttactctttctcgaatgctcttacaataatctctgagtattttaatcttagattgaggtttctctcttaagtgttctctttctgaatattttcgtatcactgaatagtgagatgagtctactatttatagggaccaattacatgaaattaattttcctaaatcaataagaaataaaatggaaaactagtctattttcataattataatgaagaaaatggaaaacttaggccaatttcctttattctctaaagacacgaatctatcccgcaaaagtagggattatgttgtgacttgcattcggacatcccaccttctatgtgtgacttcgagcatcataactatctgcacaacctactaggagtagaatcatccatccaaattatgaaatatgttacacg

SEQ ID NO: 404245 - DNA, 549 bp, Cannabis indica
aaataatcatgagtgtttacagtttgcaatttatatttgaagtatgaaatagtttcaatactctttaaattttttttcttttaaacattagtatttagaccatttttttcagttaaagctttgtattaacttccaatcattgacacatatttttacacagacacatctaattatgtgtgaaaagctcttgttgatcactaaatttacgcaagaatttataaattttcctaattacccaatgataaatacaatcttttataattaatcactatggcaatttcgcaatcattgttgaccacttgtgccagatcatgcttttcaatcgatctctaatgaaggaaggaggtagcttccctatttctcttcatttactactgttttgttgatattctattgctgtctgggaattctgatatctttatggggtttagatactggttttatgaataacttatattgttctgttgatagcttccctaatgcaagaaggaggtagcttcctatttctcttcatttactaccgttctgttgatattcttttgctgtgtg

SEQ ID NO: 404246 - DNA, 598 bp, Cannabis indica
gaatgagatatatctaatgtattaaatttaatattaattggattgaattggattcatacaatctaaaaaaaatattaattaattcgattggatattgaatgtattggattttttaacgtctcatcaaacatctgatcgaatccaattgtatattcaaaaataacaatctatctgatccaattacaattggatatctaatatttagtgattggttattattagattggtcggttataagtggattggatctatttatccacaccgctaaaaataattgcacaattagaatgcatgttcagatacatgtttactaaaggggaatgagaatcaattatataagactgattcccactaatttgtttactaaattttagaatgggaaaagggattatttcacaaatacgcaaaaataacaaaaaaattacaaaaatacgattttacggaattttaaatatttttacgatttttttattttatttatagaaaatatggtatttttatgttgtacgcttgttaatttgttgttgagtttttgttatgtgtatgttatttttgttgttattttggtgttatttagatgttatttttatgtagtttt

SEQ ID NO: 404247 - DNA, 561 bp, Cannabis indica
taatgataaatgttgtagtgttaatacatatttcttaaacttagaccagtgtagatatccatacagtaagtatatagatagagtagattgcatcatataagagtcctaaccacttgtgtaccatcatgtcagagtagatgtgtttagtacaatttactttccaagcttctttcaatacgagaataactcaggttaagaagatatcgctctttttgttaggaaaaaaattaattatactaaagttaatagtttagatcttcttaatgtcttgcatgatgatgtattgtaaagatcatatcttttattgtagtcttgtttgatggatattttgttcattttatgcaaatcaaccagccactctacaaatgagattgttgaaaaggttcctggagaaaatcaaatcttgatctgatgaggtttgggaaattgcccgggggagtagagataaaggaaagaaggactagggttctgttaggctatttttagcctatgttttggatctaatttatgtgcgtttttagctgtgttgggacggaattacgcttgttttctatgttttca

SEQ ID NO: 404248 - DNA, 722 bp, Cannabis indica
agcccatgctcaaattcccggtcagaagcatgctgatgttattcaaatcgaccagaatgccgagcaggttagcccagccgacaaccacaaccagacgttgaaaaatatgttccaagggatggttagacaaagaaacaatgatctcgagctggaccgagcacgaggaactcctttctctcccgagatcaatcttctggcagtgccccacaagtttaaaatgccaacatggaatatgtatacaagaagagaagatcctctttctcacctcaagtattttgaaattcaaatggatttacaaggggtacgaggagatgtgtgctgcagaatctttcctgctaccctatcagaagccgcccaacaatggtattttaagttggcccctggaaagttcagttcatggaaagcattctcttcgaaattccatgcacagttctcctcctctcgccaacttccgttgcatctgggagacctagttgaagtcaagcaaagactaggcgaacctctcagagcatatatcagcagattcatgacggaggcgaccaaagtttcacggataactgaagatggaaagttatccgcgatactgggggccattgaagtcgtcggtgaactttggaaggatataaggaagaacgggctggtagactcattgagtgattttcttgaccgtgcagaaggcttcatcaagctcaaagaagccattcaacgagtagaaggtgagc

SEQ ID NO: 404249 - DNA, 506 bp, Cannabis indica
gaacaaaagagctgataaatgataattgcgtattaaattttcaacttgttattttaattttaactattaagttataaagaataacaacctaaacctaaacttaggatggttcacggtgcgggtggtacagttttttatcattttttaaaattaatttacatatgtgatttttctaattttttaaagtgcactcgcactgtaaaactaaaaaattgtagaaaccgcactgtaaaaatagggcggtgtagtacagtttctgcagtttggactatcactaaatatttttttttttacaatactattaccaaataattaaattatcacaaatataacaaagtttaagcaatacttgtcaaaaatatcataaagcttgaaaataaatatgaaaaaaagttttaagtttcaataatacaataactagtggactttgggctgggtcttcacatattggacctaaatacatataaaaattagtatttttataatatgcggtgtggtgcggtttg

SEQ ID NO: 404250 - DNA, 589 bp, Cannabis indica
aatgatgacctcgccctacccatctgctatatggggagttgacataattggggcattacccactgggtgaggaggagctaagtatgcagtagtagcagtcgaattcttcactaaatggatggaggccgagccccttgtttccataacctacaagaaagtacttgactttgtcgtcaagagcattatctctaggtttggaattcccatgaagatagtatctgataatagaatccaattcgatggcgacttgttcactaaattctgagagaggaacaaaattatcaaaagcctctcgttagtatccaggcctcaggcaaatgaacaagtggaaggtgtcaataaaaccttaaaggatactatcaggaagaagttagacgtcgccaaaggcaaatgggttgacgagctacctcaagtactctgggcccacacaactacccagaagacaacgatgggatataatcccttcttgctagcatttggctcggaagcaatgctgcctgttgaactgaacatatcgaatcacagaagagagttttataatcaaagaagaaaaccaggaactttgaaattgtccttggatctagttgag

SEQ ID NO: 404251 - DNA, 740 bp, Cannabis indica
ttatggcattcctctttatataatatgatttttctcatatttttatatatttttttttaaaaaatgtcatatttagtataattaggtttttatgtcatatagattagattagatctagaaatttgaagggtttttaggtttttcaaatcttcttcttgctacaaccgcacctctcttctacggttacggttctaatgggcttttaacttcttctcttcttctttttcaaatcacgggtagggttaggttctaatgtgttcaagcttctaatctttctactcatcttcagatcatagttgggattagagatattagattattttaaaaattcagttaaaatctgaacctttcttccccaattaaaaacccaccaaaaagtgattaaatgacctaaagtataaattgtaagttatggtgtcttgtcttctgacatgcaaagatcgtattcgttttgagtgctctatttttttttcttcttttggttctttggcagtggtaccatggcaccagacatggctgaaactttagccattaaagagacgttaagttggatcaaggatcatgaatgacataatgttaaactcgagtccaattgtctctcaattgtccaagttattcgaagtaatatcaccatggtttcgcctcttgggggagtggtgatggactgtcgaaagcttctatctattttaaataatgtttctttgttttttattaaacgatctgctaatatgactgcgcac

SEQ ID NO: 404252 - DNA, 534 bp, Cannabis indica
aaaaatcaaagcctaaatattaaattttaaaaatatctaatgtttttaatatatatattttttgtttatttaatctattgaacactacaaatcataaaatttatcataaaaatttatataacgtgattagaagagttgctatacattagattttaataacaggataaatgttatatgttacttatatatattttcttcataaacaaattattaacatgaagttttatatatggttatttatatttacatatttttaatgaaaaattaattattttatgtatatctattctactagtaaaaatttacgtgcgaggcacgtatactaattttatgttaggtatatctaaataatgtaatttatattttgataattaaaagtaaatactgaatgtaatatattatagtgtttaagaaaatttgataatttaagtgtaatatgttcttaaaataatctaaaaataaactaaaaattcatgttcaaatactaaagaaaacacaacttaaatgtgtgtgaaataaaaaagaaaattaaaa

SEQ ID NO: 404253 - DNA, 558 bp, Cannabis indica
tacctctgcacacacaaagtctacttgatcgagtagaggaaagggcagatgatccgagcaaagagtgaagttacctctccgagccgtgtatcaagacttaactacttcagagctgatgtcgtgaagcacaaaagcaatccctacaatcatgggattgtatcaaagggatacaacaagctgtcccaatcccccacttcatgtattctaaatatgtaatatatgttcttaccaattatagatattgtaagcaaaagggaaaccttccctcatgcatttagccctataaatagtgatctagcttcactgtaacagggatcaaaagaatggctttagaaagagatctaagagaaaatactcagagatttcattatgagagctttgagagagaaaatattgtgttctttgttcttaggtcaatacaatcaaaggggagtaggctattaccgaactaaaggggccgaacctctttaaaatcttgtgttctttattgtttactgatttttgctctgtcttaattacatttctaatcgcttattaattgactcactgtcgttggct

SEQ ID NO: 404254 - DNA, 576 bp, Cannabis indica
atttaaaaataattaatgtatatttatttcctttcattttcttactactatagttcaagtttaaaccggcttattatttaaatttataaatttgttttggaaatataatgttacctgctctctcaaacaaactttgaagtttgaattactcaaagtccactcaatattttgttttgtatttgtattaaggtttgttagcaaaactaatcatcctcaacttatatgaaatattattttcatgaaatagtttaaagtttaattaagattttttttcatcattaaaaatcactccaaactatagagacataataaataatttttcatgttaggtgtcttttaataaacattccacaaaaatatttgaatttaaccatacgaataacctttttaaaaaaattaatagttctaaaaattaaaagtatgatttaatacatatgtcaaagtttaaaaaaaaaactaatttaaactaaccttaactaactaaaaattagtttacaaaataaatattactcgaccttgtcccaaaattatataaaggattatttcacaaatatataaaaaacaataaaaaaaaaa

SEQ ID NO: 404255 - DNA, 443 bp, Cannabis indica
ccctttgttttttccttaatttgtatgagaatcaatatcataacattcattcacactccttttaagtaaacaagccattaaagttttattgaggtctatttttttttaaaagaaaaaagagtaaaaagtaattgataattttataataaattattttgaaaggagaaatgctaaaagacacctgtggtgcctagcaccttcctatgtgtcaatattgctattggtccaactaagtatcgggtcccatataatttaatataatagcttttagggagtatcgttagccaattgtaacgtaacatgtcgagaaactgctaggcaccactagtgtctaatagcaatattcttttgaaaggtatatgaaaagaaattctaaatttattgtgtttactttttttttttttttgtaaagaactttcagttcgggatagattaactccaaa

SEQ ID NO: 404256 - DNA, 508 bp, Cannabis indica
tatttttgtaaaaatccctaaaagaaagtccaatataagttaataaaagcccaataaaacttgtaaaaataatgaaatgcagcccaaataaaatttaaaaaacttctctacctttttcaccacattaccttttctaaaaatattatttcaactaaatttttgaaggttaagacttgtctcaacgagaaagtaaaaaaaaaaaaaaagcaaacaagaaggcgtaaatttgcgtaatttaaaacataggttaaattaaaaacattttgactttcaggtaaaaaaaaaaaaaaacataggttaaattaaacattatgactacctgccaagaacgattatagtcactcaactatattgtcattaacggtaatatcatccacgaaaataacagcattgctattaggtactagtagtgcctagtactttctcgacaagtcgcgttgcgattggcaagcgatacttcctaaaagttattatattaaactctatgtgactcaatacttacttgggc

SEQ ID NO: 404257 - DNA, 635 bp, Cannabis indica
gtggatcaggtaccacagctcgcgaaatgtcgcatcctcgcgacaacgcttgaggaaaacgtcctatgattggttcacccaattgcctgaggcctcaatatcgacatgggagacctttgtcgatttatttctcacacactttcaggccacgatgacttataggcctccctacacaactttggccaacatcaaacaagaatccggtgagtctttacaagactattttaaacgttttaatgcggaagtaacaaaagtcgagaaggctcctaagtcctcgcttgtttgtatgttgataacaggtgttttgccgagaaccgatttctggaaggagttacaagcgcgaagaccagaatcactagtcgaatttttcgcaatggccgaaccccataagagaattgagaattctctaacagtgttggaaaaaggcaaggataagcgtaaatcaccagtgccacgatcaagatctcacagtccccgagaaaaaattccagaggtcgaagctcgagaagatgcagcccacggagacagcgaagtctgaagttggccaaatctcctccaaagaaggagtctttgctgaaaaggaagggtggatcgcgttttgttaactataccgaactcgcggtgccacgagacca

SEQ ID NO: 404258 - DNA, 937 bp, Cannabis indica
acaatacggcgtaccaaacgagtatattgtatattgtgcggattgaattgaatgagttacttttacatatgtcaatcaacatccaatccgtattattgcagattttaaattttcaatccaatttattaaatccaatccagacaagtacgagtatcgactacactttgtagattagatcatgcgaattaaattaaattgggtattttataaatactcctacttcacctagtttttcttgcttccactattggaaggtttgtttattcctaaaagtggctgtagcggaacctcttgcttttcatcaagctatttatcagtgttgcatttttgtatatttcaacattcagatcgaattgaattgtaaaaaatctcatgctcaagctcaactgtcattctagtttttgaatcggctttaggattaattgttaaagacattatgtcaacttgtaattgatgttgttggtttttctagagatctattgttgtttcagataatttagctaagtatactttgattgttgatgctagcgctatttgatgacgtgattgtattttgattaatgctatctatcaatgatatttgtaatcctcagccctttttttttttagagaaatcctcagccccttttaaatgtgttttcttagattatatttttttcaaaagagaaaagaaattacctccgcgtttggttagaagtaatgaaatgggatggaatagaaaacaaaaaattttcattctattactttatttagttgctttttaaagtattggaataacattccaataaaatactcttttcactattttggtgaaatgactattctactttaaaataaaagaaaagatcattctaaataaatttaataattttttatcaatattttttatacattttaaattttattctattgatattcttattcctatgtttttatt

SEQ ID NO: 404259 - DNA, 1072 bp, Cannabis indica
cgatgcaatctaaaagctgggaccttgaaattattaatgatctacttgatgagagggataagaaccttgtgttgtccatacaattgagtttacatgccacggctgataagtggtgttggattgaagaaacaaatggactttacacagtcaagagtgcctaccgtctgttacaaaaagactctggtgtgcaagcttcggttgaagaccagaaaatgttcaaggctctttggcagttggcggttcctccgaaaatacagcagtttatgtggcgtgtactagttgggtgtctccaacaaaggttcaactcagcacaaagaagattaatgttgacttgtattgtcccttttgtaacatggcagtggaaaccatcactcacattctactcgactgccgttttgccaaaagctgctggtgtgtgtcaagtgttccgactggtgtgggttatgatggatttaatggatggttttatgctttaatcgagcaacagtcggctgctgtagtgaatgaggcagcgtgtgtaagttggaagatttggtctgttcgtaatgagctcctatggaataacaaaacttgttctgctatgaatgtggtccgatcggctaggatggtgcttaaccaatattgtactgctcaaactcaaaagacgggagcattattgattgatgatatcaataatgttgatgagcggtggaagaaaccaatttctcatatggttaagattaatgttgatggggctatttttcaggaacaaaataagttcggttttgggtgtgtggctcgtgattcgaatggactgctccttgaagctatctctgattctcggtttggggtagtaaagcctgagattgcagaaataattggtatcaaggaggccttgagttggatagaaaggaaacattggaccaatgtagtaattgaaactgacgctctggtggtggtacaagctattaaaagctcaatcttaatgccctctcagtttggattacttgttggggattgtcgagttctactttcgtctttgaataatgtttctttaaagtttgttaaacgatctgcaaatagggctgctcat

SEQ ID NO: 404260 - DNA, 473 bp, Cannabis indica
ataattaattttatataaataaacttataaattatttatatattttaattaagatataattattgacttaattataatatataacaaattataatttaaaagagattattcttatttataattagtctaatttgagatttaattttttttataaataattagaaattatttttaaataaacaacaatatttatttgtatcttttagggctcgtttcgtatatgttgtattaggtcgtattgtacatattctataatattatattaaattgaattatatataatatttttatataatactatgttaaattttaatttatattaaaatattatatatttatgtacctatataagtcaatatcacatacagttttatataaaaatattgcattaaatacaattcaatttaattatatacagtacattacggtgtaataggacgtaccaaacaaacccttaattaacttttacatgt

SEQ ID NO: 404261 - DNA, 741 bp, Cannabis indica
actaaactaaactgtggaataataaaattcttgagtgccataaagtgatgtggtggagtattctctcaaatgtgctacctatttgtgagttattggggcattagattgatattgaatatacttctttcctataggagtggacattcgatctaatccaatattttttttctaatcagatccaatctaattaataattggatttggaaaatcatcatccgatccaatctaattatacctcaaaatccaatttaatcaaatctaattactaattggattagatcgattttttaattggatatccaattacaaacctaaattataatattaacttaaaaatatgaagaaaaaaaatgtaaaaactaagtatcacattttatttaagtttaatacttcataaacataccatcgttacaagtgtaatgtagccaaaagttttaaataattaaaacatttctaagcaataaaatagaacaaaacatcataaaaataaataacacaaaacaactaagtattacaaattcaacaatacaaaaaaatctaataaaaatctaattaatatatatattatattttaaatatttttattatataaataatttttaactatatataaatgtaattggattggattagtttttaattagattttgagattgacattcgataaccgatccactccaagttataatctaacttttaacatccaattcaatccaattataattggatatctaacttttt

SEQ ID NO: 404262 - DNA, 547 bp, Cannabis indica
atatattcttttttttaaaaaaaattgaagtataagctgaatatcactgttaaatactaactgaattattattatattggtttcaaaattttactttgatgtatacataggtgtacactgtgattatctagttaaatttaaaatataaagggatttcgttgccaattactctatattttttcactttctaaattgacactttataaaatttaatttagtaaattaagttaaaattaaatctgtagcatctagtgttgtaaattcatgtgtgtcgtgctgactcgacttatattttttcgtgcttttcaaatgggctgagatgtgccctaaaaaaatatgggtcgtgccgtgctgtgccaccattttcaaaaagtaggcttggcacggcctgtaggcccaatatttttgtgttgtgttcaaattcatgtcgcgctttgtcttgttgccaacccatttttcttaaataggctagcccgtttacaatatttaggctcgaatttgtactttactttttcatattttcttacaattaatgagttaattacta

SEQ ID NO: 404263 - DNA, 719 bp, Cannabis indica
atagaaaaattctactatctacgtgtcctaaaatggattcactcatacactcatttctatttttttagtctattttttgatagtagtgtgtacgtagttctttaagattttaagtaaaattttgagacttttagaaaaattaaacaacattgaaaatagggttcaaatagttagttgtatgcatactttattttatatacttgtgaaataaattatttgaacattcctttctatattgttaattattttaattttttaaaattttacaggattcttaaataattataacatacatgactataaaaaaaaattagacaatttttttttgtaatactgaaacagataaggattgcattagtacatcatttttatgagtgtgcattgtagaagcaccgagcaagtctactataaacctcataaaataggtgttttggtagactatttatctatttcagtctttgagagagttttttagtctttttttatttatcttatttgttatagttatttagaaccacttgtagattttttaaaaaatttcgagtaatttacaattctgaaaaataaaatttacacattttgttgcacacacaactttttttttttttcgtttatgcacaataagtaactatttaaacctattataaataattcgaattttttaaaaatatacaagtaatcttaaatagttacaacgtacacaatcataaaaaaataaa

SEQ ID NO: 404264 - DNA, 541 bp, Cannabis indica
aaaaaaaaaagaaaataagagatatctaaattaatctgaatttaattgtaggatggaataattataattattgtcttaaaactgaagtataaaacatattatgcatagactatagtgtaattttttttttttttaaaaaaagttaaatactattttgaatcttgtatattttataaaagttattaattggattctttattttgttaaataataaaatagaccttatattttctaaaatggtattaataggactctaatatataataattcgatatataatgtgctatgacaaaactatttacattttctgtatttgttcgtgttaaaaattgtcttcaaattaattatatttaaaaaaaattgtcgaaaattaagctcaaaatcttatttttaccattttaaaaaataaaaaatttattttatcattcaacaaaatagaatgtccaatcaaacaaagtccaaataatttttttttaaaaaaaaacatagtatgcatacaattaagaaattgacctaaggatattagtccacaaaaaataat

SEQ ID NO: 404265 - DNA, 415 bp, Cannabis indica
aaaaaaaaagagaagaaatgttctgtaagttttccttttagatttggacacaacacaatggcgtggaaaaggcattttgcttaattgcgggcttaacttgagaaagagaacccggcttgggcttaagacatttgggctacgcccatgttccccttatactatttcagttgagaaagaaaggaaaactgaaaagaaatatgggtttaaccagattaacaaaaaaatattggtaattcaacatattattaatttctaatgaattgctatgcttattttttttttttttttactactttaaaactagttttgttttttttttttttgttttttattttacgtaaattcttacacagaaatatttatagcaactaacggagcaacttaagtcgtaactaaaattcgtatagcaacccac

SEQ ID NO: 404266 - DNA, 819 bp, Cannabis indica
acctagtgctttgaagagttttcctaaataccaaagatctaatagcaggagtgttcagacccaactgggaaggtccttatcaagttatagagataactagtaagagagccttcaagctgggaaggtacaacgagaaaatggagcttattctccttccaagatactggaatggagagcaccttcgcaaatactatcagtaactagcttacagaatgccactttgcaattgtagttctactaactcaacattagactgacaaagagctagtacccacgatctttttggcgtggccacctatcgttctttaacagtggcctctgctatacaagtcaagcaaggatagccatttgatatctagaagtaaaactttgttatgtaagcttatatattaaatttatgtaagttgcacatcaataaaagtcaattaatgaaaaaaaataatgtttatgtttaaattattgtgtttgaactacttgctaacaagattaacttcttaaagttattctttttcagtttgacatgcatacaataggcagcaccctaagaaaattcccatgcaatgtctataaaacttagtgaattataagtgaccaagaggccgtaagtctgcgtgctcacttaagaggcacccacactgtacaatgcatcaaactagcataaagaacttatgcagaaaaattttaacgcttagttttagctactaaacctaactttgagtaaggtccaagcatacttcagcttggcataaagaaaattaaatctagatacttacatgtcaaggcaataagaaaatagccaggattaaagactgcctggtc

SEQ ID NO: 404267 - DNA, 525 bp, Cannabis indica
tagcacacgggtcgcgacactaaaggcccagtgtagcggcccgcccccttggaatttgaaaattggattttttttctatatttttttttatccttttccggctataaaaagaagtggatcttcacacttttcatcaagcaattagagagtacgagtttgatagaaacaaattgaccgagaaggcttttcaacggagtttttcaataatttattataatctattttcttcttatgttcttacttaatttgtgtcgaattgttacgataaataagagtagctaaacaattattagggtattgatggatattatttgacatttgtttataattttaatatgatttggttcttcctcaattttttgtgttctatttcatttgttcttaattcttttgattgcctgatcatcaattaaatgtttataattttgatacgagatttaaaaagtgagtgtcaattgtgctatagtgaatatgaataaattttgatataggacgagagtgttggaatttattttaccaggatct

SEQ ID NO: 404268 - DNA, 933 bp, Cannabis indica
ctacttccacaattcaagagctatattctaaagcgaattccaagagaagacaatacaattgctgatgccttagcctgactttcaatcaacaatataactaataaggctaatctaatcccaattaaattccttaaagaacccaacatcacccgtgcagaagaaatttaaataattgatgcagctctgaaatgggtgacaccaaaagcaacctacctcaatactggggacctttcaaataatagaaatgaagctcagaagatgaggagaaaggttgcacggtatatcatcgtagaagtagtcatatatagaagagggttgtctatgccactacttagatgtgtcatacaagaagaagctgcacgacttttgtaagaagtggattatggcaaccacgcaccgggcaaagcctatcaaagaaaatactaagggaaggatatttatggccgactatgattgaagattcaaaagcctatgttaagaaatgtgataaatgccaaagattttcaaagataccccatgcaccacccaacgaactcactcaaatgcaaagtccttggcctttttctatttagggaattaatctaatcggacaattgccgaaaggtaaagggggagtgcagtatgcagtggttgtagtggattatttcactaaatggacagaggtcgagccattggcaacaattacatctaagaaagtgctagactttatggtgaaaaacataatatgccagttcggactctcgtacaagatagtctcatatatggcacacagtttgacagctagttattcaccaatttttatgcgaaccatggaatcgtaaaaagtttttctgcagtagcacaccctcaagcaaatggtcaagtcaaatcaatcaataagacacttaaagatactttgaaaaaatgacttgaagatggtaaggggaattggcc

SEQ ID NO: 404269 - DNA, 540 bp, Cannabis indica
taataccaaatatatgaggacagctatttttattttcatcctttcttctctccatctttcctatcctctccatcaatcttactttcctttcttcctaccaaacatagccttaaggtgctaagcaccacaagaagtgatacattgctatcggtgtattttaatattgagtctcacatattttaatttaataaataatataaaaaactactaactaattataagacattagtgatattagatatcttaaggtatcaaataacaatgctctactcaaattatatattagatataattatatgtaattaacccatcacacaattcaaaatgatgtaatcttcacttaaacatagacataaataaatttaatgtatatcattgtattataagtatatccaatttaagtattagaatgttaaattgtgcacatatttttactctttttcttatgttgttttctgttatgagcataggaggctaagagcatgtttggtattattttctgttttttgttttcaaaaattgtttttagaaatgagaaca

SEQ ID NO: 404270 - DNA, 480 bp, Cannabis indica
ccaagttccacacaacgagtaataaagataacatcgtcgatttattgttagaagagtttgaatatgaacatacctcaatcatctccatcttcaaaacaattaaaaaagtgcattgtgcaatttggttcaacctcaaaccatttgattgaatctgcatcaccatatcgaggcataactccaattcttgcatattcatctttatcatacttaattaatctacaaaataaaacaaatctactaattaattaatagccaaaagttgtaaatttgcctttattttttttttttattaaaaataaaaataaaacaatagtaattaattaattactcacgggcctcctcggactagtctcattatgtctatagtaagtggaatatcccataatcaaattgtacctaaagcaagtaagcaagccaatattatttaagaaaaattatttattataatttttatacatttttttatatttttacagtatt

SEQ ID NO: 404271 - DNA, 773 bp, Cannabis indica
aaaaaatttaaaaaaaaataaaaaagaaaaacattcttaaattttatggtttttttttaagttccggattcctaactactcaagaagctataagtataacttttatattctatttatttttttattttttatttttagcataaattataatgcatcatacatcaattattttatttttttttcttatatcaattaaatattatatttttaaatatatttttatataaaaagtaaaattcaaaaataaaaaaaataattaaaatatatttttaacttatttaatgaaattattttcaaaaagttacttttttttttctatattttaccttaatatgagtggtctaccatatatttatatctatatatatatttatttatatacttaaaatacacaaaagaattttttttgtaaaatatatatttatatataataataatagaacaacaataacaaaaaccttcacatacaaaattgagaggagtgttaccgttaatctcctgttacaatctcttaatcaatctccacgcccgaaaacacattctgttttcgatactgtaaactattcagaatttttcaaaaatttacagagataatactgtaactataacgaataccatatacagtagaacctctattcaagaatagactttggaccaagcaaattatattctaattgagataatactgtaactataacgaataccatatacagtagaacctctattcaagaatagactttggaccaagcaaattatattctaattgagaggtt

SEQ ID NO: 404272 - DNA, 541 bp, Cannabis indica
atgagacacgtaaatttatccaggttgtgagataatttcagtgtgaacttatttttactccaacaaagcaagattatggtgatcttcattagagtagtagagtagagaaaaacttatgtacaagtgattacagtcaagagctttgtcctcaagagtgttcttcaatcttgatactcacaacttcgagatcaacaacaactaatgtgttacagactcgaatattgtggtgaattaatacataataggaattaaataaaacaacaactaaagaactagaatggcagaatcaattaatgacattaatcaaaaaataaatacggaataaattaaatgaaatagagataaagtttaacgaggtttattaattacctttttgtggtgactaatccatgggaataactgtcatttggccaagtttgattcgatcttcaataatggaagaatacaaagttaatctcatcaacaagggtgtcttgcaccttacaaatcaactcacttgagagatgttagttctatttttggcatctttaatgtgataaaa

SEQ ID NO: 404273 - DNA, 600 bp, Cannabis indica
attaatttgtttttgttatatatttgggtaaatcggttttctccaaatcatataccatggtaattgttttatgagcagggaaaaatccttggtaattaggtggcaactattaattttataagcctgataaatgtaaaatagatttgtgtaaaacttatgatttaataggttgaatggattttgaaacttatatttctattgtagctaagtacttttgattactagttttgttttgtttgatttggtttgtattcaaccttgctgtgtgttttggttaatgaataagaatagtaatgaatttgctttgattacctgagaatttataaagtcaataaacagctagataggatgagttgatcaataataatattggttgggattagctcgaaacagttagcataatattattccttactccttattagcaaacaaaaaacatgtaaaagctgagaacatcttttttctaagttcaacctttgattcaagattcttgaacaaataaacacttcactttcctcccaattaataaaaaattaccaaaatatatatatatatataaaatattttctttaatattaaaaatatacttattttatcata

SEQ ID NO: 404274 - DNA, 668 bp, Cannabis indica
aaaaaatcgtttgacaaaattaatctaatgcatattagtggatacaacctaatttcataatgttgatccactcaaatctagtaattttctaatcttcatttctttcttccaagatgtgtatttattttaaaaagagaaaagaaaaatataaaatttaaatgaagattattcttttataatgaccactttattcaagaacggagttaagtatattgttgacctcaaatttggttaaccgagagtagagtcctatttattgttgatgcttgtcaagtgttacacaataagaacaaaaaaataaataacacaagattttatagaggttcgacccccttagctagcgggtaacgacctacttcccttttggttgtatatgttaattctatttttggcatatttacttgacaaaaatattttattatttattgtatatttttggctggagtatttaaattggtatccatattttgtgtatctaaatttggaaggaaagttgtatggaaattgaggtaaaaatggtaagtttaattacactatttattcttatctaaccagctggtagattttgatcttgtgtgagtttcccattatattagatcaaatttcttgaggagaaaactggagctaaactttccttttctataaaaggaaagtcgtacttactgccc

SEQ ID NO: 404275 - DNA, 546 bp, Cannabis indica
agctctaagagtataattatgaatattataaccttttcgtaactcataaatatttttagtcatataataagtgttgtagctaaaataaattgataacaagttgtatttaaatataattatttagttacaaattatttttattataactaaaagtgatatttaattaaaaaaaaaatgtaaacttcacaaaaatctaaaaactgcctccattcttgaatgcagttagaaaatcactatacatgcatgaataaaataagaattgagtttagagtttagagggtaccaacatttggtggtgtaatttatatattttatatatatatatatttatatatatatatatatatattataatttttaaacaagatttggtggtaaatcacaattatatatatttagatataatttaagatctcttattaatcaatcaaatgaatgttaggtgaggttgttggaaagcttccaacaattggattattcaaacaacaatagagatgatatatatatatatatatatatatatattaaagtgtctatctaacggca

SEQ ID NO: 404276 - DNA, 743 bp, Cannabis indica
caaagaaaataataaaaaaataactacggctctgaaagcatttacaattttttaggaaattaggtttactatctttttaatttttttggtttccagtttgttagagagatacgtgtgggtaagatgattttttttaatttaaaaaaagattgtttaattttttttgggtttatttgttaacgggagattaacatcgttaaatttaacagaatattcttttatttttaaggtatattctgttaaaccaagaaatgccgttagataggcacttttaatatataaagatatatatattttttttttccttttagctatgacaatactttttttagtaaatgaaaaaatcgcatctaaaaatcctttttattgtaatgctctatttctctctgtcttgattttagtcactaaaggctcgcaattttactaaattaattttagaattaatattttacgtatttttgtttataatttttataactttcatgaatctgatgatcttacattttgccctaagggactcttgcttttgtcttcctctttttggcgcatatggtggaaatgttatctcgaccgattcgtttttttactttatgcttattaaaagcttaaccatgccttaccactaagaacagattctcgaagaacttcttcaacaaaaaaaatcacagtttctattccgacagttcactatggatattgttggaaagagttccggcatactactctattatgataccgagctc

SEQ ID NO: 404277 - DNA, 750 bp, Cannabis indica
agaaataccaataaacatcatacccccaatcttactttaatactctacatcacaatttaaactaccatcagaaccctaaaatcccaaatgtttaaccatattttaattcacttccaaacttcatttctccaccacaataccaagtaaaatcgatagaagcaatacaagtttaaccatgaaaatgaaacatgatcaaattatgaaatgtaaaccatcaacttaaatttacgacatttcggagactataagctaaatagtctgatatcagatccaaatagccacatagaaatagagacttacctgagaaccatggctgctgatgttgatagtgatggcgctgcctcctcctcctctgcctctggtgcggaaaccctaggagcccaaatataatataaagcacaaggaagtatagaatcgacctcctgagtttcggaaactacgaagataccaccatcactttgggtagggctgtagagtagttgtgggctttacggccccataattcgagccctaatcgtcaattgggctttcctgtcccttttcggtcccaagtaatctatttccatggcccgttttaatgaaacaaaaaaggaactttttatttttgaagtaaaaaaaattaggaaaatttacacggtgtttctcaagttttttataatttgactgttatacgtataaaattatgtttttactgccatatattgtatactgtattttttattaaaaaaaaatgttccattttgttaaaac

SEQ ID NO: 404278 - DNA, 525 bp, Cannabis indica
taaattaaattaaattaaattttcaaataataattttgtcatcatcatatcaccatgttatattttttttaactaaatcacaccaaacatagtataaatccaattatcaaaatcctgtcgattaagagattatcaaggatgaaaatactaaaaatagaaaactttgtaaaaaaactcgcagaaagagagaaatctatagaaaactcactataaaatgccgaatttgaaattcataaaagtaaaaaaaataattaatcactatacaatgttagatctacaaaagaaaaaaaaatttaatataatgattattaaaagttgagaactttgtaatgaattcacaataggagagttctataaaaaaaacttaccatagaatgtcaaacttggaaagaattcaccaattttttcttcgattgggttcttctaattattgttgcatcaatatactaaaccatgcatgtatctagtcaaacaattattagtttctatgtgttgaaatttttagaactacatataatataaatt

SEQ ID NO: 404279 - DNA, 1409 bp, Cannabis indica
aatctgattcgagaacatttcattcacaaatcgttgagatgttgccccaacattcttcaacccaaacgccatgaccttgtaatagtaaagtcctgtgttcgttatgaaacttggatgttcctgatctaggacatgcatttttatctggttatatccaaaatatgcatccatgaatgacataagtttgtgcccaatagttgcatcaactaactgctcaatcctgggtagtggataataatcctttgggaacgccttataaagatcatagaagtcaatacaagttctcaaagttccgtttggttttgggacaagaacagaattggctatccacgagggataaaacacctcgcgtataaattcattaaccaacaacttatccacttcctatttgagtgccccttgtctctccgaatccaagggtctcctcttctgtctctttgctaggtagtttggatcgacatttaaatgatggtagataatattaggctcaatcccttaataaacttattagttgctattttaattgttcgtctaggttcttcccaatgtaaacacactttgtgggatttcctgggtctagaacaacttcttccaattcttcaattggtttcaataagtttctttcatcttgaatctgaagatctagattttcatccttcctctcaccttcttttgtcacgactgccattagctgatgaccagcttttctgtgcttgagctctatgagatagaattcacgagccagcatctgatcacctcgcactactccgccacccactggtgtctaaaacttcagggattagtgcttgatcaaactaactgcccctagtctgattaaggcttgatgacctagcagtatattgtatgccgatggcaggtcgagaaccaaaaaatcttgcataattgtggtggacaagggtgcttctgttggaatttattttaccaggaccttagatctactcacaagtatgttgtttaacatcctacatatgaacttctaaaacaataataaacacatataaagtttaggaaaccttacattggttgcagcggaataatatgtctccttccactcagatctctaacccttgtatcctttctatcgcagagtatcaccaagatctgagtccgaatgtcctcctcttcaagttggactcttaacgatcttccagactatgattaaggtaccacttgctgtatgtgggcactacactatcactcaacgtatttcaaaattggaagatgaaaaaagagaatgagagggtcagctatagagagaaagtggatggctcaatttttctaaaaggcaatctcttgaattaccgaataatactctattttggtgtgagccatcactttctatttataagcaaccactaggtttagggtagtaattatttggcattaaa

SEQ ID NO: 404280 - DNA, 503 bp, Cannabis indica
gttgggagttgttgtgctaacattgagatcaactgttggcattgtgctggtgtaagttgtgtggtgaaatcaggtgttgaagatgtgacttgagaagcttgcgggttgttggtgttcaaatcagattttttagtagaagtagaatctgattttttgttgccataaccaggtggaaaaccgattaggaagtaacatttatctttataatggcctggcttttggcaatttgtgcaatgtggccgtggtcttttgttcttcgagactgcattggcagtaggtgcagagtcttgtgggttggaagaacttgaagcagcagccaaagggggaagaaatcgatggccaagagacctttgtctttcttggttgattaccatagagaaaaccttgttcaaggcaggacaaggatcaagaagtaggatctgatctcgcacagcctgatatgtatcattgaggcctttaaggaattgtaatacttggtcatgattttgatgagccaagtgttg

SEQ ID NO: 404281 - DNA, 703 bp, Cannabis indica
aaaaaaaccatgaattcatcataaaaagctaaactaaaatatatttgatttttatttgttaaaaatatatactaattataagaaaattaacgtttaacgtttgtagttgattttatacttgttataaagtttagtaaccactagtaaagtagtaaggatatataggttgaatgtgtctgtgtaataataggatgcacatttttattacagggatagatcttgtggggacatgtccttaataagactgagatactccatctaaatggagaacgggaggaggaattatattttgtcccctaatgttaaacaagacagtgacgaagattacactcctcgacctggcaggcagggatgggattacattccccgccctgatagggcccgtttagtacgtatttaattttatatttctaatattattttataatttataatttatgtttacatttttatagtatattagtattagtatttattttataacttttaagttgtgttttggtaataattaataattgaataataataattgtgtaatatttaaatttttatttgtctaaacgaatccttaaagtaagaaaataaaataatacaattgagagaattaaataactaaaaaaaattagagagaaacaatattgcatatggtataacaatcaatatgagataatgatgatagaactttaatactattttgtttcaa

SEQ ID NO: 404282 - DNA, 366 bp, Cannabis indica
cttttattttgcaatgttattgaatttcaaatctgtggtatttttctatttctgaagtaaatctttaacgatgcttttgttttcatattattatactctcttcattaccaagtactctatttaatttatggtgctctttttatgctcctctttagctgctcaaacaccattttatagtgattataaatcgttggacagttgggatttaatgcatatctctagaagatacaactttatggtaatccttcctagatgttaagaaagtgtgtaacgtccccgcttcaagcttccattgggcccttacacccacagattaatggttcttatacacgggtacgccactctggctgcttcctggattgatga

SEQ ID NO: 404283 - DNA, 553 bp, Cannabis indica
tcggatagttattggatctcagatcagattcgctccgcttcgcaattttttttcttgatcggatctaatccgatttggtttcattatattaaaaaaaaacttaaacttggatcccgagacccagacccagacccgagactcgaactcgaacttagggtccagacttaggacccgaatctaggacccataaccctagatccaaacccgagactcagacccggaaccaaggacccaggatccaaattcagacccaaaccctaactcgggacccatgaccttggactcgagactcgagacccaaacccaacccatagctagtgttcgggtcgagtttattgaaaatatattataactttacacaatctattaatacaagtcaatactaaacatagtattatactaaataggctaattaggattcttaccccctgaactttgacatgtatcgaatcatgctctcgaactttgacatatactaaaaatcacgccccctgaattttcatccaagttagattttttttactaaaattggataaaagttcttaaatctaac

SEQ ID NO: 404284 - DNA, 555 bp, Cannabis indica
atttgaagagatgagacggaaaatattatcatacgtggcatgtttcccctgaccacaaaattcctaatgatgtggtactttctttcagatgcttactcctcttatggcttacatgttctatactattggttattgctactatgttatcacatagtaacatcagcagattatccatgttcggaataaagccatcatctgtatagaacttccttagccaaactaattttttagcagtctaagcgacaactatgtattcagcctccatgatagaatttgagattgcagaaaacttaatgcatctccaaatcagagattcactcccaagagtaaacaccatcccagacgtagactttctatcatcaacccaagcctagaagtatgagtcggtgtagcctaacaggttgagatctccacccctatagactagcacatatttcttttatcatcttcaaatattttaggatattcttgattgcagtccaatattcttatcctaggtttgactgatatcttctcactactcccactgcgtagcagatgtctagtctagtacgt

SEQ ID NO: 404285 - DNA, 600 bp, Cannabis indica
aaaaaaaaaaaaaaagaaatatcccccgcatcctcacatatttgaaatgtataattcttatttatttatttgaaagaaaatgtataattcttcttagtttttttttttaaacaaaatcattataaaatttcaattgcatttatatgtttttctcaactttttttttttccttctttttaatagatataactcaagtatatgtcatcttttaaagctaaagtattatcatatactatagtataattactattgtcatcgaacttgtatttttagtatatacatgagtacctatactatacactatacagctatatatatatgtaaatattaggtaaaggtacaattaatatgattgtttaagtttctctgttcttaaaggatgttggagttcttactaaataaataattatgcacatcgttgatctaatttgaccatttcttatttatatattttaacaaaacaaaatcccccccaaagaaaacgaaataagcagataaaaattcttaatgtttcccatttttaatatttacgaagcgcttaattaatttattatgaggtaattttttttatttttatttttatttatataaaaaaaaaaa

SEQ ID NO: 404286 - DNA, 680 bp, Cannabis indica
tttttttaacaaattcattaattaactactcaagtaattgacaaatttgaattctctcttaatcaaatatcgtacgaggtcttagtcaagaagttgattgtaaattgtaataatttttgtcaatgaaatattagtaagagagaaagagagggtcaaattaagcttaggacaatattaattaatgttaatgaaaattaattagaaacttggtcattttgttaaaagtgtagtggtccactggaatggacggagtagctgtgagttgagatttgagaatagtaggccatgtagttgatccaaaaccaaactaccttgtatatatttaggactttgattattaaactaggtttagtcaaattataagatccatccgagatttcgtgcaagaaatttacaaaatttattgttggattaaaaaatcctttgtgggcacatatgtataatgtatatgctattataaagtgtgatacgaaattaagtgaccaattatgttatgggtatcaaaagggtattaaagtgtcatggaattaatgtgtagataccataagttaatttataatttgttgaggggccaaattataaatacccaagagttattctaagatgactctataaataggtagtggtccccaagaaacactagggtttctgtattctctccttccccatcagagaaaata

SEQ ID NO: 404287 - DNA, 1047 bp, Cannabis indica
aaatttcgtcccttatagtgaaatagtacatgccaactcatagcaagtcaagtacttaatcatagtgtggaagactatatccaacacctgaaggagaattgggctcagatcttaataatactctacgacagaaaagaacaagggttagagatctgagcaaaaggagacatattattccactgctaccaatgtaagtttttctaaactttatgtgtgtttaattatattaatttagagaattcatatttagtgtgttaaataacatacgtgtaagtaaatctagatcttggtaaaataatctcaaacacctcctctcgatgaaaatcctatgaataatgataattctactgataagggtaagggtactaaaaaaaaggggtagacctcctactatgcctattcctaagaagaagggaaagtttgatgtttggcctcatttccctaaagaagacaatcctccccgagctacagaggatgatgatgaagaacctcaacctcgtgtttctaagtgtatgagcaataattgtgggagtgattttcattatgaccctaagaaacatgggactagtcatctatggagtcatttgaaaaaagtgtgtgagcttagtctactcaaaaataaagatgaaaaatagaagattttaagttttaagcctcttaagggtggcaaggagggggaaacaaatttaatagttgtggcctataacaaagaatcttgtaggaccaccctcacacaatatattgtgttagatgagtaactatttcgacatgttgagggtgaaggtttcaaaagatttgtgaaactctccaacctagatttgagatcccttcttgaatgactgttgctcaagatgttttgaagttgtatcaagaagagaaggtgacattgagaaatattttgagacataagaggctaatgattactaccaatacatggaattctatttaaaatatgaattacatggttatcactgctcattggattgacatgcttggaagtatcaaaaaagaattatcaatttttgtcaagtcatcgatcataaagga

SEQ ID NO: 404288 - DNA, 490 bp, Cannabis indica
tattagagcagaaagcagagaaaaaggaattctgtttttttaatgattattagaactgaatggttacaaaatgagaaaatgccttttatatacaagtagataaaacacagcagcactaactaacataaccgactgaagtgtaatcataaactaacttaaccgactttagggtaaactaggaaagtctaatagatatataaataacttttttttctttttttaagtatatcgggtcagaagaaattaaacaacactaaaaatagtaagtattcgagcaaagtaagaacacactaacagatatatgaaatataagtatttatctacaataacgaatactcaaagaattgactaggaaatagcaggaccaaccttaaaaaataatgggccttagtctactttaagtagaattaaaaaagggaaattttatatgatatactaacttttgttatttttttacaaaaatactttcaggcggtattttttacttttt

SEQ ID NO: 404289 - DNA, 878 bp, Cannabis indica
acattattttcattctctaacaccccaatttatttttctatatgaaaaaaaaaacaaaaatgaagagtaaaaaggtcacaacattaccaattacattttgggagcaaatctggatttgattttctgaacctctttagtaccaacctggaaagccatggtcaagacattgtccggcacaggtggggtggccccgaacaatgtggtggcaatggactgagtccccggcaactggctattaaatccggcgataacagcggcagggttcttgccgttgttcttctggaaatgaacaagtcctctagggaaagcaaatacatctcccttcttgatagtcttggagatcaaaacattggcggtggtgatgaaaccaacgtctaattcaccttcaagaacgaaaacaatctcggtggcgcgtgggtgagtgtgtggtgggttaatacctccgggagcgtagtcaatacgcgccatagagactcctagtgtgttaaggcctggaatgttctggacgttggctccggtgaccttggacttgaaagtgttgttggtcgcacctggattggctaatccggcgaaggagaaatcatcggcgcttacgttggccttacaagggaatccattaaccttcacagctgttttcaatgatcaaaaatcaccaaacaaattcaaaaccaactttacagttgttcaatttcaactttattttggattaattaactaattatagttgtaagtaagtaactaattagtatataaaaagaaaaattcttaaccagagttgagatcggcgacgcaaacatcttggaggagttcgggatcggcgaaggaggtggcgaagaatgaggcgaatgtcaacacgagaagagtcatgagagtcgcca

SEQ ID NO: 404290 - DNA, 985 bp, Cannabis indica
tgaaagtgatttatattataggaatgtagagttacatcaacatcctaagtccataccaaaagcctctttctttcccttctctctctttgaacccaacatgaaccaagaggattgttgctgaatttctcatttcagcaagggattcaaactaaggtaacccctagaacacttacttgttatttttcaagctttgattttggtttagttgtgtgattttgagatttaggggttttagggtttgatgtatgtgtggttcgatttctaagatttaattgagttgattttaagtccttgctactgttttcggtgagttgaaaactcaaacttgggtcatcaatggcatattttgattctgagtgtttttctgagttctattggttggaatatgttgtgtaagctcagtttaggtactctggaaagtttggtggcatttggagaagttttgagcaagtttggagttgtttagggaaacctagtacaaatcggttaaccggtttgccaggacctgtaaaccggttaaccagttttggcagattcttagaacaacttgttttctcgattcaagtccacttcagtgccttagttgggtgatttcttgttccctagggtattgggatttcttttagtaatagcaggaccttaagttgtaggtttggggttcccagattagggttttgacatgtgatttacccagttatgttatgtgattagggcatccatccagcacgagactttccgttcaggtcggccaactcacttgaattcggaaaagaggtaattaagaacaacgtataatatgtgatatatatgcaaatgtatgtatgtgttaaatgtatatgcatgcttatatggttagttcactaccaacactcgtacgaaaaagtggtaaaaagtgcattggtttagtgtatattgtttaaagagtacattacggtgttaccagcacaagtacgggaaagtacagggtgtgcgtggtatatcactt

SEQ ID NO: 404291 - DNA, 606 bp, Cannabis indica
tatttatgttctcagagttgttcattaaagctagatcggcccaatacttacatcatgggaatggtagttcaattgagtgggagcgctaattatagatatggaatctattacttctataagtattaagaagtaaaacgataatttccttcgagcttcgcttaatagatataaatgattgagatctcacttcagtacttatattagttttctaaaatatcatttatacgtagctaattgttttaaggataaaatacattaaagggtagaacggtaaatttgtccctactcaatgtagatcatctatagaggatctttgactattttgatcataacaatggataattaataacgtatctatatcttggatcatatagggcgttctatataattaagagtggaattcaaaatctatagtggagtcaggatgaattaataatttagagaattcgcctggtaaactctaaaactacttattggaagcttcattgtgtaggcccacggtccccacactagttgagatagtactgcttgtagactcagttaattagttttaatcaattaattataattctaaattagactatgtcttatttatgaattttcact

SEQ ID NO: 404292 - DNA, 607 bp, Cannabis indica
cacagtattgttctcattatattctaaaagttgacactccctatttctgttgccgcttcgatcatctttctttctttccttccattttttttgatttctgttgtgtcctctaatatgtgtatacgtggacattttctgcagataattgaggagtcctaatatgcagtttgtgaaagaataatgatgttgattcactaatgtgacaaaaaggtatttggtattcagtgaaagctagcacaattcaacttttagaaaaaattgttttaataaaacaatctataaaaataattttgtttttattaaaaatttatttaattatttattatctattaacaaaaataaaaatgttttttagaaggaaaaaatatttaaatttctaaattgttattttgttttaaaaaatattttatatttatatttttatttttattattaagaaacaatatgtacctaaattttttataaactaaaattttttcttttacaagtgataaaaatataatttaaaaatgttaaaaattatttttatcaaatgcatataaatttatactatagaaaaaaaaatcattaaaaaatatatagaaaataaaaattttatataacatat

SEQ ID NO: 404293 - DNA, 862 bp, Cannabis indica
ttttttttttttttaatgagatgagtgtaatagagatagatagagaagaaccaattaagtatcggatgactttgtcggtaaaataaccgaattttcctttggattgccatcgatttgaattgaatgaaggagagtgagataacggcaataaatatcccgaaaaggaaataatcaactatatttaatttaaaatagataacattaataacaagtttaattatattttgatattattatacaagctttaagataaattttgttttgggttctagttaaatatttaattataaatatataaaataactaaagtttataatataacgcgtaacaaataggataatttacatgtacatacgttttttttttgtcttttattatcaataataacttaatctatcacaataataattttaacgttcgtttctaacgttttttaaattattatactgttttatattttatatactaaactaactgttaattttttcttttgttttttatttaaaagacatacttacagaattaaaaaattagataactatacataaaaagaataaaaaaaaaatatttctttctctcttctttccaacttccaaaaaaaaaaatatttctctcttattttaaataataagatactaatataacataagatatttttatttaaaattgatcattttataaaaagtaactaattgatatattatccaaattataattaatttaaatattactataaaatatactaaataaaattatttcatatctatgcttatttgttatactatatcaaaactaattgaggaaattacacttagtatgggattttaaaagttcttatgataaatatggcacatttaagttt

SEQ ID NO: 404294 - DNA, 851 bp, Cannabis indica
tttctcattatttttacatgtggtcttcactctttccctattcccgtgggtcaagtcttctgtgtaccatagtccttttccataatctctaccatcggtcttcattctttcccgattatcctacgtattttgcgaccttctcacttccccttcttttcccaaatttctttgccataacttcgtgcactccctccatagagtaggtaaataaattaatttgatgggttcaaattcatattctcgtctgctcaagaaaaatcataactgctcctctactgaatcaacggtgagtttttgtaattttcgattgcatatgttatttgtaatttttgggcttaaggtttaatttcgaatcaattttaatttagctaaatgataggaaattctgtatgattaagctcttcctgttcttcttttttctatctgaatttattgctttacaaagtaaaataatgcataaaataagcatggtatgaattgaaaaccagaaaagaaaagattggtttgaaatggagtaatgtgaatgaaatttgcaatgagcccataagaagaagaagacaacacaaatttgaattgtattcgaacttaccttctcagaaattatgattgcatattgatgaaaatgaaaggtttataattagttactagtagcagcctgagtccttctaagaaaataccctagtgataggaaaattcagaatgatggaatgattatgtacttagtgtataccattactagattcatggatgtcctgatcgtgaacttaagaaaaacttgaactgttaattgcatatttgatagctattctaaagtgattaggggtggaccatcttatggtcattaagataag

SEQ ID NO: 404295 - DNA, 562 bp, Cannabis indica
aaaaaaaaaaaaaaacctaacaaaccacaaaaaaaactaatagtaaaaaatgagaaaaacacacaaaattgaaaatgataaagataaaactaattttatttaaaaataaacttatctttgattacttggagaccaactaattctcagtccaaaaaaatccaacccttgtcaaaatataacaagtacatttttattattacaaaattaataataaaataaactaatattacaaagaaaaatacacaaattatactttaataataataaaaaaaaaacttatatgagaaattctacacaattcctccagagtgagagaagtcaacaataaataaaaatgtcattaaaagaaaaaagtcaatataatatttgcgcaacttaaataaaggcacgtaatcccattaaaatacatataaaataagtcattaaaataaaaaaaatacaaaaaaaatgtagacaagtcaaacaaagacagtaaatctaattaatataaataaaaggctaattatgatttttttctcctcgaactttgacatgtaccaaatcatgccccctgaactttttt

SEQ ID NO: 404296 - DNA, 743 bp, Cannabis indica
atctccatgtcagcataagtcaaagtgcttttggatgaaactgtaaactttcgagaccatggaccgaatcgcatgcccaagggctttcctaataggaaaggtgctagctggagtcggtgatccgggactccttttcaagaggaaacaagtagccattcagaactccaatccgagagaaggctagctttccccaatgactccttccgaatggacaagataacttttcaggaaagctcttctgggagacaactaattttctatgaagatgaatatctttcggagaccttttcatttggagaaaatataccacgaattctacctagttctttcaaattaaaatattgacggtgatgaagaaagaatgcaaccatcatagttggtgttctagaaatcttagtatactaacttctaagatggattaagtcaaagtaatgcttgaacttatttactattaagactttagtcccaacatcagcaagattatcttttgatctgagcttctctaattcaaccaatccttcctctatcttctctctaatccagtaaagtcttatgtctatatgcttttttcatgataaacttgattcttacaaagatagatggatgattgaatatctgagtacattttcactccaccttttatttgtttcaattcaaacagaatatcctcaaagccataaggcttcattgaatgcttctgtagtagccataaattttgcctttgtggcgaaaaaggcaaccac

SEQ ID NO: 404297 - DNA, 514 bp, Cannabis indica
aatgtagactttaatttcaaaaatattctttcgggtccgaacgtgttttaagagaaattttcaaatttcaatgattttttttcaaattatttcatgcacgaaatcactctataattttatataaatgtgatatagcattaaatattcaaaatatacaccgaaaattaaaaattaaaaatttcttataatatggaccgaaacttaaaacttttatgtatatatatatttgtatataatgtatatacaacataaaatcatcataaatatatggaagagaatattatatataattttatgcaataaaattatagatccaatgtaaaaaatatatataaatatataacaaaaaaatttatatgtatatacaactatatatgaatatgtatattatatatatgtgtgaagaaatattatgaatataaatatatatatatacgtaaatgaaaaatgtatatatatatatgatcggatgaatatgaatgtatatatatataaaatatatataaacgaaaaa

SEQ ID NO: 404298 - DNA, 1121 bp, Cannabis indica
atccaagtgttgccataacatttgcaatatccgctcttaactcgtatgttgttgcctatcaagtagacgcagaaaggcgttgctacttctttaaagaagctccaccgaattcaaaaactctacttttcaaacaatgtactaaaaaagttgaagttaatctcaaaacaaattatgatatcttaggaaatagagaaaaaaccaatttgggattcaagtcattagacaactcgctccaagcatttaagaggtttgatagcgcgaatcctacagacgagcttcgccaaaatcttctagttgttatccaaatgattgcagaagctgcaagatcgaaatatattcaacaaaaattggaatggaaaggatttgaaactggattttttccaagagctgatattatcagctatgagaataaatgggaagatctttcgaaagcaatccaaaaatctaaagatggaaaaataattcctccaattcaattgcagaatgaagattataaatttcgctatgtgtcaacagttgctgaagtgaaaaaggacctggcattcttgttgaattctgccacaaaaatgagtgaagaaagatttggacaaggagaaactactactactaatgaagaacttatccaagagtactagctagattattagttgtagctgaaaattgtatgcaatttgaagtaatattttcgtatatcctcctacctagtatactatatttataataatgttttaatgtgattatgagacacttctatttgagtgatataattataacggtattattgaaaacactatgtgtttacagtgtaaaccaataacacaacccaaataaaagtctcgacccaacccaaaaattgaagggataatttcacaaatacacaaaaataataaaaaaattacaaaaatatggtttcacggaattttaaatatttttacgaattttttggttttatttatagaaagtacggtctttttatgttgtattcacgttaatttgctgttaattttttgttatctgtatgttattatttgttgttgttttgatgttatttagatgttattttcatattacttttatgtagttttcttgttatttttgtattgtttttacgggaaattgta

SEQ ID NO: 404299 - DNA, 769 bp, Cannabis indica
tttgtctccttctcggcagcttcgagattcttcttcatcctctcagcttctttgttaaggcgagtaatctctagttgggcatcactccatttcttggccataacttcgcattggcctattaagttctggacctcgctctccaagtatttttccttttccaagcctcaccgctgggcagcaaaagaaaggaaagaagccttgaaatcaacaaacaaagatgcatgagtaaaaaaataagaggaataaaagaagtgaacaaataaggataaggaaacttaccaagaggttgtgagaaaaattgcttataagcactccctccaaatccccatggttgatcaaatcccaatcatgtggaaggagagccttgaactaatgccaacaggcagctccaaactctgtggtgaactttgagccagtcttttcggccttgacaggcagtgtttcaatgaccttgctcgaggaggcagaggcttgagtcgctttagggagaggctcgtcagtacttgcggagaccagaggaggaattgaatcctagtttttaacctcagggacctcgaggttagcagtctgggaggctcgtttcttgttacctgaggttttcttctgccttttgacgggctccacctcgacctcagaaggagcctctgcggtggacactcttttcttcccttttttgtggacgagaccctcgaaatgcatttctgcgagacaagataaagtgttaacattacttgaagacaagtaaaaggagagattggggcatgatttt

SEQ ID NO: 404300 - DNA, 799 bp, Cannabis indica
catacaaataccctaggttataatctggcgcgcatacacccgatcataaccctaatccccgtgtcccacacggtactgagtctggaacgttcataagacgatatacaatcgaccataatgtcagcctatactcaatatgctagtcatactctagccataatgatgtgacagcatcgatcagtattctagccaacatacatttatcaataatcagtacaactctatgtatactattattgctatcaatgtaatttaacaggaaataacacatgtatgctaaacatgtaataacatatgcatgatattatactaatcttacctcaattccgaattcaggtgtgccggtcaacctgagtggaacaattgttcggcgaattataagctcctaaatcacatcgataacaacccacataaatgacctgctcaatcgaaactggaacaaaggtttaaaaccaaaacttaacctactgtaacttaacacaaaaatatcccaactagtagggaataaactgcctgaaaacctgaaactaacacaaaacaacaagctgaaaaactggtttttcacccctgctgcgaaatccgggtaaccggttttacaggcactgtaaaaccagttagccggttttacccagaaagccaacaaaaatcaaacccctaatcaacatgtttccaaactcaaccaaactttctagacttgcatattataccccaataaacattttccaagcaacaaaacaacaatcaaagcttagaatcaaaattcaccattaaagcttcaagcttgagttccaaaactcaa

SEQ ID NO: 404301 - DNA, 664 bp, Cannabis indica
ctctggatggagaagaacttgggttatccttggctgtcacgaaacatgttgtgagtgtcgtgctgatcagagaagaaaacaacatacaacacccggtctattacatcaataagagactcattaaggccgaaggccagtatccgttgatagagaacctcgcttactgcctcattatagcaacaagaaagttaaggccctatttttaagctcatcctgttcgggtatacactgatcaacaattacgcaaaatattacaaaaaccggatgcttctgggcggttactcaagtgggcagtggagttgggtcagtacgaaattaccttccaatcccgaacaacaatcaaaggtcaggccctagcagactttgtggtagaatgcataggcaaagaagaaagcatatcgaaaggcgaccccgagccagtactaacacatcaaccaagtaatagtgaagacaagccgacttggaaactacatgtggacgggtcggctacagatcaactatctggtgcaggaatcgcccttgtcacacctgggggaaacacctgcacgctccagtcaaatttggattaaaggcatctaatattaaagccgagtatgaagctttgatcgctggcctaaaactagcccaggagatgaaagctcaacacatcgaaatttgtagtgat

SEQ ID NO: 404302 - DNA, 695 bp, Cannabis indica
ggggtaatcattttaaaagaacatcagacgtcgcggttccccccaaaagcgaatatgggaaaccaaaagcaatcaagtgcaaccgtcaaacgtggtgagagaaaatcggatttcgaaacagtacttgtgtcagagcatttattagccgaaaatcaaagggacgcccagtcagcctcacatcgagtcgcgaacagacgcgtctgacaagtgtcaccaattcaaatacaaagacaactcggaggaagtctacatgcaacttcgaaagtcccgtacaaacttggggttaaatgttatcccaatttttgcactctgacatggcatcatgcgatggtgacacgtagtgtaaagccctaaataattaggcacgctacccaaaatacttatgaaaccctaatcccctaaacgagattactgatcaaaatagcgcagaatttaaacttttatattaaacagaaagaaaataaacttgtaatatatttaaaacttttaaaatagttgggatcccaaaaatatttacaaacgctattacaagtcatttatttctagccgacctaaacggtaaaatagaattcaaaaaatcatcactgatagacctttaacccgcttggtctgatatggcttgaacatgtacattcttcatcttgctcctcaaagtcatggttgatcagccactgacttaccctttcctgcacagt

SEQ ID NO: 404303 - DNA, 943 bp, Cannabis indica
ccacatttcaaattcaaatatttatcttattgaattaattaatccaaaaagaaaaacaattagggacaccctactatggggtagacgtctaccttctctcaattaaaacaaggatggtgtcttttgtcctcacaacttttgttttaacaattcttgtcttgacaaattttatctcaacaacttttgtctttttcctatttaattaatttgaaacaattatttagttattagaatttaattaattaatattttttacaattacaaaattagatttttttacaaaaaatattatacaactctttatccctatccttgatagtatttgaagttggcgattcggggaccatggacctataattctaagctctaataaactagattatttattgagtctcatcaaccaaataatcatgtttattaattctatgattattccactgtaaatatagaatttaactcatagttattgtagaattatatttactgagttttactaaagtgtctattaatacaatcaattccagtgattggccctccttgtgtcggttcataactagttttgatcaaaataccattttacccttctaatcacttctatatcctttagtaccactaattcactagtaaaagtatagttcagatcaaatctaaatttgtgcacaacttttcagttccagacaaaacacttaaagggaaccaacatttgatccattaggaaagttaggattccataattgtagatcatgtttctagccatccacattattagattccctaaatagaatttgtaagaatcattttctctgagaaactttaataagtgaatcaaagaaactaataacatgaataggaattcatgattactcaagattaaggatgatctactattaatcatcgttatgatatgaattaggtctctatagtaaacaacatgtttgataaa

SEQ ID NO: 404304 - DNA, 984 bp, Cannabis indica
agtcctgtattatattacaatagagttgtaatatcttgattttcttccatttgaataaaatctctaacaatatatccttaattaatatgaatgtcatcatttgcttttacttttcaataatgaatatgaattgtaggaaaaatcatttcaggaatgtactataaaattattcaaagttttaatcaaaaatttacttattattgttttggaattttatttatacccaataaagacatccattcaaataattttttatttcttataaaatatatatgtttagtttataataattttattctcccttttatattcttgaaagatatattttaaatattaaaataataaattacataaattttaagaaaataattttaaaaattatacacaaattaaaaatattattattttttaaaaataattattaacacaaaataatatttttttatatcaaaactaatttttttaaaaaattaatttacatttatttttttaatgttaagatgtaaatatataatgaaaaatttacctaaaccaaaaatttaaaaaaaaaattacaaaaatacatcaatatggaaaaaaatttatttttactctttacactttttatttacaaaattacctcttcagtaaaactaataaactatttttttggttgttttatagtttatttatagttgtattatagctatcatgagattatttttttagttattttataatttatttataattgatttatggttgttataatgttgatttctcgttatttttatactttttgctaaataaagtatatattttttgtgacactcagtagtcctgtgatccgtaaggggaaacaccggtaagctgtgcattcccacatcgcctggggaaggtcaagtgggatgattctgagactgtgtaagtatgggactacacaattgaagaaggcttaaatggattaattggtactacctatatcaacaaggtgcatcttgtttt

SEQ ID NO: 404305 - DNA, 824 bp, Cannabis indica
gataaaattagtttgctaattattcaactcagttttttgttttgaggttttctatttctttccttctaaccctgtcaatgtaaaattaaagttaaagacttgagccctaatttttgtgttatgaatattgtaccattgtttttttttacatgaatgaagaagtcatacaatcttacagatatatgttggagacagtgatggacccaaaatttttagtttgtggggcttatttatcattacaaaaattatttaatttaattttatgagagctttttctacgattttgatttataattatcaaatttaaaaattacatttaattttttaaaagtcaatatttttgttagtggggagctataaccccttatattaatacacctgtgtcggtccctggctggagagtctttaatctatcattttgaagtaataagatgtaatctatttgcttactttggagacatatataccattatttttttttcctttttaatggtgattaaatctctcaaatgcttctctctttcgttttggcttgtatttggagatcattaacctccataaatttagtcgataattaccacatcgactttacaagtactaaactattaattaaactataataatgttcgataatcacctcttttacttaagcttttatagtccgaattgaaataacaagatgggtgaaagaaataaagtactaaataaatggattgattaatttattaatttattatactaaattgactagggaattaaaattttttttttagtttatataattttagaaaaagtaatcaaaatggtttaaattgattgaatta

SEQ ID NO: 404306 - DNA, 523 bp, Cannabis indica
actttcgcatgaaaaatacctattcaatacccatcaaagccgctggcctatcattattgttgaaatgccttaagttcatttttattttatttttatgtttaatttaccattcttttgggttatcatgaaatgagtccacattagatcaacaccttctaagactaactagtctagagcagatacaacacccgtacctaacacatactaacaacacagaaaaaaagtatattctaaaaaatgtgtttaggaaagttacatctatacaaaggcaaaaccatgtgtggatttttgaggttttcgtgaggagaatggaggcgtgtggattatagattaggaagcataggtcaccattcccttatgacaaatatagaacacatgactctatcatcatcattataatccttagcaagtttagagaattcaacaaaatgagtgttcacacttgaaaaggtccttaataattctacttaaacattacattattaagccgtaatctatatatatataaataaaggaaagcata

SEQ ID NO: 404307 - DNA, 1084 bp, Cannabis indica
aagccacgtcgtaaggccgagaaacagccaacgagccctactcaaggaaaaaaaataaaagtagtgactaagaacttctagaaagaaaccctaaaaagaatagagtgctcaactatatgtttttcttcccccctccaattttttgttgttgcaatataattttaatactttttatataatgtaaaccaaattttttttttttgtaaaaaattaattttgagaaataattttttgaaacaaaatttaatataaatatagtataaattattttattttgtttgttttagtagctacactatatatatgtataaatttttatcaacaaaatatacttattatttttctaacatttttagtaaaccgaatgtagtaaatattaagctaaagaaagtatgattaaaaagaaataagaccctaacttttacgtgattgagatattaatgaattttagtccatgagtcactgttattaaactcttagaaatgggatttacacttgtatttctagtttttggacactaaaaattccaaccctttgcatgaaaggtaaatgccatatttataggtaaattattggtgggttagacaactctgaacccattagaattctttttagttcaaaaaacccattgatgggctaaaatacaacacattctgaattattaggtcgggtaggtgaaacccaatttcaattgagttgctttatgtacatggtgaaactattgattgtgataggtgggtgttaaatgccaaaatattacatattttatagtgtaaaaatacaaaataaaattaattctttataatattttcaagaaattaatgcaatatattattatattgaaaatattttatttaagattaattttatctttgtttataaataataatagtatttatggcataattgagaaaaaaaaaaataaaaagttaagaaaatgcattgtatttatttaaagaaatacaaattaattaaattttaaataaatattttcattaaaattattgtgatatattttatgttgaaaatattttgtttggatttaattttgtttgtgtttgattgagaaaatagcatttgtgaa

SEQ ID NO: 404308 - DNA, 712 bp, Cannabis indica
tctctctctctctctctctctctctctctaggggttttcaaaaaccaacgtccccaaagaaaagcccaaactaacgaaagttttttcggattcttttattgatatttgtgtgtataaataatcctatatattttgatatttttgtgctatttggatttagatctgagaaaaagataatagttatggaaaaaaaaaatttgggttttcaaatttgggttttggggctgagattttcgtgtatatatgtgtgtatttgtttgttgaatttgaattcgtttaaatttggtttgagttttgtttaatctttttgtttgagatttggatttgaaaaataggttggtgggtagtggtgattttagtagttgtgggtggtggtttcaattagtgctgtaaaaataaggccgaactttttgacacgacacaaaatcggcacgagtctgagaggcgcaagcacgaaccaacacgaaaaaatatgtgcttaggatataatcatatttactattaataaaagatcaaaaattattttatattgcatggttcacatgatttctttcatgattatatgtttaatatataaattctattaaatcataaacgtatagttattcatgattatattattgtttatataatggaaaataatcattgattatatgcttcaaagtattttagtctcatgatttatcaatgcactggatttacactgacgtga

SEQ ID NO: 404309 - DNA, 680 bp, Cannabis indica
atccattagacaacataacagtgatagatctcgacatataaatttttgtaaatgagacatctagttgtctcatccaaagaagcaactaagactagtgtttacaatatgaaacaatgaagaagtttataaaataagagtaactttgactattacctaaaaaggacattgttggtatcttattttaatcaaaattattctttatttttcctcttagctttttcattaagaaactacttagatagcatatcattggataacgaaaattataaatcatctgtttatgatgtcactctatttttttcaataagtataagtggcgcagatgactagattccaaacattctatcctgaaatgatataaatcctcgatcttaaagaatctcgtacttgtatatgcttactataggtaacttaaaattagagtgaaaatagtagtggtggtccaagctagaagaattactcaaggaatatttggtattaatttaagtctttgacattaaattttagattccaaatagaatttttaaattatagtttccagaatacattggacaatacagtaaaactttcacaagttgttaatatctatttttttttacaatggatccaaactatatgttaatgtatgcattatgagtttttgtattttatgaccaccatccacttggactattctaaga

SEQ ID NO: 404310 - DNA, 798 bp, Cannabis indica
caaggtaagaactcaattcctcccattttgcgttctaaatctgtgatgcataacttggagaactcttttaaggatacggagcagggtaatgagaaagaaatcactcttgatgatattgaagaggagattttgttttggaatccttcaatcgtgtgctatgttcttggagttaatccaccattgcacgtgcttgaaggatttgcaaaaaggatttggcatgataaggttgaccaagtgaaagttttgtcacatggaatctttatcattcggtttacctctctagaattcagagaccaggtgatgaatgggggatatgttttcttcaatcgcagacctgtaatcttgaaaccttgggaccctaatatcaatttcaagaaagaggatgtcaagtgtgtcccaatttgggtacagcttgaggatctagaattgaaatattggggccaaaggtcactctttaagattgttgggcaacttggtaagcctcttatggaggatgctgtcacgaaagatagggagaggttgagctatgctagagtgttaattgaggtacaaatggaccaacagctcccgagtatgatagagtttgaaaatgaatatggtctcaatatttcagttagtgtcaaatatgaatggaagccgattagatgctcccactgctcaggaattggtcattttgtagaagaatgtaaaaaagctgttgttccttcaaagcaacagtgggtagtgaaaaatgacaatagaaagaccaatattcctgatgtacctcatgcagatggttttatcaagatttcaaaaggg

SEQ ID NO: 404311 - DNA, 583 bp, Cannabis indica
gaattccaactaatcctaagatatttatataggtaatctatgtgtgttctataggaatggttctggaacattgacatttcaatatggttgttgggttttaatgaataaaagaacaattgtgatcattattgtagtcattgactcattgtcaaagaaggttctgattgcagtaccaacaatacaatacaatacaatagttgcatttatgttttatatatctgtataaattcagtttgatgttttttgttcatcctctttcaatttgtgtgcagctaaatgtaaaacaactttgtgaaagtatttaaactgttagttaaagatcgagtagcttcgtatcttcattttattttcttgaaaagtcttatactttgtgaagtattgagcaatagaatttaattttattgatttcttcactttgtggcaccaatatcaattggaagcaatggtggttacccaagagtgagatgtgttggtggtctcaatcaacaactaaaagtctattagcttgtagtgattagattttaattttaagctgaagattaaaaggttgttttattatatcctatttatatatatatatata

SEQ ID NO: 404312 - DNA, 471 bp, Cannabis indica
tttgaagttggtgattgccgtggcattgttgctggcaataatcatgtcattgacatagacaagaacaaccataaaaaaaggaagaggtgcgtttgataaagagggaattgtcagattgagattggtgaaagccatccttgattagagtagtactaagtttggcgtaccattgtcgggaggcttatttgaggccataaatgctcttattgagcttgcaaacagtgttgggaggagcattgtaaccaggaggtatcttcatgtatacttcttcatgaagatctccatggagaaaagcattgttgatatctaattggtgaatggtccaattgttgatggcagccaaggctaaaaaaagcttttagagtgttgaacttggcaacaggtgcatatgtttgtgagaaatcaattccttctctttggttgaagcctttggcaactaactgggctttgaatctcaccacttcatccgct

SEQ ID NO: 404313 - DNA, 774 bp, Cannabis indica
agaagaagaagaagaagaagaagaagaagaagaagaagaagacaatagtgtaaagataaaaaatgtgtaaaaatattactagctaggttccactattgatatcatatttcctcaactttattactattagatcaacaatcaagggctagaaaagtatccctaccatagggacaaaaccaaagtatccctacaataagaacacttcacttgtccccatagaatagtgacattttattagccattgattatattgacttttgaagattttaactatttattatggaatatataacctcttggtaaaagttttgttaattttttctttatttctttattttttttttttttggagcatcaatagtttacaaactttgtttaattgtttttataagtacttaatattcaatatttttatgagtatttttttttttcctgaaaagaatatacataacacacatatctttcttttatttttattattatagaaaattttaatgtatcatgacttgatcaatctatgataatatatttattacctatatattttttaaattcttattgcatagtaatattattttgatcatgtggtgaatgcattctatttcattactgcagatgatttcctttggcgatctcaatctcttcgaaggttaataacacactctctttattactttttagtgatatttgtggcataaataccatacgttttcagttttatacacttaaataccacatgttttttttcgacggattaaataccttaagttacat

SEQ ID NO: 404314 - DNA, 867 bp, Cannabis indica
ttattttttgtcacaacaaaaattacttccctaaaatttagtattttagatataagtaatcactaatttagttttagtcacaataagtgttgcggttaaaattatatttagcaacaacaaattataatttttgtgactaatacttttatgcacagagttttcagcaataacatataaataatgatttatctttaatcgtaatttttttaatttcagtcacaaattttactgtgactaaaaataataaaaaaaaattagcgactcacgtgaaaatgatttttttttacgtttaattttggtattacaacttatttataattttataaaatttagtggaaagtgctaaataacactaatatatacgtttgtataaaaatatttaattaggagtgttcgcggtgcgggtggtataggtttagtctattttttcaaatcaaaccgcacggtggcggaactccatatatgtatggagtggccatggcccaccctaacttttagaaaaaaaaattatacataatatataaattaaattaggataattagattttacttattaaaaaaatgtgataattatcttattattaagcctaataataaattgtgaagttgaaattgaaaaaaagaaaaaaaaaaaacacccacccaactagtccatttaaattaatgatctatttatggtaaaaagtgacaaaaaatagttaatataatttattttgtaagagtactttacatgagatatatatatatatatatatatatatatatttataggtgtctttatatatgtatttttatggtatctaataccatattaatatgatactttacaagtggttatcagtttcttatattatttattaaatcaaa

SEQ ID NO: 404315 - DNA, 544 bp, Cannabis indica
taaaagttacactaattaaaatgattatactgaattatatttaactttgtgccatttcatataggaatgttcattggactatatttaatgtttttatctagatccgatctaattatatattgaatgatatattttaccatctgatccaattaatttcagtcatccaatcaatccaacatcttatggatattggattggataagttctattccattgtatgtattttatttatatctattggtttagtttggatttatctaatattcactacaacaaacaccattaataggggcggaacagtccgctggtaataatcctaaaatccgccggtattgtgcattagcggcggggatccgccggtaataatccgccggtaataacccgtcgctattaatcattaatagcggcggactgacacatccgccggtattaatgattaataccggcggaccaatagcggcggggtccgccggtaaacacgcgttaatatggcctaatctgaaccattattaccggcgggtgtccgccggtaataatggttttt

SEQ ID NO: 404316 - DNA, 746 bp, Cannabis indica
tgtatatgtatttttttagtctacattctcaaaattaaattctaatagtggtgtaatgtggtgtaaaatttgacacatgttacttattatgttaaatttggcacaaatataatagtatggactaaatttacactacaataaatattactttttatttaattttgccacttattaatataattaataatttttttttataatttcatttatatatataatataatttttatatacttttaataaacatttaatatgttccctcctatattcattttttgaactaaatttgagacagtatacactatttattgaaaatagtcttaagaggtagtatattattgtcggtacaatttaatatcatatttcgaatattttaattaaataaataatataaaaaaacaactaataattcacaagattggcactaaatatttgaaggtatttttcttttttaataaatttcaattgggaaatttgattttttatgcttacatttggttaaaaaacttcccttaaacacataataactaatatttgtaggatatgacaatttttatgatactcctaaaatacttcctatttacatcaccctcatttacacaattgaaccccctcatcggacctcatgttggacacaatcggacctcatgttggacacaatcggacccatcggaccctatatcggacctatcggacctatgtcttctacctcgcaaactcacagtttcatttgaccctatcggacc

SEQ ID NO: 404317 - DNA, 668 bp, Cannabis indica
tcttttctcgctcttattcttttccgtgggaagcactgaccaatgggatcaatggctatagtgttgatagatgtaggttcgtttttggatctgagattttttttcttcaatatgggtttgttactttgtttcttccatggatttgagatatgcatgtatttatttgtttgagtttatgtgatatgggtttgtttaattttcttttaggtattttcagatctgggtttggaacttcatatgtatatatgtgtgtttgtttgtttcttagattgggttttgtttaaattttatttctgtgtgatttgagtttgaaaataagttacagtgatggtgttggtgagtagtggtggtttcggtacctctattgatggtggtcggtggtggtggtggtggtggtgattcggtctgtggatggtgatggtggtggtgatgttatgaacaaacgaaagaaaaaggaaaagaaaggaaaagaaaaagaaagaaaagtaaaaaaaaaagaaagaaaaagaaaaggaaagaaaggaaaaaaagaaagaaaaaaaaaagagaaaattatttttttaatttataattttttttttaattttttaatttttttttaaaataatttttttacgtggaccaataaaattatgctacgtgtaaactgtgtccagtccaacatgaca

SEQ ID NO: 404318 - DNA, 896 bp, Cannabis indica
caaccatgaagtgttagtctaggtgtataccccaacctccctacaccttcatggtacaagtcatgcattttatcatagatacaatgacattctcaaaggtatatggggacatccacattacaccataactactgacaacggacaaggggtcacccaacgagggtggttgtcacccttgtcaccccccttaagttgggtcccagggggtcacccaacgatggttgttgtcaccccctcaagttgggcccctgggggtcacccaacaatggttgttgtcacccccctcaagttggctcccagggggtcacctccctcaagttggctctctgggggtcacccaacgatagttgttgtcaccccactcaagttggatcccggggggtcacccaacgatggtggtcgtcaccctttgaacgagggccccgggagtgttgcccctaagtatgggcttcattcctaaaggcggttgacgaccatgtcacacccataagggactctcgtcgtcggtaactccttcaaatgttcaaatcccacgaaatgctcaaagacagttgtcaatccacaaaaatagcgggatattatcataaaaatcagacttcaactacctccgaaaatcaaggagacagttgaggtagctctgtgttggtcgcgtctcctgaagcgagaagcaccgacccccctcccctatataaggggtcatttttgacctgggagggggatccacaatcttgaacacttagaaaataaacacttctcattttttgcaatcaagagcctgttcttgacttttgcaactcagatcaatgaaacacaaggggagtaggctattaccgacattcgaggttgaacctctttaaatttcgatgtcttttatttacatttattgtaaatttcgg

SEQ ID NO: 404319 - DNA, 519 bp, Cannabis indica
caaataaaaaaaattctctagctaccaactcacaagccaaaccatcttatatagtattcaaagattgaaagtataatatttattatttaataatacaaattaatattattagttatgataatagaatataaaaaaaaatgttataacaataacagtgataatattaatagagtaataataaaatagtattaagacaggagttatgaaaatgaaaggacactaataattattttaaatgataaataaatattaatgaagaataaaaatataacaaaattgtgaaaaactcagggagtaacaaaaatagaagaaaattcatatgagaagccgccttaacaaaaaaattatataaatatatagatagatagatatatagattgtttaaaaaaaatatttaaaatgtgagggagatattttttaaatgtatttgtccatttcattcaccatgattaatttgtggcttttattatagctgttgaccgagattttcggcaactactaaagtatgattataatatt

SEQ ID NO: 404320 - DNA, 554 bp, Cannabis indica
aagtctcatacaaaggtttattagtgatcttaatgcagctttttctctaaaagacatgggtgcagtccactactttcttggggttgagattcatcaaagtgaaagtggaatgtccttatctcaaagcaaatacataacacaccttcttgtgaaagttcatcttgaaggtgctaaggtttgttctagtcccacaagctcctcccataaactgtctcttaaggaagggactccatttgaagatagaactctctataggagcactgttggagcattgcagtacctaactctcactagacccgatgtatcatttatcataaataagctgtcgcaattcatacatgccccaacaaacactcaatgggaagcatgtaaacggcttttcgatacttaaaagggactctcacacacggcttgtttctatctcaaacagctagattatccattgaagcttactctgatgctgattgggcaagttgccctgatgatcgtcgctctacaggtggttatgctatctttttaggaccaaatcttatctcccggtctgctaagaaaca

SEQ ID NO: 404321 - DNA, 713 bp, Cannabis indica
gaaataactagccattaggagtaagtggtcatacacattctgataaggtttcatccgtgtattaatgaagttcttggttgcacaaaacgagcttgatctgatgccttcccaaatagttcagttaactgattcatgatatttgtagtcgtgagagtgttggcaaatcttgttttcaaggtattaaccatgctagacaacataaagtaacgagacttcttgttagcattctgccaacgctcaaatttttcctttactgtcttagttgcattctcacctagttgcttaggagcttcctcaattaatacaaacaatgaattctcacctatgatagcaatattgatgttctctttccatttgacaaagttagctcaagagagcttgttgtcaatcaacagtgacacaattgagttgttcatagtcatattagaaactacaaatatcaataaataaaaatcaaggtttaatacaaaatcatacacatgttcagaaattagtaaacatttagcaagtagtaaagatatgtgaaaatacaaaacaacacatcttaaataatttctaagattttcaactaaatgacataagtgtcccgtttaagtgagagacaaatatatcattagtaaaatagagttgtcaactcatctaaaatgaacactattttagcaacattttattcgatcaaaataaaaatctaacgttgtcccatttaggcaaga

SEQ ID NO: 404322 - DNA, 657 bp, Cannabis indica
cccgcatcgcgaacacccctagtgccgacactgaaaaagtcatcaaaattggcattgtcgccaaaaaaatcaccggaaaaattaccaagaaatcgttttcttgatgaagaaatcggtttcttgatgaaggaaccagtttcctggtgatttttccagcgacaataccaattccgataactttttcggagtttgctgtcggtgtcgaaaaagtcgacagagtagctgccgatgtcagaaaaatcgccggagttgctgacggcatcaaaaaagtcatctgaattggtattgtcgctggaaaaattatcaagaaactgaatttgcatctgaattggtaatttttctagtaatttttcgaagaaaccagttttttagtgatttttccagtgacaatgccaattctgataacttttctggcgctatttgcaactctggtgacttttctgacaccggaagctactccgacgattttttcggcgccggtaacaaacttcggtaattttttcggtaccaataacaaataaaactgcctaaatgaataaaaatattaaatatgggctttaaaaacctaatttacatatatatggcatatcaaatactataaaatatctaaaaataaaaaaaatgccatataaattagtcaaacttaaaagtaccata

SEQ ID NO: 404323 - DNA, 1003 bp, Cannabis indica
gtttcactttttcttcaaaccaatattaacacaagagaaagacaacaatgagtcaaaaaaaaaaaatgaattattgaagttgaggttttttcctaaataagcttgagtcataatttcttaattaatatatcctatttgaatttgacttctaaaaattatactcatgctatatttacatatatatttgaaaataaataaaggggaattctcattacaagttaacaaaaatatgattttttataaaaaaaaaaatatatatatatatatatatttatgaaaatcttttagaaggaaattaaaaagtatgaaaacccttgtaatttcttcataaataaatgattccatagcagatgccccaggccaaccacatagatggttactcatttttttttttttgtaacaagattctcatctaatcatcttgagtacaaagacattttaaaattaatgctttgtttatttttgaaaaaaaaataataattcttcatataattaataattaagtgatgatgatcttcattgcttcatcaaatatgtcatgaataatggcttgaatatattaaaagctattcaggatcatcattgtcttgcctaagctctaccacctacttcaatatatattgtcattgaattcagtagctattctccttcatctcgtgatcgagtacgtagtctttttttttttttttaatttccacttaattttgacctttgtctccatatcggaaccctagcttctctaatctctctgcaactgcaattcttcccggatgatgattgctagcttctttctcacctttggtacgtgatcatttatactttccgtaaaatatacaaagggaaagttagatcatggcctcatgaatcaaatgatccaattaaagagaaaaaaaagtagaaagagaataaattatagggcatagtacgcaaaaacagaaattcagtagattatatatattttaaaaatgtaaaatattattaatattaggctaattaggatttt

SEQ ID NO: 404324 - DNA, 768 bp, Cannabis indica
catttattgccttgtttcgatctgtccccatttttcacctcttctgtttaaccaggatgtagttcgggtttacattcagtttatgagtgatgacggttggatctattccgggcatgtctgagtgatcccatgcaaatacttggacatattccttcaataactctataactcgattctttcggtctccggtaagtcccgtgccaatgtaggttgttttttctgggtctgttgggtgtatgggtacttccagcaactcctctaccgccggagatcgttcttttgccggggtcgaggagttgattaattgctataacttgtttttattcctcaatgatgaggagtagcattcgcgggcccccagctgatctcctcggatctcccttacctcacccttgtagaggaacttaattacttgatggtaggacgacgcgactgccttcattgcatgaatccacggcctgccgaggatggcattgtaggccgacgggcaatccacaattaaaaattttactaatttgtttactccattcgtgtagacgggcagttggacgaaacttcgagcaacggcactttcacccgagaatcctactagtgtaacctgggtgtcttgggctttcaagtcttcaatttccatttctttcagaaccccggcaaacaaaatgttgccagagctcccagtgtcgacgagcatgcatttcattcgaacatgagcaacgtccaaggtgatgacaagagcatcgtcgtgggggtgttctaattcggaggctt

SEQ ID NO: 404325 - DNA, 1169 bp, Cannabis indica
gaccattccttgccactgcaaatactttgatcaattgtcggaatgctctaatgaaattattatttggaaatatgacacttgaggtcaacatcttccacattgggaagcaactccaagaggatgatgaatgtcatcaaacattcatgattgacaatcttgtttcggaggaaattcaattgcaaagaagttatgataatcttgatgaactcctctctcactttgaaaatgaaatcctagttttgttaagctgctctagctatttttgatcacttagacacacaaaatagagggaagaaattttggaaaccccactttgaagcgctacctcgtgagagggaaacgctaaaatcttctgctgaagaaactcctaatgttcaattaaaccaacttctagagggtttgaaacatgtttttctgggagatgacgaaacctttccagttatcatctcgttcaaccttcaaccttctcaagaattgtagttactcgagttactgcgaaaatacaaacttacaataggttggaggcttatcgatatcaaaggaattagccctcgagtttgcacccatcaaattaatctggaagatgaggctatcccacgaagagacccttaaagaagactgaacccatcgatgaaagaagtggtgaaaaatgaagtactaaaacttcttgatgcggctatcatttatccaggggccgacagtaaataggtcaaactagttcaagtagtgccaaagaaatcgggtgttaccattgtccaaaattaaaaaaagggcccttgttcccacaagaactgtgacgggttggcgcatgtgcattgattatcaaaaattgaatgccgcctcccgtaaagatcattttctgctcccattcattgatcaaattcttgagcacatcactggtcatccattctattgcttttttgatggttattcaagttactatcaaattgagatggcattagaggaccaagaaaagactactttcacttgtccttttggcacatatgctttccggcatatgcaatttagaatgtgtaatgcaccagccactttccaaagatgcatgatgagcatttttagtgacatgattgaacaaaccatggaagttttcatggatgacataactgtttttagaaaatcttttgacgcatgccttctccatcttgaag

SEQ ID NO: 404326 - DNA, 522 bp, Cannabis indica
ttgttgataaaaacccatgtcacaacattgttccttgttagatttgaggaattgagatccaaagaagttctcgaaaacctaaaccctagccttcatatcccccaggttgactatatgtcaacttgggcgcctagtagggtcccgaggagcctgggtgcagtttcttccaaactcgtctctaaattgtgaaacttggctgggacatatctctcatgtatcctagtacaatggctaagaaaattccacgtaggaagttgttacgtattgaaactgatgcgagttgcactcagggtgtcaatgtgggcgtccagtacttgtactgggcccaggttgagctaggggtttacgtcggtcggtttggtcggtttatgttacattttatttaatccaatgtaaagatcgagttacaaaaatctaagtgcgacccacccaattaagaaaaaaaaaattcaacccacccaatgaattggtttgtttagtcgggttaactcgtccaaaacgagcactaatgtttattttttt

SEQ ID NO: 404327 - DNA, 568 bp, Cannabis indica
ttttttttattaatatttgataatctatatttaggaaaaatgtagggatgataattgtactcagggttcggatactcgtgggtttaggcaggacatgggtcaaattttgggggcgggaacgggtatgaatttaaatatttatattcgagttagaaatggaccgagagtaggagaatagatattcgccctgaacccgctcccaaaatacatatggtgatgcatattaatacacactcaattgcttttaaaaaaaataacacttaaccacttattttcaattacaaattttgtatttactaactccatttactactactccacttatatttgttattttaatgagttttttatgactatttttttagttctcggttaacggtgagaactcatcaactaacttatggctgaaaaatcaactttacgcttcaagctcataaatgagataaagagaaagataaaatatatactcaaattatcttgaaatggagagaataatataagaacttctattgcttttaatgtagttttacaagtatgattttccaaccccctctcacatatgagaaag

SEQ ID NO: 404328 - DNA, 531 bp, Cannabis indica
atgttacttttatgtagttttctcgttgtttctacgaaaaactataaaaatgtaaaaaaaaaaaaattctttaaacgtaaaaatgtaatttttttttacaaaaaatagtacttttatgtaattattccaaaaaattaagagaaattttttttttttcaaaaagtcttacatctatttgggttggacgtagctagactagaatcgcgagccacgtcgagccttgatggatgtgaggcctcaaattaaacactccaaataatagaggaaattacattgtatacccattttactttacatgttttttttttttttaatatactcacatttatggataatgttcccattatacccttaggttaatataaattatgtgttagacttaaaaaaaagtaagagtgtattgagcaatccaatcacaaaagcaagtatattttaataaaatataatttaatttttaatgaatagataaaaaaaagctaattcgaatttttttcccgtaactttgacatgtaccaaatcatgcctcctgaa

SEQ ID NO: 404329 - DNA, 946 bp, Cannabis indica
tgttttactgaatgtagttcatggcccaatatcccgattgacatttagcgtccaagtttatattccagcgcccacgttgatatatgacgtcaacctagatgttgggtaattgaaaaaatgtctaagggggttacttatgacgcctaagtgatattttgacatcacttagttggtttgtgtgttctagcgaagctagtcactagctttcagagatgttgatgttctggaaatgagagactcgaaactcttcatttttcaagtggtttccccatgttggaaatgagagaatatgaagatgaattgtgaatttgacttctctaacttcatgaattttagttattgcgaaaaacgagacgaacggtcgaaacgaaatcataatcggataagcagaacccaacgcactagaccatttgtcaacctgggggctgggtactcatttcagattttttgggatgtcgttttgttacttccaaagttcttgaacttgaggatgaggactcccaccctatttttgaccattccagattgaatggtcaaatcaaatttgccacatgaatgatcaaaattagtgcatcgggttgattgtcaacctgggtgctaggttttacttccaaggccttgaatttgtggttttctcccaaaatttgcttgaatctttattattttttatgacagaaaaatacttggaacactttttcgagaacttgattggaaacaaccgaggttgacaatatgtcaatctgggcactggttcccctttatggcccttcaaaagttttgtttggttcccgaaaagagttgaatcttaatctttgttgaaaactgagaacatacttgaaagaattctcgaattacgtcatcagaaaactgagaacatccttttctggcaagttaggtgacaaaataattttcctttttatggtaagattgctatgcattcattttc

SEQ ID NO: 404330 - DNA, 516 bp, Cannabis indica
gatattctgtcgacattatcaaaaagtaaacaattacataatttagtcgacataatattagtcgacataatatgtcgatattctgtcgacattatcaaacagtaaacaattacataattatgtcgacataatatcgacatcctgcgacattcagtcgatattatcaaacatgaagcaacaacataaaattgtcgacaacatatcgacatactatcgacatgatgttgacattccaaggaatcggatcacaccaaccggtaaatcaaaattgtcgacatcatgtcgaaaactggtcgacatgatcaaagttagctatcacatataggggctacatctcattgtcgataacatatcaacataccgtcgacaagatgtcgacaatttaggtcaaaaataaacttaatcaactgtcgacatcctatcgatacacatacgatatcatatcgacatacaataacaacacagacaattctaatgatcaaacagacatccaaataaatcgacatcctatcgata

SEQ ID NO: 404331 - DNA, 698 bp, Cannabis indica
aacatttttataaatccctcatcgaaatagataatgttgtgcaattttttttatatttgtcatcctacacacacttttgtgaagaagaagagatacattccagcaactatacaaaacaaaatataaaaacctttcataaataacacttaaattgttgtttttgaattatttatttttgctgaagaaaaacaaatgcaaacaatttttttacatcaattaaaaattgcgtcatttattaattacaaattcattttataaaactttaaaagatattattattttcatttatttattattaaaaaaaacacttatagtttctaattttactatttttctacatattgagttgggctatcttgcgtgcgcggaatgaatttgtttgtcagaagaagagttggtctacatcaaatattgttgcatcagctagaaacatgcttgatcagtacaaatttgctcaagtaaggaagggtctttcgttatctccgctgcatgatgggaggggaaatcttgatctttggattgcactgagataaacaagatcaatgttagtgttgatggggctttatttgaacaagaggggcactttggcatgggctgtgtagcttggaattatcatggtgctatggtagaagcattcaataaggggaagattgagtgtgttcaacacaaaatttctgagataataggcattaaagaag

SEQ ID NO: 404332 - DNA, 511 bp, Cannabis indica
taactaaaggctaattaaaagggaaaaataaaaggaaaaaagcacacattaaaattaaaagacacattaaattctctaaatcacacattaaatttaaatagaaacggtattagaacaatacaaaattaaaaccaaactagtaattgtaatctaaacataaaaagagatagagaagtgcttgagaaatcgaagcaaacccagaaaaagtatacaaattttcaccattttcgtgagaaattgaagtaagccgagaaaaacaaaaccgttaaagtggtagagaaagcacaaaggggaaacgcgaaacccagccagcccaagaagagattcatcatcctcgtgtgaatacgaagaaaccctagaaaattggtggaaggagaaggtttttgaaatggcatatcgtcattgaggtggaaaagaccgactacgataggtcccaaatcaatattttagggttttttttttgagttctaaaaaaatattggtgttgcttgggtaaatctgagtagaatga

SEQ ID NO: 404333 - DNA, 655 bp, Cannabis indica
tcttctctttcgttggctgcgtccaacaccggccccagacgcacggccccagacgcatgacttcctcccacaccagcgcctccccctctctccttccacaccagcgcctccccctctctcctcctacacaccagcgcctccccccctctcctcctatacccacaaagttgacttgaattgcttgtttgatgttgttttggctccctgtaaagtctaaaccagttcacttcaccttcctcttcttcagagtttgggccttagtgagaaacattccattcctgggttgatatagaagaacaagaagaagaagagagcacccattgccgtaccagagggtagttcattaagtaaccttttgatctcagctctccctttcatttatagggtttttgatatggcgacggctgagattttatttatgtatttatttgttcattaaattttatttgtgtatgtttattactataatatttgtgcatttcaggttttgaaaatgggactgggattgattacgggattggaaagaataatgaggagaaaaaggacttctatccttgaatcaattaagttatattttctattttttttattcaaatgctaatacccataattatgggtttacattgttattgtattttcttttaaacaattatat

SEQ ID NO: 404334 - DNA, 546 bp, Cannabis indica
tcatgtgtacattgtgttcatgtgggcaatactctgtatacacatggacatgctcacattgcagttaactgccaaaaatgaatgaaaatggttaaatgctaaaagaacatatatttaggagattttaccaccaaaatttaaaattaggagtttgttgtaataaactaagcacttattggagttatgtcgcaaattactctttattaaatgtatccacttttgtaagtgggttgcccaatataccttcactctccacttaattcaagtacataatttatattaacctatagggtataatggagacatcatctgtaaaagtggatatatcttaaaaaatatagaaataaatgtaaaaattaaaaaaaataaaataaaggagatatataatgtaatttcttcactattttttgtggcatcctcctagcactattaatttattatattatttttggggaaattttattttatagcttttgtttttatttttttttctaaagtttatggtcttgtttttttttttttttttttagtaaattattattttat

SEQ ID NO: 404335 - DNA, 775 bp, Cannabis indica
ctcaagtcaatacaactaaaaatggaagtaggctatacctattctacacagagctgaacctctagaaattttgttgtttctctttatttactgttttttgttttctacctatttattttatctaatcactttattttgacaaattgcattggctagaaccaagatcaacacggattaccatgaattctactccacccagattgtgaagtggtgttgactgtcataactatctttttttttatttgttcttttttccaagcatctcatgcacactatccattcttggcttgggaatgctatttggccaaagtcttatccgaattgggcttttgttattgaatgctaatcgagattgcagtctattgcatgggttgttgcaactgtttgtgcggcagcagtttatcttatttggtagaatcggaatgcttgtatctttgagaatgttttttttttggttttggttatgtgaacaatttgattagagttacgcttaaagtaagattactacttgttaataggaggaatctcgctaagagggaccaacaaatctttaattttatttgtaacatctttatatatgaaatgtggctatctaactgtttttgttggtttagcagaatattttaagaatataagaatattctgttaaatttaacggtattagtagggtaagttttataaatatatatatatatatataaatattaatatcatttattttagattaatttaaacacatattaatattaatattatttgttttaagttaattgaa

SEQ ID NO: 404336 - DNA, 812 bp, Cannabis indica
gatcaagtatagtatgtagtgttgtctttgtaataggatatgccaggttgtatttagtacaaactttctccaccattacatctccttagtaacaaaatcattgatattgtaaaattcctctctatatatctactcctcgagggatacttgattctttatttttggaaagtacatatgtgttagtcaggaagtaacactagtagctaattcgttgttggtacaacaccaaaaaaaatgtacataacttttcataggctaaataagtatttttcttgcaactttaacattcagtctcactaatagagttagagacttcaaataggtttttacccttctccagaatcactgctccacccccagagtaatcaccatctcataaatagactttctagcaatgatgcaggtctagaaaactgatttggtgtagtctaagagtattaaaatatcacccttaataactaacatataattcctctttttaattttaagattcgtttgattatcttctaatgttcctttccttgattaaacagatacctactcgtaactcctactcaacagcaggtgtttggtctaatgcatacaagaatcatacatgagacccctcactgttgatgcttaaggaattctttcatgacttttatcttttctagaatagttaaaactatccttagatacataaaattctatgtctaggagtcaaagacttcttttagaattagccattagaaaaattctccaacatcttactaaagtaagttgcttgcactagagtaagtaaaataccaagtataccacaagctatagattta

SEQ ID NO: 404337 - DNA, 577 bp, Cannabis indica
gatctaatgattaattccatgaatatgatatggagctggtgtcttccatattcacgctatgctagaggattatcttagtgggatgagtcacttttctatcatttagaagagttaatttcactaatggatcttgcccattatcttagttgggccagctattaggcctaaagtaattgagttgtagccggctttagaaagtacatgtgtcctcatctggaaatacaaaaaatagggatgtttcccatttaatacatctatttcggttggtaacatccttatggatgtgggttgcaaatatagttcacctacattataaatagagacctaagtgattcatttgtgacaagtaagtttctatcgagtaagcaccttcttggaaactatccaaaaacctatttcatttcttcttccctaagtgcttgtggtatgaaaaataagtttttggtcaaatgtgtaaaaccgtattcaagttttggtaattcccatagttatcattttggtgtttgtggtgttgagatagttctcatatatatatatatatatatggggcgtattatagtagggagttggtagtata

SEQ ID NO: 404338 - DNA, 1035 bp, Cannabis indica
cttttgagtcaattctgttaagggagtagaaatcttaaaaaaccctttaatgaatcttctatagtatcctcctaatcccatgaaactcttaacctcggttgcagatttgggtcgaggctaatcccaaacctgttcaatcttcagcggatccaccaagataccatccttgttcaccacatgccctaagaagcttactttggggagccaaaactcacatttcttatatttagcataaagcttatgctatcaaagatgttgcaacaccatccgaagatgtctttcatgtacctcctctgagtcagagaaatcagaatgtaatcgatgaagacaattacaaagtcatctaaaaagtccttttacactcggttcattaaatccatgaatgtcgccggagcattttttaatccaaaggacatcaccagaaattcataatgtccataccaggtacgaaaatctgtcttaggaatattctcctcccaaatcctaaactggtgataaccagatcgaagatcgatcttggaaaagacaatctttccctgtaattgatcaaacagatcacctatcattggcaaatgatacttgttatttactgccgatttattcagttcccagtaatcaatacacatccatcaggtttcgtccttatttttcatgaaaaaaacttatgcaccccaaggtgaggtactcggttcagtaaattttaaatccaactgtaatgaccgctttagtaatttagattagtaaaggcaattagcactaatttctaatatttttataattattttatgaatttgattatctgtgggcctcattgttagaaatggacattagagttataatttctcaattttagagattttattaaactttaggggtattaattgacttatatgtgaattatgtaatttttgctcggcgacaacggaaaatgcgatggatggatagttggatcacattggtaagtctagaaccttatattttagtgggatgtgtattgaagaaaataaaatactggggttaagcggggttatggaa

SEQ ID NO: 404339 - DNA, 421 bp, Cannabis indica
ttacctaattaaaaaaattaaacatacatgtattgcacttaatatcgccgtattgaacctaaataaaaaaaaaaaaaactaattatacgtgcattccacgtaacatcaacctagtatatatatatatatatatgggtacagtcttaatgggtattacctatgaatgggtacaattagaaaattttgagtttttatgcttaatttttctatctaattaaaaaaatctcccatttttatatcatattgactgagattgttccatcggtaaaaaaattttaaaaatattttagcaagaaaaataagaatagaaaaagttgagtttgagttaaatatttttgtacgaacatatgtttgatacagtgtaaaaagagatattttttgatattttttttaattaagtagttaaattaagcatagaaat

SEQ ID NO: 404340 - DNA, 516 bp, Cannabis indica
aaaaatcatacttcaatgattgaactaatcacacaaatgaattcaccaactgtttgggtgcaaaggtttggaaaatcgattgatatctttaggtgactatgtcttttaagtctgtagccataatcaataaataataataataataataatgtatttttttacatattgagaaattatttttccatagcattatttgcataattatatatcatacacacataaagtgttaataacaaataaatatgagatcaaaaggcaaaaaatgccaaccctttttaggtacctcctatgaattttcaattcctcatggatctacttagacaaaataaataaataaataaagttaataaatattgtagaaactagaaagagtaatgtggtgataaagagtaatattgtacattattatgaagggtaatatttttgtttggagcagctaaagtatattgtgggatgaatgtgatttatgtttaagttgctattacaacaaaatataatcaatcaatagttatccaa

SEQ ID NO: 404341 - DNA, 993 bp, Cannabis indica
agagagagagagggatactccttagtcgaataccacgtgtaagggataataggaccaagatttgaccaccatggccaatctggtactgaacaattgaaacacatcctataatgtacatcacctaatgtctatcaaaacccatctttgtcaaaattgcttgaagaaactctcatttaatacgatcataggcttgactcatatctagcttcaaagccatatacccatcttgaccttatttctttcgatttaagtaatgaaagatcttaaaaaagatgaaaatgttgtccaaaattattctaccagaaataaaagcattttgagcatcagatatgccattggaaaggaatcccttaagacgattagccaaaactttcatgatgaccttacaaagaacattacaaagagcaataggacaaagatcccccatcttgaccttgtttttctcgttttaagtaatgaaagatctcaaaaaagatgaaaatgttgtccaaaattaatttaccaaaataaaagcactttgcgcatcagatatgcgattagaaaggaatcccttaagatgatcaaccaaaactttcatgatgaccttacaaagaacattacaaagagcaataggacaaagatcccccatgtaacgccctaatccataggaactccatgtgtgtgattttctaaaactagtttaatactaatatattaattaattattaaaaactgtgaggatattaaaaacttgactaatataaaatactaaaaaaggatattataatggcagtaaaaaggtgttccgcggatccctgttataaaagatttacccaaaagacgatatacaacaacaattcaaaatatagctacaaccagtctaaagcaactcctgaaaactctacacgcaggccggtggggtcaatatgtacattgctggagaagactgcaatctcatggttggttgttctaactttgccttgcccttacctgcaccacagagcacccatgagt

SEQ ID NO: 404342 - DNA, 316 bp, Cannabis indica
tatcttaaagattttttttctttattttaaaattaaaaagaaattaaactaaacggagcctacatcacatcaaaaaaaaaaataattaaagtgacactttcctttaaaacaaaatataattaagtttgacatggtctttttcaataaaaaagggatctttacaattttgaacaggatttttttttccaaaaatatatcttaaaataacacaaaatcaacaagaaaattacataaaagtaatatcaaaataacattaaaataacaacaaaaaataacatacagataacaaaaaatcaacaacaaattaacaagatta

SEQ ID NO: 404343 - DNA, 679 bp, Cannabis indica
ttaaaatgactaacttaaagtgattacctcaagtaacttcctcttgataagatctatactataaacaaatttaacacaccaagtaaattctaaacttcacaaaataagataaaatataactaaataaacataatctaatattattatagaaaatgaaggattgtacattacaaatagatatataataaactatctattacatatatatttatatattgatgcatgtgagtagttaattaaaaagaattaatgctaggaatcaagtacaaatcatctcttctactaacggatgcaccaacaaactctgtcatatccaaattttcatgattcattttattaggaagattccaattaaaatgatatagcaaatatgctaaaggaagctcaacattgatgagaccaaatgatattcctggacatattctccttccggcgccaaatgggatgtactcaaaatttccgcccttaaactcaatagagctttcgataaacctttcgggcataaaattctcaggctcaatccaatactttggatctcttccaattgcccaaagatttacaatcaatcttgttttcttaggtatttgataaccattaatctcacaattttctctacattctctaggaactaaagcaccaggaggatgtaatcttaaagtttctttaacaactgatttta

SEQ ID NO: 404344 - DNA, 778 bp, Cannabis indica
aactcatcactcttatttttaaaaatccacttcgttctaatgatattcacaaatggcggtcttcgaatcattgtccataccttgttattttgaatgaacttatgtagctcatcttgcattgctaggaacgtcaatcttcatccattgaggcttctttcactgttttaggctttaaagaagaaacaaaacacaagaattgaattatattagcaaattttcttccttttatcatgcccaagttttcaaggatgagatcagaaggatgattctttttaacccttgaggatggttccctctgaattagatcagtggtcatatttgaaggattctccaattcttttgttgatgaagattctggaagaacaacatctgtagttatagagtcttgcaatgtagtctcatctgcagcttctgtggctctgtaatttaacttgccacaatagaaggcttttcaagcaatttatcaatatgttcttctgttgaaatcgcagagaaatcctttagatcatcaacaacaacattagtagatttcattacggtttgggttctcatattatacacacaataagccctactattaacggaatatcccaaaaaaatatatatttataacttcttgcatcaaattttcctgtgtaatcacgatctctcaaaatataacaaacacaaccaaatacatgaaaatgacttacatttggtttcttacctttttcagatttcatatggtgtcttgtgaaaacctggacgtaagaacactctgttgatagtatagcaagca

SEQ ID NO: 404345 - DNA, 661 bp, Cannabis indica
gagactgaccgtatttttagtagggattccctaccttttgtaattgcatcattggtttttggatgatttagtttaataaaatttaatcattattaaaaaaaaaatgcaaaaagctatcaatttaatttttatttatttatttcactgtaaatcttttatttgatatgtacctatatatattcgttgattttaataggaccttttgagaatacataactctattcattatctttctctattgcttaatatgtttgtgaaagagtcttttttttttctttcttattatcacttttatttctttcttattattactttaattaaatttcatatttttgggtcaataactatagatgtataattagtgaattttttctaataatattttgaatgtttatgctatgctaattttatgtttcttttatttactgtttatgaatgagattacataatgcatatttatactgactattgtctctataaaattttaggctttaatgtgaaggaggataatgagttgatgccagattacgaaaattagaggaagcaatttctctaataattgctaatttaataattactatgcatggtgaattacacgaggatatttacgtggttacaaattaaagaaaagtttctatggcttgaaacaagcctctagaca

SEQ ID NO: 404346 - DNA, 652 bp, Cannabis indica
gttattgagtgtgtgaatgtcacatattatcatatctatatgatattggtgaattaaaacaatattataatatctatataaattttttatatttattattaaatttttataattattcaaatttattgataaaatataagtttaatcattattttttatattttataaatatccattattgatatcaaaaatatttgtgatatttatataaacttaataggaccgatatttcaatagacatcactactttctttttcgttaatatctaataaaaaaatttcatacttaatttttaggaaaattaactcaattttaatttttttttttaaattttacgatttaggtttcttcggtaatttctatgtaggttacaatgtggatttttgttacgatttaggttgatccgttaattgttatgaaagtttctatgtagaattctataacaatattaaaaaaaattattttaaaatataaaaataaaaaaaacctttagattttacatgctcactctttttaaacaatgaaaatgaaaataacaataattataatttatagtagattatccataacttaattttttgtaacatatactaatgtgtattatagctataatatacaaatttttaaaatgtttgaataatttccgttcaaa

SEQ ID NO: 404347 - DNA, 668 bp, Cannabis indica
taataaaaaaaggtagatattgatcaagcttcattaaccaaaaaaaggatcgaaatgtagaaattaatgacagtaattaattatatatcccttcttttatatattaattggtttttaacctttggggtaaataacttataaatccaagggagccttaaaaattataattatttcttttagctttaatcatgaagaatttaaacagaggagcctttctgtctctctctaactatatatgatttatttttattttttacattttgataaaaaaaaaaataaagaaaaattataaagcattgatctgatcacatgcatgcatgtctataatggacatatatacgtataattataattaattaatagtaatttatagtgtaaatatcttaatttaattttcaattgtagataatgtatttaattaagggctaattagcaatttttcctaaactttgacatataccaaatcatacccttgaacttttttggccttaaaaattccccttgaactattaagattgttagatttaaggacttttatctaatttcattcaattttactgtttcagtgattgtttatgtactaaaacatgctcttcaaactttaatatctaccaaattatacctctcaaactttgatatgtactaaatcatgcctcataaactttcat

SEQ ID NO: 404348 - DNA, 557 bp, Cannabis indica
ataaatgagttttatggctaatgagaagttgataatatgcctatcattcatattataagaagaagtaatatattgataggttcgaaatttttgtctcatgtcatagttaattcaaagcccatgttgatgaagaaagcccatcaagctcactcagttgtatacaaacaactctaatacagtaactcatagactaagactacttattagaaatattctattgctaatgtatggaaatttataataccatatgtaagattcatgagctactcctctatagccaattaattttgagatgaaaccccatgcacattgtcatacactcattttcatcctaaattttaacatagcgttagaataataaaaaaaaagactttgagtgtccttttctttgacctccattaatttgagatcttttggtcaatgtatgtcagtttttagtgttggaatctttgacatgtttaaatattttcaaacgtgtacacttacaaatttcctgatttagacttgtgagtatcttttaaatatcacattatattatgtggtctcttaaaaagttg

SEQ ID NO: 404349 - DNA, 593 bp, Cannabis indica
cccaaacccaaacttggatccaaactcaacccgaacttgtacctcgtgacatgaaactggaaccgaaactagaagcggatcgggacccaggaacaggaccaagaccaggaatttaaaaaccttggtgctctgatatcaaactataacgccttaagaaataggcacactacccaaggtgattaagaaaccctaatcccctaaattatccttactagaaagataagtgcgggtaatttaaaatttaattgaaaacaaagtgaaaataaaagttgtaataaacataacattacaatcaaaaattacatgtttcgagatctcaaaaatattttacaaaatattacaagccttttcactagctgacctaagcggcaaaatcagagtttcaaaagttcatcactgctagaccccaatctgcttggtctagtgtggttcgaacatgtacatacatcgcccaactctcgcactcatggatgatctgagacagatttatcctttcctgcacagtatagcacccgtgcgccaagcccagcaagacagtataaaatatcaatgccatttcacatttggctatatgacacagacccgtgtgttac

SEQ ID NO: 404350 - DNA, 793 bp, Cannabis indica
gatatttatctatattaataatagggaaagtttcacaattgcactaaaataggaaaaatttaacaaaaatacggttacacatcaaaatacaacttatatacggtaagtgtaatctaaattacataaaatacggtttcagcttcttcaacaccattgatgctcgcccgactgaaaaaaaaaaatagagcaacaattgatgctcgactaagcttgctaaacaacaatccaacaacatttcaatgaaaaattaacacagaatttacctactctaacaatcagactcatagaaaccaaaaacaaacatcaatagagatgaattcatcaagagcaattactcattgatcaaatctgcttacacagaggtatcaacaattttatactataatctcataaagaactgaggtatcatcactccttctaaaattgtaatttgaatgttgcagatcattcaataaatataggagacattgttgatcagagctccctactgaattcaaattcaaattgaaacaggtattaaacaaccaatccacaaaattcgaaataaatgcattcgcataacaaaacatataattgtttgattgttgcagttcgtagtacaaatgagatgacaaattgatgatcgcaactccatattaaatccaagagatatgaaaaaacagagtaatgaaacacaccattaacagacaaatctttatactaaaaaacataaacttgtttttaaattgttgcagatcatataaggatgagttgaaaattgttgattggagctcccaatcaaatccaaacatac

SEQ ID NO: 404351 - DNA, 673 bp, Cannabis indica
ttttcgtcaattttttttaacatgacaatccgacactaatttttagtacgaatcgtaatcgtcaatttccaaataaccgacgccaaaagagttcattcgatcagccaacccaaaaatccccaaatcagagaaaccccaaaccctctccgccaaccaccacggaaaatcaccccatttcaccattttagctcatttttgtttctaaatcttctatttttcataccaaaaactatatacctgaaaagatcacatttttctcatttttaagggtaaaccgatggtagaggtagtggttgtggtggttatacctccggccaccatttttagtggagaaaatattgtatctcaacgtctattaaggtataaatctaatttctactaattttagtaatgtacattactttattttttattttataattttttttaggatttttctatattattaaatatgtattatgttgtattgaatatgtattgtgtgtgtatatatattgtgaatgagaaatgtattgtgtgtatatataattcacttagggttaggattgaattatatggaataaaaaatgataaaaattcgcacaaaatagagataagtggccgaccatatgtgagcccatctcttgttacatttttgccatttttcttaaccatttatctattatttcataaa

SEQ ID NO: 404352 - DNA, 500 bp, Cannabis indica
ggaacccaagggtggaaccaaattgaagtttcctccccatttccgatccttctacagattcctttgtggataaactgtcttgcattgagaatttctttccacattcttgagtctgcaggttgtgcttcaatatccaagaaatctttgtttctcaaatatttggcattcacaatcttaacccagagactactgtcctccaccatcagcttccaagcccacttcattaaaaacgccatattggtgtctttggtagtcctaaagcccaagcctccatggatctttggcttgcatagtctttcccaagcaattgtatgcatcaccctcttgtcttctgtatctccccaccagaagtcccttaaggttttgtctattttgttagcagtagagacggggatagcatcagatgaagctaggtagtttgccaaggaggatccaacggatttgattaagcatgctctgtccgcattggaaagaagttttgtcttccaacctttgactcg

SEQ ID NO: 404353 - DNA, 1284 bp, Cannabis indica
accatcagacgggcatcgagcccgatctaaaaaaatcccattttcgaaaaatctcttcctaatcttcctaaatctaaccttaactaacaaatttcacacaaaattgcaacatattattctatttcatgaatttaaagcacaaaaaattaaaggaaaaaattgaaaaaaaaaatatctaagacattttgggtggtttgggcgatcggcgtggctgatgtgggttgagggggcggtcgcccgtgggtggtctgccgtgggtcacatcggccggtcgactgcatggatggtctgccatgggtgggtggtctgcgtgtgtgggtgcggcaccgagcgaaagagaaagagagaaagagaggcgaaagagagagagggcatgtttcaaatgggggggggggtattgtggaaattaagtaaatgttatcatattttaccaatacctcctattttaagtttagggaaaaaaattattccctaatgcatgcatagaaattcaaatttccctttggaaatctaataatgtggatgataggaaacatgatctacaattatagaatcttaactttcctaacatatcgctacaattataaagttgcacgcaaatttagatgagatctaaattatacttctactagtgaattaatgatactaaaaggtaaagaagtaattaacatggtataatagtaatttgactaaaattaattacgaattgacacaaagagaactaatcactggaattaattatatcaatggacactgtaataaaactcagtaaatataattatataattactaagtgttcaattccatatatatagtaaaataattatggaattaataaagggtattattttgttgatgagactcaataaataatctaatttattggagtttagaattataggtacaaggtcctcgaatcgccaccttaaaacactgtcaatggtagggataaagagttgtattatgttgttcgaaaaaatatattttgaattgacaaaatagtaattatttaattttgtaataaataaataatttttcaaattaattaaataagaaaaaagataaaatttgtcaagacaataattgttgaaacaaaaattgtcaggacaaaagataccatccttatcttaattgagataaggtaggcgcctaccctatagtagggtgtccctattagttttatctttttttagttaaataattatttacttaattcaattagataaatatttaaatttgaaaagtagttaaagatatttcgagttggttgagatatttcctcaa

SEQ ID NO: 404354 - DNA, 983 bp, Cannabis indica
tgaaatccattttcagaatggataatttcctcacaagtgaccccagagagtatagatcttgtgagcaatctcaaaggtcctcctcaagctgatgaagaattccagaggaagatcggcatggtttcaggtggatctgggaaggaagttggcgtttttctattagagaatccagccaacccaagaccctaacctgtgccaggagatctttacgtcaacctctctccggtgttgaggaatttcctgaggctgggaaaaagatctcggtttcaggaaatgggatcttctgatgataaggggaatgaggtctgtgcatagatcaatgctctgtacgtgtagccggtctttctcaagctatgtgtagacggtctttctccgagctacgtgtagacagtctttttcaagctatatgcagacggtctttctcgagttcatcggcttcccctctcatcctttgtttaggacaatgacttaatggtttgcccctagtggcatttttgtaaagacaagtttgtaaccagtcttaggtttttcttatcttaaatgccttgtactattttcattcgaacttaatacaattgtatttgcttgagtttttattcacaatgtaaacaactatattttgatcaaatgtacagtacttttgggtttttccattgctcgtaatcttcctgtttaagtagttagtaatctaccaaactttatgattttcgagcggttgtcaattctgcctcgcaattgcagttataatctaccttaagcaaacttaaatatactttaaggattttatcactttgtatatttttaatttgctcgtatgaatagttatattatctatccattttctaggtttaagtacttctatcaaggcgtcgtgatgcctcgtttagtactttcctagctcgcgagaaccgttagtattcagttttatacgcgagttataacttttgattttcctctcccgtcggataggttataaataaaaa

SEQ ID NO: 404355 - DNA, 592 bp, Cannabis indica
ttacagattactcctcctctaatggatttctcagaacaagagttagaaatcttcggagaagacgtagaagaagaagaagaagaccctgacaaagatacccaacaccaggggaaccgatcctcttcaccttcttcaccgtcatcgtcatcctcctcttcctcttcatcttcagcggcttctcgtcttctaacgctaccgacggaggtgagagcagtagcgccgcagcggaagcgccagcagtggcggaggaggtgacggtgaagaggagaatggcgaagaggctgataaccgtagtagtagggcatactttggggatgaagataaggatctgtttgggtctgataatgaagagtatatcaaaacccctgccattagtgctttctcaattcctggtacggatgcgcaagttttaagtttttttttttttttttttttttttcaatattgggttttattgaatagattttagtttgtgcttttgaaaaatcttatgtctgtatcgatgaattacttggtgggatttgacgttttgttttacttagcatctttctgtttttggccggatttactttttgtagctaatgtatctgtt

SEQ ID NO: 404356 - DNA, 668 bp, Cannabis indica
catctaaaagtgtttagactaatatcttactagttgtggcccaatcccatcaatccctaccttttaggtaaatttttccaggtataaagcatcatgctctttttcattaaacatattcacatgaaaaaaaaaaaaatgtctttattccttcaaccttacatctcaactctattgttgtgtaatgatgaagcttaaattgagctgaaccaaagcctgtttatcaaacagaccagcacttttcttaattggtagcagggtgtgattttcaaaagagtatcatcagttgttgttgctcaaggctggtgtgagttcaaatccttacttttgagaaacagttacaagtacaacaaacaaacaaatatgtatagatatatagagctatacattacattaagacacttttccaatatattttaaacttggaccatattactggctacagaaagtaatagctgagcaggcttgattgggccttgatagagtgtctatagtctttgggctgactaaacctgtgttcatagtccaattgtttcttgctgatagggtttgtctgggttttgtaatgggctttttaaggttgatatgcatttggggtaagttgaaaaatgcctcttttattcatcaattaatcaaatttacctctaattttatatttatttgaaacatac

SEQ ID NO: 404357 - DNA, 1017 bp, Cannabis indica
agtatgaagctttaatcgcaggattgaaacttgctctcgagatgaaagtcgagtatcttcaggcttttagcgactcccaaatcgtggtatgccaggtgaatggagaatacctagcaagaggcgggagattggttaaatacttagccattgtccgcgaaatgatgcagaagttcaaaaatatagtcgtgtctcgagtaccgcgtgctcaaaatgcacacgcagacgcattggcccgtttggcctcaactagagaagccgaattgctcgatgtgattccggtagacgtattggctcacccaactataaatcaagaagtgatcatggaaatagataccgttcaggagattacctggatgactcctatcctcgcatatctggaaaaagggctcttgcctgatgataaaatagaagcaagaaagttgcgacagcgagccgcccgttatgtaatatatgaccaaaggttgtatcgcaggagttttagtcaacctcttctcaaatgtatcagcggagaggattgtggttacatacttcgtgaggtacacgaggggatttgtggcaatcataccggaggtaactcccttgcattaaaaatcatgcggcaagggtattactggccaaccttgcgacaagatgctctcgcgtttgcgaagaagtgtgacaggtgtcagcgaatagccacatatacccaccaacctccaagtaacctccattctatcacaagtccatggccctttgcaatatgggggattgatctaatcggcgagttacccaaagggaaaggtggagtcaaatatgcggtagtcgcagtagattacttcacgaagtgggccgaagccaaagcactcgcaaccatcacagcaacaaaattgcgcgagtttgtctatacctccatcatttgtcgctttggcattccgcacaaactcatctcagacaatggaaaacagtttgactgcaaagagatgcgacaactatgcgacgatttgggaatcaaaaaggcattctccgcagttgcttacc

SEQ ID NO: 404358 - DNA, 715 bp, Cannabis indica
attataaataatataaaataaattagaagaaaattaaaatagaaaagatgaatgaaaaaaaaattaaatgaaaaattttcaataatttattccaaacctccggatttagatctatatataatattttatagtaaatatacatttttggtgtaaatttttagggcacatttcgttactttatcttactaatttatatctatttattaaatagatagtcacccatttaactttaaattgaataaaatctaatagaatggttgtaaaaattatatttggaaagatgttatttacatgttctatattataatttataaaggggcacaattttaaaagtactaaaaattaattaggataaaaataaaaattattcttctattaattaccatatcacggtaacacaaaacaagtaaaaaattaaatggaattaatttgtggaggcatgtgtttagcatcacgaaatttttttattatataattggttaataattttttataatatttattaaagtaaaacaagtactgtgactcgatattgtaacgttcccgctttaagtattcattgggtccttacacccacagaatgaatggctcttatacacgagtgcgtcactttggccgtttcatggactgacgactgaccctacagaccaacacgagtgtttccagcatgttttcgagatgggctacggaaaaacaagatgcaccttgttgatat

SEQ ID NO: 404359 - DNA, 508 bp, Cannabis indica
ctctctctctctctctctctctctctctctctctctctctctctctctctctctctctctctctctctctctccttcttgacttaacatgaatcacattttttttctttcaaaacagaagactctgagatatcataaacaattaacacgagcaacctttagttgcaatagctatcttatccattgttgtcttagcttgaaccttatatttttggttttttgagaaaaaaattcaaaagggaagaagatgatgaacataatatttatataagatgaaaaaagaaatggttagctcaataaggaatcgtggctgaagggaaagtggaagaagttgaataaaaaaacaagaaagaaatgagcatcgtgggaagtggaagaactcaataacagaagggaaataaatagggctgtacataaatttttgtaaaccgcccaacccgaacaacccgcccaagccaaaatgagataacctgacgaaaaatgcaaaccgaaaaacccgacgaaaatat

SEQ ID NO: 404360 - DNA, 572 bp, Cannabis indica
ggtgttggtggacaagggaagtttagtgaacgtcctttatagggatacactaaagaaaatgggacttgaaaaagctaagttaaaaccttgcacggtaaatctgtgtggatttacaagtgacaatgtcgccaatcaaggaataatcgagcttccattaacattgggtgaagcacctttatccaccacgatagcgcaagacttttttgttgtcgacctaccataaggttacaacatattgctgggtcgaccagcgttaattggactaggggcagttagttcaattaagcacttatccgtgatttttcagacaccaatgggtgtgggagtagtgcaaggtgaccaaatgttggctcacgaatgttatcgcatagagctacaaaataaaaacgccagttaccagctaatggcagtcttgactgaggaaggtgagaagaaggaggaagatcttgatcctcagattcaagatgaaagaaatttatcaaaaccaattgagtagttggagaggttgttctaaacccaggaagtgttgggttttgtgccttaaataaaacctatttcaatataatcaaatt

SEQ ID NO: 404361 - DNA, 721 bp, Cannabis indica
ataggggcagattccacaaaaaatgggaggagaattcgagagagagaaaaagatatattatcaatgatatattgtatttagaaaatatcataaataagatagactcgtggagtatgcagatttaactgcaaaaccacgtaaaaatatctagtgttatatacacatttattattttttattatttttgtgacatatttattacgtaaaggcttattatttttagttaaggaaaatctacgttaacagattggtacttttattgagagcctaaggaataaaactcaaaaaaatccctccttacaaacagaaatcattccatggctgatcacaatcaaaataatggaaatcgtcttgaagaaactacacattgccttaggaaagagccaatgggttctcaaagcccccatacttctggaacaacacgttcaaggagaaattatggtggtgataatcaaaacctagaaaaactaatacttctgtaggatatgtacctagaagtgaggatgcttataatccaactaggtatgtaccattagtagaattagaaaatcgacaactccgacaatgcttagccgaatctaactgataaaatgctaagttggaaagagaggttgtgtgacagtcagtagtcccgtgatccgtaaggggaaatactgggtaagctgtgcaatcccataccgcctggggaaggtcaagtgggatgattctgagactgtgtagg

SEQ ID NO: 404362 - DNA, 847 bp, Cannabis indica
aaaaaaaattctttttaaactttataagtgaattttttaaatcattaaaaactcatatcgtacttgttatatgtacatatgtaaataataaaaaacaaagaaaagtacctttgggtcgctatcagttacaaaagaattctcatggattaaatatatatacaaatacaacggtaactaattaatgtgcatgaggagtaatggagaagatattctctgttcagtaaaagaacagataaatatggtataaagctgatatattctgttcaacaaaaggcaaacccttaacagcgggaatgattgggctacaaagaaacacaaattaattgaactttgtatattatcaccattatccaacactaccaataaataattaagcgtaaattaatggagggtagacacaaaactgttatcatatcactactacacaaacgacctttaactacgattatttttttttcctttagctttaattagctttggagaaatttgtaactataggcgttacagccgtagcagaaggggtccgaaaaaaccgaaggcaaagaccccccatgtctgtcacgatgtcactggagttgcaaacatccatggtgtgaattcggaatctcaacatcagttagatgatttcaatatcaatgacgataatgagagtctaaatgaccaagacgacaattgcttagaattagaaaatgataatgatgataatagtttatatgtaactgatgatgatgatgataatgaattgtaattgtaatgatattttaataagaataacaatcacatatgttcttatttaatatgttgtgaataggtttattttaaatctgaaaatatattctttatatat

SEQ ID NO: 404363 - DNA, 520 bp, Cannabis indica
caccaaaacaagtctatgaacactgagtgagatggaaaaatttgagtggtcaaaagaatttgagtgataataagaaattgagtgatcaaaagaacatgagtgagcaaaagaaacagagtataaatatgaattagagtgagaaaaaagagagccaaagagagaaaacaatcgaagcaagtgagacagaaaagaaagaaaagagttctatcaatgagattaaaataaagagaaaacaataaaatttttatgcaagaaaaattgagattacgcgagcttggcgtacaaaacaaccaatgattttgttcgtttacaaggaggctcttttaagcactaacaaacatgattctttgttgcctagtgttattgtttctattttgcaggaattcaaggaagtgtttcgtgaggaggtaccatatggtatacctacaaccattgtatccaatagggatgctatgttcttaagttacttttcgaaaacattgtggggaaaacttgggacaaaacttttgttttctactac

SEQ ID NO: 404364 - DNA, 659 bp, Cannabis indica
aaagggaaataatatcgccgatgctctctcacgagaagagccttcttgaagaaatgctgaataagcctgatacatccatggaaaatctccttgctagaacgtcgaacctcacagttctggacgaagaagggtgggaaatcaatcctaatggagggtctgaagtggcttaccttctgtgctatggggagattttgttcaaatcgtcctctgtaatcgcccccttcttaaaaccattctgggaagagtctggggagtttcagacagagattggggcgtggaaatcaaactttccaccaaagaatcaagcttcctggttttctcattcaaatcctctcaagatttgaatagaattctatccaagaacccttggttcctcaataatggctttctaattgtggaaagatttgatggaattccacatgattggaacaaggttctcactcgcttccctattagtgggcgaattatgcagctgccaacccgatcgatcacactgggcaatatggagcgtctggccagttttgcgggcgaggtaattgaagttcaaaaggttgatactagggctgtacaaaaaaatttgtaaaccgcctaaaccgaataacccgcccaaaccgaaccgaaaaaaccgataaaaattacaaaccgaaataacccgaaaa

SEQ ID NO: 404365 - DNA, 1150 bp, Cannabis indica
atatatatatatataactctaaataaaaaagtgacgacaaaagtattttatcttacaattttgttgtaatcgtactattttttagttgttaagtgtcaattaataagtctgttaagtgtcagttcaaaaacacgtagcgacatatttcttttagcttattcaatatatagtctaataatatgtcgccacgtatttttgatttgacgcttaatgactaaaaaagagtacgattgtaacaaaattataaaataaaatatttttattaccattttttttaattagagtcatatcataggggtaagttggaaaataccacttttattaatcaattaatcaaatttacctctaattttatatttaattgaaacatacattttttatatatattgtacccaaaatatcctgacatacgagagtcacatggagagtatcttgaagtgacaggggaaaaattggtacaatatttaaaaaaagaggtaaaaatgatagactttaaaaaagatgataaaaataaaagagaataatataaaaaggatatagggtgtaatttccttcgtatatcatatgtgtaataattataaaaatttaaggggatttcaccgcagatatgatcaaataaaaaaaaaaaaaagacagcatttaaagcaaaattttatagtaaaagatcttgtcttccaaccaacaactacaacatcacaccaatggagtccattttcttcttctcatagattcttcttcatctttcatcttcatcctcaatttatatatatctattactaagttcactagctatatatatatatagagagagagtttgatctttggaaattaagaaaataatttatatatataatgaggtttattgttgttagtgttttggtataatattattaattataattaatatatgtaaagctaattatgataatgatgaatatcaaaataattatactcagtttctcatctctaatggagttgctcgtacacctccaatggggtaataatattaatcttaattttcatactaattttttttcttataatttctaattttttttattatatattaaaatattattatattatatttatacaatttatatatgcagttggacagctggaatcattttcagttgcaatgtagatgagt

SEQ ID NO: 404366 - DNA, 1285 bp, Cannabis indica
gagtctttagaaagctatggttaaaaagttgaagtttagcactgctttccaccctcagaccgatggacaatctcaaaggacaatacatacattagaatatttactacgagcctatgttatggactttgatggttcatggagaaaataattgcctttgttagaattttcctacaacaacagctgttagagtacagtcgggatggctccctatgaaattctgtatggtaggaaatgtcgttccccgattcaatggcatgagactggggaaagaaaatatgtgggtcttgagttagttcagcagaccaatgaagcaatagaaaagatcaaggctcagatgcttgcttcagaaaataggcaaaaaggttactcagttcctaagcgcagagacattgaatttcatgttggagaccatgttttcctttaggtttcaccaataaatgggataaatcgcattggatggaagtgaaagttgagccgttggttcatagggccattcaagatactcgagaaggtcaggtaggtagcgtattggctagctttaccactagcactatcagctgtacataatgtatttcacatttcaatgttgaggaaatatgtgacaaacccgactcatctcttgagctacaaagccctagaactacatgttggaaatattttacgaggatctagatttactaacaagtatgttccattaacatcctaatatgaattctaaaacaatgaaataaacacataagggtttaaagaaacccttacaattggtgcagcggaatataataactccttccgttcagatctctagcccttgattcctttatgtagcagagcattatcaagatctgaacctggatctctttctctccttcttgagtctgattctccttctttttgattggattcttcaccgtcttacacactatgattaagataccacttgatgtgtgtgggcactaactctatcactcaacgctgaaaatttgaagaagaaaagagaatgtttagaggttcggcgataggtataggtaagatggctcaattttcctgaaggcaagaaattccatcaatctattaagtgtgagccatcactatctatttataggtaaccacctaggttcaggttagatttatttggcattaaaataatgaaaaaaataaatggtaaattgcattcaagtggccggccatgtgtattggattgggccccactttgcaattttgcaatttgtcatttttccataccatttctcaaaaacgccaattttccaatttaaccactgaaatg

SEQ ID NO: 404367 - DNA, 555 bp, Cannabis indica
atgcaagcatctcgacaaccatgcatgcaaacatcttggcaaggcttgcatgtaagcatctcagcaagcatgcaggcaagcatctaggcaaggtttgcattgtaacaccctattagtttaggcgtgctatagtacttttcataatttatgtgcaacctttactaatcaaagagtttaatgaaaatgtgatttaatttaaactttaataaataaacataaacaacactacatttataaaatatgggatcctgtatctacatttttcaactgtacataatcaaaagatgtcgcacagcgactacaaaatcgtgagccgtagttgtcccaaagatccaacactccaggttgaactgtctcgatatgtacaatctttatccatctccaaactcactaccgttcaacaacagattttcctttacatgcacataacataacatttgtgagtcgacagactcggtaagaaaaacataaaacataaacgtataaccgacctacggctaagcgtccatactgttggaattattttaccaggaacttagatctactcacaagtat

SEQ ID NO: 404368 - DNA, 626 bp, Cannabis indica
gattttcttttctaatacctgttgtttcttggtattgttaattttttcaggtagtatttctgtattataagtcaaaactttggctccctggtaacaaccaacaaaggaagggtattttttaatgagttgggggtgttgtttgaggatgttatatgtagttttattgtctaaattttttgagacagttttgtcccatgtggctcgctataagaattttatagcgcatggtttgacaaaacatgcccttcggttagacaatgagctattttagttcaagaaagtgctgccgccgattgtggatcgatgtatcgttaatcatgtgcgattttgattaccatattttaaaaaataaaaaacacaactgcgtacaaaatacaaattatttactaattatataaaaatatgacatataatattgatgacataaaataatacaatgtttattgtcttatttgtggctttagcaatgagtctaatgggcatgctgtcttttggtgccggggttttagaaaggttaggaagctacttaattttagtttcctaaaaaatttctctttggaaacttcctttcaacaaactattcttttggcgtctgaagtgctatctcaggttgaatttgaattatt

SEQ ID NO: 404369 - DNA, 1344 bp, Cannabis indica
tgtctcaaatagatgctcttcttgtcggcacacacgtaatctttcataaccacaaaccttggccatccagtagatgtagatgatgatgatgacattattattaattaaattaaatgtatataagtatatgtaaaattgggtgatgagctaactaacttgtatatgtaacctatttatagagcaccaaaaacaacaaatccagatcatcaacataacagctaatattaattaattaattaattattattattattattatatgcatagcaaaatacattcactataattaacttaattatccatacgtacttcccaaaagccaagaactcttccttttattccaaaaaataaaataataattattagtgttatgcattaaatggcctttatttatttaaatacactacaatttttttttattttatttttatttttaatcacaacaaaacttatgattaaaagtaaaaaagttgtgaccaattataattatcagttctatgttgtggctaaatgtattataatcacaaaaattatacaatttgttgttactaaatgtgtttttagtcataatacttcttgtgactaaaactaaattagtgacaacttgtatctaaatattatgttttaatcacaagtaactttttgttgtgactaaaagccacatgtagtcacaaaaaatttatgctgtgactaaataaaagccacatttagtcacaaaaaatttatgttctaactaaaaggttgtcaccaacaaagatatattttttttttgtagtgagtatactattgctgaaaccatctgttataaactaaaggctaattagtaattttttcccctgaactttgacatatactaaattatgccatctgaattaggagtgtgtataaagtcatccgatccaatcccaaccgaccgatccaatagaatcggatatccaatcataattggatcgaatcggatgcaaattttaaaaatccaattggatcggatcggatgttggatgagacatccgatccaatggataaccgaactgatccaatccaatatcatcaaagtccatccaattatatttaatatttataattttatttatttaattgttttatttaatattttatatattattttattatctatgttggattattaggttttaaattatattttttcatatatctttttttaatgaaatcagcttaaatagtggctaaaatggattgaattcatccattggatccattggatggatccaatcaaatccaataaaaaaccagttaaagcatcgaatggatggaaccgatccaatccaatatatccattggatcggatcagatgactcaatt

SEQ ID NO: 404370 - DNA, 426 bp, Cannabis indica
ctttctatcgcagagtatcaccataatctgagtttgaatgtccttctcttcaatttggattcttcacgatcttccagactatgtttgacgtaccacttgatgtgtgtgggcactactctatcactcaaggtatttcgaaattagaagaagaaaagagagagaaggtcggctatagaaggatagtgagtggcttaattttcagaaaaagcaatctcttgaaaaactgaaaaactctcttttttttgtgagagccatcactatctatttataagtaaccactaggtttaggttagtaattatttggcattaaaataatgacaatattaattggaaaaaccctctccaagtggccggacatggtgttaatgtgcaccacttggaattttttcagttttaacaattttcatttttattttctcaaaaacg

SEQ ID NO: 404371 - DNA, 754 bp, Cannabis indica
atcatctccacgtcttccttttcccatatatttagctcgctctgcatctccaccgaaactaagttcacttcatccaagtcgttctgcgaggccagttttgccaaggcatcagctttggagttttgttctcttggtatttgctcgattttaaagtaattgaatctttccaagttcttccgaaccttctctaaatacttagccatttttaggccattagcttggtattccctgagaacctggtttacaatcagctatgagttactatggcagatgagatttttgactttcaatgcatcaactatctttaagccagcgatcaaggcttcatattcaccctcgttgtttgatgcgtcaaattgaaatctcaaagcataatgaaacttaaagccttccggtgaaattaatattatccctacacccgagccctgctcgttggatgcaccatccacgtataacctccaagtgtccgcgtctcggtgaacaggcgggatttcttttaaagctattccttctattaagaagtctaccaaggcttggcccttgatggatgtttaagggtggtatgttatgtcgaactaccccagttcgattgaccattttatcaatcttccaaaagcatctggttttgataaaacttatctcaagggctgatcggttaacacttttatggggtgtgcctggaagtaaggtcgtagcttacgagatgcgtggactaggcacaaagtgatttttttgagagggggatatctagact

SEQ ID NO: 404372 - DNA, 636 bp, Cannabis indica
aagcaacagactaggccttaacagcctacaaaaatagaggaaaaatatctattttcaagggacaatttggtcatttgtatttatttattaaatatgtaaataacaactttattttacctatttctaagaatatttggcatgtaagttctactatataaagagcattaacctatctctaaaaccctaagtcattagctctcaactctaagtatgaaaccctaatcctctcttctctctctgctacacgccccaagggttgtttctctcccccactctctctcacgcctccaaggctctttctctctctctcattagagatctgcctactgattcatatattgtaatcttaaaagagctactccaaatcccatcactatagtgatctgagtagtattatctctaggtatcaatataaccaaaaggggagtaggtcattacctgctaacttagggggctaaacctctataaaatttgttgtctattttactttattattcttattgtgtaacacgtggcaagcatcaccattaaatacgaccccactattggttggcacaattctgaggttaacagtttggtgctttcattgagagtaagttatcaattaatttgatcaaatgccatggttaacacaag

SEQ ID NO: 404373 - DNA, 164 bp, Cannabis indica
tctctaagtagtcaccgtaggggagagtctaatagagacgaaaacttacaaaaccgttaaattgttaatgaacgtccatctattagggatgaatctcactaaaataagaactgtgtagaacaaacaattgagatacaatatccttataactaaagctcattatt

SEQ ID NO: 404374 - DNA, 630 bp, Cannabis indica
agtgtagttcccatcaaatacctagccaaatagagaatcaacaaagaattggagtctatcttgatgattgacaatagttcatcatggatgaccacgattggatagtatctagagcaatgtattatttaacctgaccgagacaaagctaaaaaattaatgagaaaagtagctcgcaccatcatcatggacggagtaatgtatagaataaattttttaatgtcgcttttgaggtgtgtcacgaaagaagaatccaaactcctcatggttgaggtacatgagggcttttgtaacaaccatgtgttgggttttatgccgcaaataaaacaccattttaatgtaatctttatcttttaaatatcaataaagaaacataagtattttcatgacttatctgtgtgtcatttggatcatgttatcatttacttgtttatttgatttataaattcatccaaacccatatcacatttatgttcatgtttattgtgtcttcagcacagtggaaagtaatcaagattatgtgattaaatatatattcctagatttatcagtacacagggtttaactgatatgtgaatttacaacatagtttacttgcaccttggataagtgctatgttctttccagagcatt

SEQ ID NO: 404375 - DNA, 566 bp, Cannabis indica
atccaaagagtcattaacggtagtccttggacttttgatcggatgcagttaattattcaacgtttgccggtaggaggggatccgaatttaatccaattaaatcatcttgatatttgggttcaaatccatgatgtcaaactcgactgtatgaaagaagcaactgttcgtggcataggaaatactatggggaaatttgttgagaatgatcctaagaatttcatcggtgtgtggcgagattaccttcgggttcgggtcactttggatattaggaagcctctgagaagaagactcaagttaactcacgagaatggtagctggttttgggtccatttcaagtatgaaagagttcctaccttttgcttcatttgtggagttatggggcattcagacaagttctgcagcaaattgtttcaacaacctttggatcaaattgcgaaaccatacggagactttatgattgctcagccacaacgatcgtacaagcaccttggcgcgcggtggttgagaaacaaaggttggcagccggcgggaagtactgatcgtaatgaacctggacagaattcaag

SEQ ID NO: 404376 - DNA, 1039 bp, Cannabis indica
gtgattaaatgtaacttttagtcacaacaaaaaattacttgtgactaaaatatagtatttagacacaagttgttactaatttatttttagtcacaacaagcattgtgactaaaactacatttagtcacaaaaaattgtaatttgttgtgactaatacatttagctccgaaccttttaatcacaacataggaatgataattaataattagtcacaatttttttatttttagtcacaaattttgttgtgaatatacacgtatgtataaaatgcatatataatcaggtctgtcttgattagctaattggagtttttggctaaaaattatgttctgttagtatatatagaatatagtggtagatctaaaatatagtattttgaaaatacaataaataatttttcataaaaaatatggcattttaaaaattaatttaagatcttttgttaaaagattttttgggcctaaatagggcaccctctttgagttcaaataggctttagaaaaaaatttagacccttattataatataaattatattttaaaaattattaaaaaatattttaaaaattattaaaaaagtatttatattttttaatatatatttttttattagggcttttaagatgggtggactctaatcacgaacctaacttacctcaaccaaaaaaccggccaattgtcttaattcttaagtgtgattggtttatgatttaaaaactgttttatgtttctgaaaattaaaaatggtaggggtctacataagaattcttgattggttgattgttttcaaaaacaaaatttgaatattattttgagttttaggttaaaaaatgaaaacacaatttttatattttttatgttttcaaatcatggaatctaaaaactctccaattattcttttacttttttattttgagattctcaactaatcacatgttcaattttttaaaactcaaaaatattaaatcacacactataatcaatcacatatttagaaacaatttttcacttataaaatttaaatttttgtttccaaaaca

SEQ ID NO: 404377 - DNA, 602 bp, Cannabis indica
attaaatttgcttagaaatacaaatctatttcttttctcactataattaatgaatttattaacatatattattttagaaaatatattttaaccacttataaaatttacattaatttattcaaatgatatatattttaaaactaaaaataattaggaaattcttataaaattaaaatttcacaatatatattatttatttaagtaaaaaaaatataaatatttattaaaataattactcataatatattaaaaatattatataagaaaatatcaaaatttaaaaattgatataatacacatgttatttcaaagtttgaaatttgggtaaaatacgatgatgacaaagaatgagatataatgagacaacatgtcaaatacagtgatgacaatatgtaagatatggtacccccattattttttctacattaccatatttaattatttttataacaacaatttttttaaaacaaatcaatttaaaatactatatataataaagtttttacttcttaataaataactctaaaaaataataattaatgaaattgtgaatagacttaagttttttttacggacttttatcttttgataaataaaattat

SEQ ID NO: 404378 - DNA, 635 bp, Cannabis indica
gatgcaatatacctagcgacgtatcggttgtaggtacgggggtcaatgacatatgagtaccgggcgtaggtacaagctccccttattaggtgatgcaatataactggcaacataccttattaaatatgggcgacagtaatatgaacatgcttggttatggcatagataaaaatcgttgttaggtttctaattggcggcataccttattagatacgggtggcagtaatatgaaaatgcctggttatgacatagatcaaaactgttgttaggtttttaactggcggcgtaccttattagatacgaacaacaataatatatgagtaccaagctatggtacaggcttgtctaataggacgatgcgatatattggtgccaggttatggcacgggctcacctgataaggtggtgcagtgatattatatatgatgttgtattatgacacaggcttgcctgattaggtaatgcaaatatatgagcatatctatttctatgcatatggctggttatattacctactattgaatgttatggtttaactattttataataatgaaatgtataattagttatttaatgtatcattctttattacttttcttgctgagtctgtgtgactcacgggtgctctgtgatgc

SEQ ID NO: 404379 - DNA, 638 bp, Cannabis indica
aggcaaaaaagtttctttgaaattaatgccctctcactaactatagcctttagctacaagtcgagccttgtacctctctacttgcccatttgagtcatgtttaatcttatacacccaattgcactcgatgggtctgcaacctttgggtaattcaaccaactcccaaacttcattttgtgacatagaactccatttttctttcattgcatccacccacaatgcggatttaggactattcactgcttcttggtaactggctagctcagaatcatctcccacatcaaactcgtgttcctgcatatagacaagatagtcatcgggaatagtagacctacaggctctttgtgatcttctcaccacaacctcatcgtcccccaaatcaagattttcatcttgtactggatcttaaggttcaccatgagcttctattgaaacttgttcaatcacaggatcatagtaggattagaagcaaaagtggaagcaacatgtacagggacatagacacgctattccctgaatacaatttctcttgacccttgacatgaaccaaattcatcctcaaaatagacagctcagtctgattccatcaccctggtggtgtgagagggacaatagaacctagaacctcttgaaccaat

SEQ ID NO: 404380 - DNA, 1814 bp, Cannabis indica
tcaaattatttgggaatgggggagctaggcggacattccagtggaaggagttttgacttgcaaggcttttgctcactttctgctcgctgaatagcctcttcaagtttgatgaagccttcagcacagttgagaaaatcactcattgagtctaccgagccgttcttccttatgtccttccaaagttcaccgaggaattcaatgccccctagtatcatggaaaactttccatcttcagttacccatgagaccttggtcgcttccgtcatgaatctattgatgtatgctcggagaggctcgcctggtctttgcttgacttcgaccaggtctcctaaatgcaatggaagttgcctagagaaggagaattatgcatggaattttgagaagaaagctttccatgagttgaactttgcaagggccagcttgaaataccattgctgggcgacttccgagagggtactaggaaaaattctgcaacatacgtcacctcgtacccctggagatccatttgcgtctcaaaatacttgagttgggaaagaggatcttctcttgtagtgtacatcttccaggttggcattttaaacttgcggggtaacgccaagagattgatctcgagagagcatggggttccacgtgctcggtccaactcaagatcattatttctctgtccgggcatgccttggaacatattctttagttcgtccagttgtggctgcacaaatgtaccaacctgttcggtattttggccgatctgagtcacgtcagcctctttctgagcgagaatttgagcacgggttctgagctgcacgatcagcgtgccaaactgatcgtttactcctctccttctattcagatcgtttctgagatcatgagtcgttcccaacctttcgaacacagatacgcctagctgtcttagtgattgatcgttctcccgatgaattactagacaaggtctgtccacctactgcttggcccacaagtggaacctgcgacaagagatttggtggttgaccttttatagtctgagaagtattcatcgctggatctttctctattttacctagaatatgacattcgggggttggctgcccaacagtttgataggctttttgttaacagcacagtagcctacccactacgattgtcaatatctgcatgatgagcccttaacgcttccatctctctgtccctccattcggtaaacatgcgtctctgttcctcgaacgcaagatttaatgcagcgtggagttcctcttgatcatgatttagggtgttggtatgaccttgcatgagtccaagaacatcacggaggtttgcatctcagtatcatctccaatggtcgttcgaacgttggtagcaggcggaacagttgtgttatgaattccctggttgggtgctaaacttgtattcccagtctcttgcataccaagcataatttcatccataggagtcgtcacaccatgacctacgtttgacggctgctcgagattaacagctggcggaacccttgtgtttcctaggttcagcaatgcaggatccaccgcctgtggattttttgaatcaaccaggcccgtacgagtctgtactgttaactcaaacttttagatctccttgttttgatgattaacaaatatttgattattatttgttactaatgatttattgattttgtagcaaatttaaaagagaaaataaatattttggtatttttaccaaacttttgaaagcaacactaaatggattcaacaagcatatcaagagcaaaagattcatcaagggatcaacaactcaagaccctattcaaaagaggtcttcaa

SEQ ID NO: 404381 - DNA, 599 bp, Cannabis indica
ctctttttctcattaaatgaaaagtgaattgtacattttcattttcccactcttttcgtccaaaaccaaaacagtacacataatgctattaattatcatctctttccttctttctttcttctttaattttcttttgctgcaactgctagggttttaaactcaaaatcccaaaatcaaaactcaaagctcactcttcactcaatcaaagctaaagctccaatctcactcgtcactcactcactcacggctcaaggagggaggctcacgactctcactctcttctctagtctctccattttccattaaagtcccaaactctcttctcttcaagcatcatctgagaatgaaagattgaaggcgtttctttacaagacagagacaagactggtattggtaagttctttttctttttcttcttcatcattcttttttttttttttttttttttttttttttttttcatctcagatttctatctctccctcaaatttaatttcaaagttcaaactattttgggtttcagtttcaggtgcttttgtaacagatctgattaaattttgaattggtttgtgttggattggcttgcattactactcctc

SEQ ID NO: 404382 - DNA, 635 bp, Cannabis indica
cctaagtattttgttatgaatattttaaatcttcgtgctgccgaccaaaaaagtagtttcttactgcactcttctaaagaatgtgaaaaagatgttgcaacatttaaaaataaagaatcaaacacgatttttttttttttaaaaaaaaaagaaaacgcaaatacatccaaaaataaataataaagagcattgttattgggtattagtggtgtccagtattttttataggtgacaccctacgtttagttaatgatatttcctaaaagtattttttaatttatataagactcgatacttaattacactaatatttgtatgacaccgaaaaaatattaaacagtagacacgttaaactataaacaaataaaaccaaaaataattaatttaaaattatgcaaaagggtagacttaaaccctaaacatcaagggaactaaccacgtgcctaaccattcaagctacccaactttgtgtgatatggaatcactttaaaataataataaacagcttccaacgaaactggtcaagtgaaaaaaataaagagatttttacacctcatgtcaaaattgacattttttttacatttttatcaatacacggctttttaaacttttttaacttttacatttttcaattt

SEQ ID NO: 404383 - DNA, 513 bp, Cannabis indica
ataaaggtaagaaagtgatgatgtatggtaatattattgatccaaggaagacatgagtcaggattattaccctcaatagatgttattttgagcatactgtaatatgttatatgagtgattatttagtaagcaagatagggttattaccctaagattctatatgctagagtataaattgtgggcatgcatttatgttaagagttacgtgaataagacataactggttaaacctcgtatatatcaccaagataaaccatcgaaagaacgtaatatatagattacgtatatatgtaaatagggttatgagagcaaggcataaccaaatcaggctcggtaactagaaccgagatgaaatattctaaggccttattataaatagacgtgtgagcgtaacacgtaggtctatgccgtatagacacaaatagaagtgtgagcataacacgtaggtctatgtcgtatagacacaaatagacgtgtgagcgtaacccgtaggtctatgccacatagacataa

SEQ ID NO: 404384 - DNA, 484 bp, Cannabis indica
atttaatttgttatgcctctttatccaactaaatgcctctttgacacttagaatttctgcaaattcgggtcggcaactgacagaagaaatagttgaaaacgcctcaattatttgaccatcatagctgcgtgctacaaaaccagtaccgatctcatttgtgtcttcaaaaaccgccccatccacattaatttttaactgtccagccaccggtttggaccagtattctcttgtatcagtacgattggaagctagggaacccgagtccagccgcttagactgagcacacgtccattgtcgaagagtagtacgagtcagccaaacaacatcagtagcactacaacttttaccattccaaagcatatcattccgagccttccaaattgcccagccaaccatgacagcttcttcaaccaacctcatattgcctactgccaacacttccataaaccagtcaaaaaaattggttgctgcagaatcaccaaca

SEQ ID NO: 404385 - DNA, 647 bp, Cannabis indica
agttcgcatgttttctcatgataactctcctgaagagttgttaaacattgtaatgcctgattcactttattaataaaatgccatactttcattcaaaaaaaaaaaacttatactttggctcttaaacatgcaccatatcttagagctcgtcgcaagcttcgaaacagtatatagaacgtcgaaaatggacacctgagtgaaaatttatgataaaaatacgagttttgatctcctatgaatttctaaaaactatgaaatacgaaaatctaaatttttgcactcaccgaaacactaccaaaacttatccacatcactccaatcttcacagggcacatgtataccataaatactaccatccttacgtaaaagaaattaaaatcagacccttaaacggaaaacgccattaacgctcggactaagctttaaaaagtttcaaactcaatttctaacccaaaattaccttaatttcagcaagaaaacatcggaactagtcccacgactacccgagaacaatcttataaggtcagaactttcataactattctaattcacaaaacacctatacaaaaccaattgttattaaacttaaaacgaaattaaaccttaccttaagcttccccgctctgagaattcgctatcctgctact

SEQ ID NO: 404386 - DNA, 768 bp, Cannabis indica
gtaaaaaaaaaaaaacggaaatttggaattattttttgtttcaggcatattagtttggaattgaggtattttttgatgatgtgtcaaggtattattgtaattgagatttattaagggatttttcgtgattaatttgtattttaagtatataattgaaaaaatccccatatttaatagctgatttatatatatattatttaatgttaaaatatattattacactacaaaaaaaaatgttaaaatatattatattttattaatataataataaaatatatatatatttagtataaattttagtgttatagttacaataaaaaaattagtgtcatcatcaataaaagtattacattaaaaatactaaaattataattaacaataaaatttaaatattattatgttttctttttactaaataacacttaaattataaatttttaataaaaaatagatgttatctattgagtaacatccaaaaaaattaatttatacaactataaatatacataattaaaataaaaactaaaaatagtatatatatatatatatataactaactatacgtggatcacacgtaatattaacctaattatatatttaaatgcctatataaaaagtcaatacttagcacatatagttacataaaaatattgcataatataatactatagattttaatattaggctaattaagatttttaccccctaaactttaacatgtaccaaattatgctcctgaacttttgtgaccgttaaaaaattccccct

SEQ ID NO: 404387 - DNA, 800 bp, Cannabis indica
ccctattcaacacccagtgctacttgcatagaagagatagggggtgaacctgacaacgttacaaacacaatctagtcaacagacagtacccaaaggtaccttctaggtaaatgataatgtataaggtctattatcaaccaagtaccgtcttaagtacacttactaagacacatagtaaatcgtaagttatgctattgactataatggactcactactaggccttatacagagttcccaggaggaaacacgcataaggcgatagttatattataacaccgtaactaatataggcgtgttagcgtgattttaaacatactatgcagctcgttgctaatcaacgagattaacgaaaaacgtgattaattaaaattttcttaattaaaagaaaacttaaagtattacatatatacaatctcgggatcccatttacaaaatactttttaaaagtttgctatacacataaacaaaagtttgttgccaagcgactatacagcaagagccttgatgtctcaaagatcatacgctccaggcctaaccgccccgacatgtacaattttcgcctgcttgctctcacggctcctcaactttagccttgccattacctacacatggaaatagcactgttagtcgacagactcagtaagaaaagtataacatataacatactaatatcccgggttataacctggcgcccatacacccgatcataaccctaatccctgtgtcccacacggtaccgagtctcatacgttcatacgacaatactatcgaccataatgtcagcctatactcaatatgc

SEQ ID NO: 404388 - DNA, 931 bp, Cannabis indica
ccaagctagttgaaacagactacacttcatttttaatgcatatatcagttggatgattggttgtatgtatactctctgtttcccagatttcactgttacaataccaaagcactatactttacaattttttaatacataaatatcagttaggaacgaattattagattgtatgcaatatgctctttgttaccagatttcactgttacaaaaagattgcatggttcaacagcatataaattacaaaaacacatcaattttttggataaggattacactgagtaccccctctatggtttttggcctaacaagactttgaatttttatacacaataaaattatatcaaaatagctcaagaaaggtttaaattgagtaccctttggcttaatctcggtagacttagaagacccatgatcagtttcagactctgataatgattcatcagaggaagaatcaccttcgctgtcactccacggcattgcccttttcattggtatgtatctgaagaatattatagaaatcaaacacaccataaattaaaagtaaaacaaaaaccattcctgcgaattcttcagtgagtagtcgaattgaattaaaatgtttaaatttgaggagtacaaaccctaagaatggatatctcaaattgggataaaaattgacaaaataaaaaaattagagaggcgtaatcagagggaaaagcataccgttgagctagaattaggcaatggagaaagtttttgggatcagtcaccggcggcggctgagaatagtggcttcgcggactcagatgttgtagcagtacacacaccaagccaacgtagaaaatgtataatgattaatataatgagagaaacaataaacaccaagccaaaatccaattagcattaatttaagggaaacttacaaaaatactatttttttaccaaatatttt

SEQ ID NO: 404389 - DNA, 356 bp, Cannabis indica
tatctcataataagtagctatatgttatcatttttcattaaatattaaaaataaaaattagagtttgcggacaaaaatacctaagttttactccgagtagcagataaatacttaagtcgtatttttggcggtaaaaataccttctattagagttctggaacttccgtaggtacctagccgttaagtgacaggtaagtacccacttgtcatcttctcattggtctaaatcagaacatcggagacgaagctcaccacatttgccgacctccaagaactgtgcttctcattgtctctccgcgaacctagatctcgatctcatccctatcaacttgaataacaaaagggtaaaggaaaaa

SEQ ID NO: 404390 - DNA, 758 bp, Cannabis indica
ggtacccgccctggttaagagtttgaaggtgcgcctccgtaattttggacagaggacttaccaacctggcgcccaaggcaccctgccttttatgaggaaccgccgaagcaagctcctcactgacatagtcaatgcactggaccaggacatccccgtcagcatcgactggttgcccagcctcgttgtactccccgaaaattagtggttaaacctcttcctctccctccgcttcggaaggactgcccggacgcacatcgtccaacccctcaacctcctagacctcagcatccccctcaagattgtcctccatcgggatggccgaatcctgtttggcgctgggcagagttgcaagccaagccacttgaggattagtagcgtcggccagacacgttgttttctttgtacgattcatcatcctatggctgggtacaaggtcggatgaatgtccttcgctaataggaggactagaacgaagacgaggatgatcctcgtgcagaagttgaagcagatcatagtcgatctgatgcccgatttcccaagactcacctgagttcatctataaaagacaacacacaagatgagtgatggacgaaatatcaaacaataaataagcaaatacgccaaccaggagtactcaacagagtaaagaactgctatgtctaaagaaaagtcagaactcaagaagtcagaaggttttcttgagttagggcaaaaagttcatgaagcttagaataagcaagatgaaagacggacgcaat

SEQ ID NO: 404391 - DNA, 537 bp, Cannabis indica
ttaattttttatcttaaatcaaatggggtatgccttcgacctttcctccctctttccccgggctcctgaagcacaaacaaactctttcagtcctctcggtcctgtgggccaagactctctcgagggagcttgcccctctgcgaacctttcccttttgggaaatcagatcggacctttcgcggatcttgaacctttttgtttcttcggagatcaaagtaggatttttcttggggttttcctcggaaggatatcgtatggggcttaattccctaattttgggcctttgggttcttggcgaggactcttctttcatttcctctagttctgcaggcatggctttgggatgcacgtgagttccagccatttccatggcttttttcatggcaaccattatttcttgcatccttctattctgttctttttgggcggccaatttggcctcgtgatcattcgctttttgccttaggaccagtaactcagtgtacctatcatcgtcataagcatcatatccttcgggattctcttcgtattcctcgt

SEQ ID NO: 404392 - DNA, 880 bp, Cannabis indica
gcacatgccttaccatctgttcctctattaaataatgctgataagtgacaagtcatatatacccaaaaggtttttgcattcatccttttaaagaaaaatagcttcaatagaataattctaataaaaagaagaacaagtaaactcatattatgtatgctttcatatataacaagagataatttagggagtatatattgcgggaacatattactgtgatttttgttgagacgtttctgtttttgccatttgaagaaataataggtgttactagtcttcattttttttttaaatatatgtattttttaaaatctaaatatttattttccaaatataaaattcaaattcaattgcactgtaagaaaaaaaaaaacttgagtttttttttttttttttaaaaaaaactattgaagtgtacatgctataaacaaaatatacaccaaaaacagagacactcttataattgttccctatatttataggggaattctatagtgagatggttatttttttttttgagtaaatagtggcataagtacgttttaggtttgtaagcagaataaactcaatgatttttttttagtggcataactattgtttataaaattgtaattttctgttccagttttatcagtacaaactctgttatagtcttaaacaggacacatataagacctaaattatagattatttggtctggacgaaaaatatgtagtatcagttacttccaaatctttttttaataaatttaaacggaacctgtactgacaaaataagaaaattatagttttacaaatattgggtacttatgccactaagaaaatcattgggtttatgccacttacaaacacaaaactttgagtacttatgccgctatttaacc

SEQ ID NO: 404393 - DNA, 517 bp, Cannabis indica
acaacataaagcgcgaaatggaaaatttcaacaaaatacaatggatggatcagagatccctcgtgcctggaatgtagaccatttgcatcatgactactaataggctaggggtatctagatctaagcattcctctaagttatatgtaattctttaaaaattatctctcttaatgttaactattaggtataatgaaatgattatagaagaaatttacacaaattcacatttttgtcttttgcaaaagctatgttttaaactagtgatcaggaatttagggacgtctttaattacatagtaaatttgttgtataaagttgttcaaatgtgagaccatatcagtggttacgacatatgacgagacatgcaagtttttgaatccagaaggaaaaggggtactcatgatatttggatgatatggctcaaccccctcgtctgagtcgtatccagattgtctccctagttccttcacttgatatctcctgaacttgtcctccagcttgttcatccgcaattggat

SEQ ID NO: 404394 - DNA, 1027 bp, Cannabis indica
catcttcaacatccaaggcttccgctgctgccaaaggcaagcagcctatgaagatttattctcctggtaatatctctccatctcaagttgtcaattccagattttactatcgtgagaatgagcgtgattggaatatttatgctagccgaaagtttgaaagtgagagggattatgatttacatgctcatagggtgtatggtatagtcaaatttgttcaataccatcattgggaaaatactcttactggttttgagggttatattgatggaattgtcaaataattttatgctaacttgtctgataattttcttgatgagaattttgaatttttttgaaaagtttatgttagaggacattggttctcctttgctgaaaaagacatttccaaagctttgcaactgccagaaaatgtaataaatgctataatgtctatggatcaccaattgatgctcactaaactcactggtgcacgggttgaatggaaatatggggagagtcttcgaattacacatcttacctatgcacatgcatctctcatcaggtttgcacttagcaattggctacccaattccaataaaatcgtggtgtctcaagatgtggcctcctatattttgaatcagattgtgaaatttcgaagaggtaaaaagcgaacccataagcttgtgtttcttaacttaatctataaaattttgtcctctaaaaaagatgtggcctactctcatgaaactcttgagcctccccttactggcaccatattccaaccctcggagtattttgatggagcctttcccaagcgtcctaaagcttttgctgctggtgctgctggtgcaagctcaagttctgctcctgcagatgtccaggaggtcaagcataggttcaactggtgaacaatcgtcttactgccatggaggaggttcagcaagagatttccaagcagttttcctcattgatcaagctctatggggcataagttttattcctttttttattgttttttgttgggacatattttctatatttttcatgt

SEQ ID NO: 404395 - DNA, 885 bp, Cannabis indica
ccacaatttttaattaaagaccccaaattaattctccaatcacattttaatcaaaaatatttgtctaatctccaataattttccttttcagataatttttttaaataactttcacaatgaatttttaaaacaactaatttctaaaattattctctaattaaaaatatataaatttcaactttcccaattttataaattctcaatttataagtttattaagcaaaaaaatatatatttttatttttaatatggaacttttttggtattttatttattaaatataaatttcttttattaaacaaaaaaaagtacaaattctttcgatttttttttgaaactgaaacttttatgttagtatcttcttttattgaatactaattttttttaatttttattaggacaaaaaaaaatctttttttattaaatctgaatttttcttttgtatattaaaaagaacatttatacttagtattcccaacagttataaactggtggcattcactgttttcttttaaaaaaattcatttactattgcccacggttctccaccatttggattggattttcccaatagtttttttacttcagctctaaaccgttgagaaaaatatctacttacctttttcaacggttttcataattaacccccttattaaccgttggaaaaaaaacaaatttaggagtagtgaatatccaaatttgtagcaacaaagaaatagaaactaaattcagtctaaaagacagcacaacaaaaatgtcttttaaatccaaataaaaaaccagttacctaataataatctaaaatgcccaattgcttccacttccaccatttctccatcacccacaaagatgtatctttcatcatcacttggctttcggtagctc

SEQ ID NO: 404396 - DNA, 1659 bp, Cannabis indica
tctacactataaataaagagttcaaagccaactgttttggttgagatttcttggcattttacatttctgtttctctttcttttcctcttctctgttttctctggtttgtaccaattctccaatctgccattacaagcttttacagaatcatacgattttttttataagacaaaacttaaagatctcacaaaataataaaaattcaatgaaaaaattattagatgccatcttatcacttttaaattctcttttatataaatttatataaatatattgataggagagagaagaaaaaaataatattaaaatattaaatgaagaagcattttactcttctctacatgtagttatgaatttcttagttgttgtgcatctttattttatatattaatatgaagaagatggtgaaatatgtttttaaactagggtaaatgcacctttttcaaaaaaaaaaaaaaataactaggttaaatacaattttagatctgtgttttgtaaaagttattgattggactctctcttttgttaaatgataaattggactttgtattttttaaaatagtactaaattgtaccttcaactgattttttgtcaaaataaaacttaataaactcgatttagaggtgttatgaataaaaataattacattttctgcatttattcttgttagaattatcctaaattaaaaaatattaaaaattgagttcagaatcttatttgtacaattttaaaaaatacaatgttcattttgtcatttaacaaagcaagagttcaatcgataacttttgcaaaacataaagtccaaaatagtattaaccctttaaactattctttatattttctttattattttataggtataatgcattttggatagcctgttgggagtactcctagtatattgtatgatatattgataagtaaaggggtccaaacttttatttcgtctttggcccccaattctccctctctcattcttgtgaaacaaaggaattcataaatccctcttcctccacccctctctttccacccttctatcccctctaccaaacatagtgttaatccctctaattttggaaatatttacaaaaataaataaataaaattagttccatccttctatcccctctaccaaacatagtttaaaaggtcatgatgcaaaatggccctaaatctaacaattaagttaataaatgtctctttttataaaaacattaacaaaatgttcatcctgttaaaagtttgacgatgatgaaattacaattataaccttgaataattaagtgtttggtatagttattttgaataattaagtttatggtatgggaaatttgaaaaactatccataaaacactcttaaattatttccctaaatctatatctattaaaattgcccatttatgactacatttaatttttccccataatacccctcccatttgaaaaacaaatcccatttaattgcccatatggatatgtatatcatatgcaaactacccacctaagacagctaatcacaagcagtactagagacgaccacccaccacgcacgaccatggcttcagcacccgaccacaccggccaccgacgaccacccaccaccactgacagcagcccccgacgacgcacgaccatcacccgcagtcgcgaatatgtcg

SEQ ID NO: 404397 - DNA, 698 bp, Cannabis indica
ttccaccaatccttataaggattagggttggaagttgaaggagagggattgaggaccttggactgagctaaatgataagcagaattaaccgtgaatgagccagagtgatgcaatccccagatgagggtgtccgaaggtccaatatccaaaggaatggtaaggatagcctcagcctgataagatgggaaataatggtacaacttatcaatatcccaggtgcgatcatgagtaataaaaaaggagacagtggaagaggagggatcaaggggatgtaataaagttggatgtgagatgtgggggatccagtttggggctgagataggtacatcgttaccagatgagattttccaagtaaggccctgattgagaagttgggtgccccaaaggaggcttctccaggtaaaagaagggttatgacctttaggggcatggagaatgtcagagtgtttaaaataacgcgccttgagcagagaatgtaactgggagtcaggattggaccaaatccgccaagcctgcttggctagaagagcttgattgtgagaagtaagagaacgaaatcccaagcccccaaaaaacttagaagccgagagagcagaccaatttttccagtgaattttttgtttattcgaagaggagccccaccagaatttagctgttaagctttgaattgaagcacaggtggattttggaagtctgaa

SEQ ID NO: 404398 - DNA, 559 bp, Cannabis indica
aaaaaaatcatgattatatatattgaattttaaaaatatttcatacaattattatgtcgattttggacgtgatttgtatgattaatacaaattttattgcttattagtagtatctgattatgttttgtaactattaatatacaattttgttaattagtaggcttactcattaataccatataaattagtcataaaaatagttacacaaatctaattatagtaagttgactcattaatatatctattataattaaattaagaatttgtatgaatctatgtaaatatgtttttaaataggtacatttttaaaattgtgttttttacacattttttgtaataaaattgtttttattgtacactaatgaaaaaacccataatttcaatacttattttgatttttattttttatatttttttcttaaatcacatatatatattttatatgcacgtcaaaaaaatatatatatttaagttttttctaagaaaattttatataattttttatttaatttttttgttaatattaaaaatataatttatttttatttaatagatatat

SEQ ID NO: 404399 - DNA, 624 bp, Cannabis indica
atccagatagactgaagttaataatgccatgaccaaagaaccccaacaagccaaattgtataaaaatggaccgccctcctgggttcagaaagctcatcctcaggcaacagtcataggagatccaaatgacaccatggtcacaagacgaaaactgtagaacctgttagcatttgcctgctatctatcacaaattgagcccaaaagtgtcagagatgccctattggatgagttctagttggttgcaatgcaggatgaaatgggaaactttaaaagacttagtgtctggataatggataatggtgcaaatgttataggaacaaaatggctctttaaaaacaagtcagatgaatttgggacggtgactcgaaataaagctaggcttgtggctcaaggatacagtcaggtagagggaatcgactttgatgagacctttgcaccagtggccagattagagtctataagactgctactcatcattgcatgcttcatgaagatcaaaatcttccaaatggatgtcaagagtgcttttctcaatggggtaattcatgaggaagtctatgtcaaagaaccacagggatttgatgacccacaccatccccaccatgtgtacaagctcaataaagc

SEQ ID NO: 404400 - DNA, 530 bp, Cannabis indica
ttggaggagcacatatgaaggtataattatgccactttgtggcgaggataattaagaattgcctgatgacataaagaacatgatagttggagtgcctattgagaagcaaccagtagggagacctaagaagtaaaaggttggaagaattaaatcaaaccgaattacttgtaatggtgaaaagattgtgataaaacaaaattatgggaaatgtggtgccaaggggcacaacagaagcacttgcacctaccaaggttaaaaatgaatgttgaatttaatattattatgtgttgtactattatgtattcttgtggaattattgttggactttgttaaacatttgtgccataaataggttttcatatagttcttgcaaatttttgtatgtaaaatatttaaaaacaatcaggcctatgttggacctatcagtttatatggaaaccaccattaaaaatgaaataattttagtgataagtagattgttcaaatcaaaaagtctaaaagtaaaaattgttcaacaaatataataaaaa

SEQ ID NO: 404401 - DNA, 604 bp, Cannabis indica
aaaatctccaataattattgggagttttttttttttttttttaatgaataattattgggattaagtatgaccttttttttctttaatacgaaaaaaaaaaatagagatatttgttagtagtaggatttttgtcgcttatgtatattttataatgtaatatacaaatatataggttggtttatataatatctttatcattattgcatgtgagtatactatatattatcgtatatttgaagtcatgtgtgttatccattccaattgattattatttgaaatacgcatataaaattaataattagtttgtgttcaaactaattaaatccaacaaatcttaaaagataacgctataaatataaatactagtggtgacgtgcacgtaacctgtcaaaatttgtagattaattttatattttattttttattaattatggtgccgtttggtaacacttttgttttctaattttttaatcacaaaatgtaagtaaaatttttgtttttaaaaattttgcttttgaaaaataaaaatgcgttcttaaccacttttgttttttaattttaaaaacagaaaacaaaagtgtgttctgtaaaattcatttttatt

SEQ ID NO: 404402 - DNA, 523 bp, Cannabis indica
cttcaagataaaaagaagctacattagagcaaaagaagagtatgtctatgttatataacaaaaaattgttgttttttttaaaaaaaaaatattacaatttaaatttaaattcactacacatatcttcattttatttttaatctcttatattaaatgtgatatataacataaaatacttttttaatattgcaattcaaatttaaacccattacacatacctaaaaaaatatgtttctattatcattttttatccaattcatatatctaaaaaatatctttttattattgttttttctttaaataataaaatagaaaaagtgtttatgtttcttacagaattactatagtgatgtcgttatatattgcaattatcaaaaaatattttctaattattatttaaaaaatcgaaaaagtgtatgatatttctaaaagataaaaatatattataaaattaaatatataacagtaactaaaataacacattttgaatattattatattttttttatataaataacactta

SEQ ID NO: 404403 - DNA, 571 bp, Cannabis indica
aaaatctcttgtgaggattgcccgtaatgatcaactgcgtctccttggttcggattgattggaagatcctcagtcttcgaatccttcgtttccaatttaaactgtgacgtttgaagtttttgggaacgtacggagaggaaaagcagttggtatattctggtgtttcgagttttgaggaataagtttctgaacttggatgggacatcttggcaagagaatgacattccaatttctggatgaaactcgccaaaaaccaggagtttatggaatatggcaagcctaagccaccattttatactcaaaaccaagtaattggaaaggccaaaggttgagaaatctaacggttcggagtgagacagaagatgaaaagacaattcatttatactaataatgaccctcaaaactgtacaactgccgaaatcaaaggacgtgtttttccaaaagggattatgacaaaaataccctttgtaattattaaaaagcactttttattgaaaagaactttttaaggagcaattgttatacccaaaattcggctaccatttcagtggaggacacgtgtcaagttaag

SEQ ID NO: 404404 - DNA, 577 bp, Cannabis indica
accaaatatcccctacccgagtcccttataccttctgagccaaagaacactacaactgccttaaacaatccaaggtggttcaaggctatgaatcaagaatttgatgctctcaaaaaggcaggtacatggtcttcggttccttattctccacatatgacagtgattggaaataagtggattcacaaggtgaaactggatgcttatggcaaccttgaccgactgaaatcaaggcttgtagctaagagctacttgcaaacacctggcatagactataaggacacattttctcctgttgttaaaccagccacagtgagaattattctcacattagctgtctctcttaactagcaagtcaagcaattggatgtctccaatgctttttaaatggtgagctacatgagattgtctacatgagtcaacctgaaggatttgttgatcctaacaaacctactcatgtgtgtcaacttcacaaggcactctatggattaaagcagacccctcgtgaatggaatcaaacacttaggaggcgtttggtttaaaggaatgaaaatataggaatgggaataggaataggaat

SEQ ID NO: 404405 - DNA, 580 bp, Cannabis indica
tttgacggcctatcccaatattcaaaggaagaacatctctaactattttgacaacagtggttaagtcaattgcttcccttgatacataaaaattaattagtagttattttattatatttttttagacactatgtgtactattttagatgtttatacatcatatgtaaagtgttatttataattgaacttactaattattattgttattattaaaaatgatattaatcatgtaaagtcattttttggcaatttagatgccaaaatatttttattttatggtgagatttatttgtattcataactgattttctcacatttattattcggtttttattgctcttttctatcttaggaaagttgattttcagctggacttttcttgtgcgtaaattttttgtaagagaagcaattctcttatggaaagttggtttttaaaggaaactttgactattatcattttctttattaagttcgattgtgtcttgattatatcagatcatacacactgtttatagcaggtatcaagacccaatacaagatcagactcgtttttggcaagtttccttttctagtctaattt

SEQ ID NO: 404406 - DNA, 685 bp, Cannabis indica
aaattttaagagagagagagagaatgaaagttgggcggaagaagcagatcgcgtgaggatttcatgtcgaactcgcaagaacaatggaagcaatataatttactgagagtaagtctataaaccgcgatgctaaggttacttatacttaattaaacggaaaaggacaaaattattggcagaataagaaccaaataatgattatggagataaatatattatatgggagtagaacaagagtgaatcaacgcgactttaacaacatggcaagagcaagcatatcagaataagcggatgacaaaagcagaacaagagattgtgttttttctctcttcttcttcttccgcactaatagaaacacaacaagatccctttattggtagaacgttgaaatcccttcaacgaaactctagaaatctgcttgcaaagatgtagctgaactcattcagctcattgtatatatatagttgaattaggtaatacccaaatgataaacagatgtaacaaactaacttaaaataaggtgacgtggacagtgactaaacaataaactcaagacataaataacagcttaagattctgtcataacaaaatactacttcttattacagttaatttgtttggaattaatcaatccattgatttggttggtcaaaatgttagataaattaacaattaacccaagatc

SEQ ID NO: 404407 - DNA, 565 bp, Cannabis indica
ataatttctttaataaataatgattttttcataaataaataaatattctaccaataaataaataaataaatataaattaaaaaaattttagtgaccatattagatttttatttttgaaaacattataaaatacaatagtctatagtaacacttattaaccgaatgttacttttaagaagtcatattatacaacattttttgtcaaagtgttgcaatagggtaacatataacaattaaatagtaatataagccaacactttttaaagtgttgctatagatatatatatatatttagcaacactctagatataagtgttgccttataattttcttaagttaaaaaaaagtgttactaaatgtgttatttgtagtagtggtagctatcgataatgtctggaatctggtagtgaaagagagtatctaaaatcccaaaatagatttctattgcatgtgttactgtccccacacgtacgtatttgtgaggagatcatatttttgtaaaaaaaataaaatactttgcttctgtatacatgttaaaaaaggtgtatgatcctataaatataaa

SEQ ID NO: 404408 - DNA, 650 bp, Cannabis indica
gatcgttaagggtattttgcattacatctcgcaaaaccctcctaaaggcctccacctcagcatacccccgagagtactcgtccatggcgtaattgtacttggctatccgaagctcctgcctcgcctcatctctgggaaccggagtcagcactatgttgggagacactgtaaattcctccacctcgggagggatcccggaatcatggctcagggccggagtgtccactctccgcggccgtttaggtacctcctcagctaccattttgcctttgcgcttgcgaatcaaagcaacctcttgctcttcttcaccttcttcaacttcctcaggaagagcccattgctcttcttgaccttctttagcttcctcaggaagtacctcctcctcaggaagggcactggaagaagccttcgcaggggtaaccatctgggaagaagttggaggaaggggagcatcaggaagtgtgagctctagcaacggtggctaaaattgcctccatggaattggctgttgcaacaaaagaaaagagttaagtgttagaatatctgtgaaagcagcaaacacttaaaaagcaatcaaaatagtcctaccatgactctctaattcggccctagcaaagttccgaatctaatgctggctgcatcatccccga

SEQ ID NO: 404409 - DNA, 742 bp, Cannabis indica
tttagaaagtcgttcatagcatgagaaaaggtcgcttcgggaatgggagaaagatggcctaaaacttgatatgtctaaggcgtatgatcgcgtcgaattgaatttctagaggctataatggattgcttggatacgagagaatggctaaaagataatgaattgtgtgagatcggtatcttctcaattctctaaatggctctatcaaaggtcactttggcctacaagggattaaggcaaggggactcccctttcgccttttctctttctcctttgctccgaagggctatcttgccttattcatgaagcggaaagggctggtcatattcatggattgaggttcggtggcttagatcaaaggctttcccatctattttttgccgacgacagccttgtttttcttgatgcaacttcggaagattgcaagacgatcaaagtggttttaaataggtacgagcatctatcgggtaaatgtattaattatgataaatctgaaatgtgtgtttgggagcaaaattaaatcagtttcggctggtattttggctgctcaattgggagttaacttagttgaaaatcacactaaatatttgggtatgccttcatttgtgggacgaaataaaaagcaagtttttggcaagattagggataaggtagaagcaaaactccaagggtggaaaatgggcctcttctcttaagccggaaaggaagttttgattaaagcggtgatacaagctattccttgcta

SEQ ID NO: 404410 - DNA, 589 bp, Cannabis indica
atctcctccatttctgctttttcttctggtttcttttcggccaagagtttttcatctccaagagccttggataccttctggtgcactaggattcctttcaaactttctctccatagcacaaagtctcttgttccatcgaatttcttcaatttgaatctcaatttctccaatttgaatctcgccattgatgaaattcaaagtttcttcaagatttacagtagaaataatcttaattctacgttcttgatcgattaccaagctctagtatgagagaaaattatgactaactgtgcataatctaaaaaactaaactttaaacaattaaatatttaacaatgaaaagatcaagaaagtacaaataacaaatgaaaatagggatgaacagagtaaggaaaaaaaacattaaggcagaaagaagatatatactagttcaagtccatatatcgatgtgatttatggctctactctagttatataacaccaccaaatcctctttattgattgagcaagaacaagtacaatacaattgagaaagattttctgttgagtactctcacactctcacccaagaatcttcttcatatacaaa

SEQ ID NO: 404411 - DNA, 1550 bp, Cannabis indica
ataactatcatacttaggggtgataattcaaattatgatataacaacataatacatacgataacatgatctgaactctatacgaatttgcaggtcagtattatgaaaaatagatacaggttaaaattgggtcgaacccaaatgacataattattatttgaaatagattatggttgtatgtaacacgaaatcgacacgaattgacctgtttatatccaatatatattaaaattattaatttatagtaaaattattatttattttatagaaaaatatataaattagaaaaaaaaaattacttacaagaatataaaattgaaataccattttggaccatgtatattacaaaagttacccattggattatctgttttgttagatgacaaaatggaccctgtatttttccaaaatagtaaaaataagaccgtgagcttaatttttgacaattttttttttaatataaccaacttgaagataatttctaacacgaacagatacataaaatataaacagttttgtcatagcacatttagattggattattattaaattttattttaataaaaaatcagtttagagtcttatttgtaccatgttggaaaatacatggtccattttgtcatttaacaaaacagagggtctaattagtaatttttacaaaatacagggtccaaaataatatttacccatataaaatagataatttataattgatatcaacaattttatttattgtattgataatttgtgataaattattattgtaaaatctaaatatgtgataccaatcatgttaattagcatgtatagtaacataaatatagttaacacgcgaacaagacaggtcgggttaggatcaagacttcttgacacgaaatatatatatgagttgggttagggttgaccaatgaaacatatcaacttgcattacacgtagggctggacctgggctaagacggattaggctcgcgcctagagcccacctagtccacgggccaaaaaaaatattttccttttaaaaatataaatatttttcagtaatttttaaaattactacatatcttttaaataaaagatctaataatttttattttcttaaggctcactaaatttaagggtcgactttttacacgaatataaatatgacatggtaacatgaattaccactcttaatcatgacttgcaaatgattagccaatttttataataatggctaaattaaatgtgttagattggaaacttaattaaactaaaaaataatatgacacttgatgataatgctaaatatcattagtgcctattagcaattttttcttaccacaaatgccaaaagataattataacttttccataccctttggtttgtttagacataattagattgaggaaagtagaaggcaactactgaaactgacacttctgctaaagtgggccattaggcccaaaacccttcattgtcaagtttcagtaagatacacatcattttgtcttagcatatttgtagctaaactccaaacttttaactattttttacacttaggtcctccaatc

SEQ ID NO: 404412 - DNA, 959 bp, Cannabis indica
cttttaaaagaacctccttgccagctctcgagaaacatttagaagaccaagttctaaggaccgaggccactttatccttaagaaaagagaaagagtgaaactttgaacgagacaaacattgaggaagacctaaatacttagaaacgaaaggcttatcttctaaattaagagtgtgaaaaaaacatagcacgaatttcctgaacagtattaggagagaaaagaatggaggatttggaaaaattaatggcttgacccgaggccctagaatagatactaaaaacttcttggagagcaaaacaagactctctatctgcagagcaaaaaagaagactatcatcagcaaataataaatgagaaatcgagggagcacgcctagaaagagaaatacctttaagagactgagcattctgcctagcccggagaagagcagacaatccctcagcacagagaatgaaaaggtaaggggataaagggtccccttgtctaagaccacgagaaggtttgagagagcctttaacctccccattaacaaggaaagaaagagtggtagtagttatacatttcataataagcgtaacaaagccaacaggaaagttaaaatggtacatgacactttccagaaaatgccattccactctatcaaaggctttagccatatcaagcttcaacgcagcccagcctcttttaccaactttacgagtattaatggcatgaataatctcatgggctataagaatattatcaaaaataacacgcccagaaacaaaagcactctgaaaaggggaaataattttgtcaagaacaacttttaatcgattagcaacagccttagaaatgattttataaagcgtagaacacaaactaataggccgaaaatctttcactgcattggcatgttgttttttaggaaccaaaacaatcaaagtgctattaatctcagagaagtcagtatgaccatt

SEQ ID NO: 404413 - DNA, 1330 bp, Cannabis indica
ggtagactcaatgaagaaggtgacggaaataatatagtgttcttggaagttgtcaaatgaacttcaaggggaaggtcacgatgaggaagatccaaaaaagagagaaaggtctcaaaaggaagaagccaaaaagaagcctgatagaagaagatccccttctcagcctcctacttggtgtatatataggctagagggtttgttagtgatccctcacacatcgggatatttcactaacaaatcccgtataccactcttttttattaataaaatattataagtaaataaatatcaataacaatctccttatatctaggcaaatatcccacaaatattagacaattggttatcttcgattgaggatgcaccaatttgaaatggagtgctgaacacacgcgttttggactgtcgatgctcatgcacaacgccacataggctgtgacggtgtgctccaccaaccctcgcttagccgcatttcctaattctcgagtaaaatgcaccaactttccttgtaacctaatttaggacccgataacttcagaattgagtcatggttgtgagacatactttgatccgtctcaaattatctttccaacgcaagttgaaccagatcatttgaataaaaattgagagagttatgcttattttaatgaattcattttatgttatcttgtacctagttgcgagcactgccatggccaaatggcagaggtcggaaatgcatgttctcggacccctcggggtgtgttttgactaattttttgatggaaaatcatattttggaggtctcgtgacccaaaaacctcatttcgacgttcgagaccctaaaaggtgaccactaccaccagttggggccggataatggcacaggtcacccatggcttgtgagaatccatgggtgatgtatctcacttgtatttagtacatggatgttgaaaatataacttggtcaataaattcatcttcctggtgtggtaaccgacttgtgccatttcactatggcactggtctccaatttggagagcactgccattctcttatggcacaagtcacccaaggcaactcctaggtcgaaaacgactttcctcacttgtttcttactccttgatatcgtaggaacccactcagaaaatttcctcccttagtttgtgaggaatgacctatgccattctaccatggcagaggtctccaaaattggagagcactgccatttccttatggcacaggtcacctaaagcgactcgtaggtcggaaatggcttttctcacttgcctcgtgctctttgatgctgggggaattcgttcgaacacatttccctccatggttcgcgagg

SEQ ID NO: 404414 - DNA, 766 bp, Cannabis indica
aaaatatatccaacagttcctatcaatggcgactgccctttgtgcaactctagtactgaaactattcaacatgcgttggtggaatgctcgtttgcaaaggctggttggcatcgcagcatagtggacgtcggggctggggctgcaacattcagcagctggttgttgggaattttcaccagggggcacgaagttgaaatggaggaagtggcgatggtgagttggggtatttggcgtacgcagaatgactttgtttggaaaaagaagagttggcttgcttcaaatattataacatcagctagaaacatgcttgatcaatacaaatttgctaagggaaggaagggcctttggttgtctcctttgaatgatgggggaagaactgtgagcattggattgcacctgtgttaaacaagattaaagttaatgttgatggggctttatttgaacaagaggggcagtttggagtgggctgtgtagcttgagatcatcatggaaccatggtagaagctttcaagaagggaaaggttgagtgtgtccaacccgaaattgttgagatcataggcataaaagaaggttcgagttggattgcaactcatccctgggataatgtagtgttagaaactgatagttttgggtgtgtacaagcagtccaaagtaatgtttttatgtcctcacagtttggttttattgttcaagatgttaggaatttacttttggctatattttgttgagttatgttttgttagacgatctgcaaacaagttggctc

SEQ ID NO: 404415 - DNA, 320 bp, Cannabis indica
aaataaaatcaattaattttattctaataattccagaacaaaattccaattattttatgtaaaaaaacttgcaaacatcaatcaatcatcaataaacacatagatcaatatgaatcacatccaaacaacacttacatcgttttaaatctatatttctaaaaagtaaatcaattactatggctctgaagctagttgttggaatttatttaaccaggacctagatttactaacactatgattgaagactaacttgctatgggtgggcatgcaatcaatcactaaaggctaaaatttgctttgtgaagaaggctatagaattc

SEQ ID NO: 404416 - DNA, 545 bp, Cannabis indica
gcgtctagggtctgaagcgcatctgagtttgaaagcaccgacggccttctgcgtccttgagggcttgccggtcatgtttacatctctttgagaaggtctaggtgtgggttttgtgagggctcgcccaccttgcctttgaccttatccttgcgtggattcatggccttagctataaggttttatgccctaaataaaattctatttcaatgtaatcttttctattcaattataaataaagaaacatatttattttcattacttatttagtatgaattttggttcatgtgataatttatatgtttatttgatttataaattcattcaaatccttatcacattgatattcttgtctattgtgtcgtcagcacagttgaaagtaatcaagattatataattaaatgtagaactatgatttatcagtacacaaggtttaactgatatgataatctacaatgtagtttacttgcaccttggataagtgttatgtcctctccagggtattggttaaagtatgcttgggttggatgcatggagtatgcatcgaa

SEQ ID NO: 404417 - DNA, 675 bp, Cannabis indica
tgatctttcatgcacaaaaaaactttttgtacacgagagtgatgttaaatttatgttgttgactttgacttccgtgaggaaggcgaaggttacacttaaattcaagcgatgattttgcttcaaagacgaaagggtgaaacatcactgggcgtgtgactaacttcaagcaatctttctcttctgggaaggagggttaaagatgtatcaaacccttagtgatctttcacgcacaaaaaaacttcgtgcacgcgccatccctgcttcgggaagcctcagggaatgtgcacgatgcagcgtgctctgggagcccctgaagagcttactccttggaggggatttcaaggcatccagtagttcacaaggcaaagactcgaacttccagcagggtaagtgttacttcggtagagattccctgactggtttataatgtctcgagttactttcttcgatgtaacctcaggagtcatatttacattgtaatgacagaaatccctgtcagcaaccttcaccagaagtgatttgccttgactgtgcacttcctaccagcagtaccataatcaagtttaatcaaaaacttagcagacgtcaatgatgttggaagaaaactcccagtcactgccaccgcgagatcctgcaatgtcagtttctgatcaacttcatgttggaaattatttt

SEQ ID NO: 404418 - DNA, 547 bp, Cannabis indica
ggatgtttgagaccacttatgtagacctaaggaagccttttaaagttgtataagggtcggaggtcactgcttcgagtttcaccattgttgaagcttcgaaggcacgacttgaaagagacacgaattcgaacatgtttaaacttgttcttgggtcaaggaaggttagatatgagtgtatgggaccctaaggattatttttacgtaagaaaatgaagctttaacatccaaaacaaaggaccaagattttgactccattaaagacggtacaccgccaacaaaagagacaactccgatctgccaacttggtcctcttttctttggttgatcttgatccttttgaggtcataagcactgtggagagcttccccaatcgaaaggactcgtcaagagcaatcggggacaaagttacaccttgtcggcgacaaaactgacgtgaacgccagcgaccacgttctgagcagttctaaggtgtttttctcaaatatttttgtagattttgattccttattttattctaaggtgcctggtgaagtttcataatttctga

SEQ ID NO: 404419 - DNA, 593 bp, Cannabis indica
tactttttatataattttaattatggaaatatcttttacactatcgcttacacaatcagacgatgcttgcagggtggttgctgcgtggttgcgcagtggttgcatcagacaatagttgcagggtggttggccgaatgttgcattagacgaaagttttaatcagacgaaagtttctgggtagttggccgaaggttgcatctgacgaaggattcaatcagacgaaataactgtttgaaaaatgtttatgcaactgttatgaaataataaaaattataacagtatttctatgtacgtaactatatctacaagtctctctatgatttaatatgaacaaattcaccattagaaatttagacaataacgaaaatacaccaggataaatattttactatagtattgatgtataattatttttagattatactcgagttggattgtttgagaattcctattcaactttttgagttttgcctttcatggatctgaaaattaaagtgagaacattagttttatgcaaattaaactggatttttgatttaattttagtttcgtagtagtttttccttattttttttttcataaattcgaaatag

SEQ ID NO: 404420 - DNA, 507 bp, Cannabis indica
tcatcgaatccgtcctcctccgtgtcaaccattggtttactcgagccgttgggtcttcgcccttttactttttctggcgaccaaaatagaaagagggtagagtagaacagtagaaacaaaagagtaaagggcaagacttcgattcttttttttttttttggcaaagtaggcaagactcgaaattttaagtcattttactgtttactttcaaaattagtgaaaattacacatatttcattattttttaaaccatttgtctaaagaaatttaaggttttttttttttttttcaaaaaattattttatgaaaattcaaaaaaagtttgaaaaagtataaagtaacacaaatagtttttcctataaatccaaaggtaactggtcagtaactagttattctaaattatttttcctatattttttaacttttttctttaatttttctggcaacatatttttttatgaaaattaaaaaaaaaataataagaaaaacaatataaagtaactagtt

SEQ ID NO: 404421 - DNA, 734 bp, Cannabis indica
tatttttcacagttaaataccaacatagacggcttatatatgtgtatactcttgtacacgtaacacatttatattagcacatctaatattattatttaaaacttataaaaatttatttcaaaattcataataatttttaattttttaaacatttatttttataattttgtttaattctaaaatgaattttgaaataatatattagttgtaccaatataaaggtgttaacggagattttcgttaaccaaatttgagcctcacggtaataattctacaaaaaaaaaaataaaagctatagaaaaaataatatctgaacacaggattttttacgtggttttgcagttaaaattctgcatagtccacgagtcaatcttattcagatttctgattgtgttctttttttagggtctctcttgtataagtttttttgcccttttttgagcttatctgccactatttataattacatagtggatagttaattacaaagttgaccgaaataattttttagcaatcatccctaaaatcatgggatttaattacatattatgtagtgtaaatgcggtttatgatttgaaaatcatataactgtgattttcccgcttttactggttcaaaaatatcgtgtattaaatacgtctttaatttttgtatctagagatgtcttgacagaaacttgattatagtgatcccgatagcgagctggggccattcttccttccgaggtcgacgat

SEQ ID NO: 404422 - DNA, 612 bp, Cannabis indica
gggggacacagacctaggaattgagcccctgaactaggactagaaattggtctcagaactttgatcgggatcgaggacccaaccctagaccaaaacctggacataggacccacgtcgggacctgggatccgggatcgatgcttggacctgactactactcagtgtctagatcaaggacatagaccagaacccgaacccaaactcgaactcaaactaagaccccgacacataccaagacccagacccacactcgtgaacaaaaaccgaaaaatgaattagaacgggacaaagatctttgaacgggaccgggaccaagacctggacccagacccagcctcgaaccctacctgagaccgaaacccagaactgaaccttgcctcagactcaaatcatcacccgaacctagagtcggatccaaacacgaccaaaacccgtagcccgtgacttgaatctggaatcgaaactagaagcggattaggacggaagaataaaccatgaccaagacatgaacatagagccaaaactgtaaccggaacaagacccaaactcggtcaaagagccactctgggattgggtccaaaatctaaatccaaacccgaaccaggactcgag

SEQ ID NO: 404423 - DNA, 596 bp, Cannabis indica
ctcctggtctcgatggtatgacctcatgctttttccagaaatactgggaaatagtgaagagcgattttgtgaaccaagtttgccaattttttgcggatggcagtactcctaatggactaaatgacacgaatattgttttgattccgaagaagaaacagtctacttcgatgggtgaccttcggcccatatccttgtacaatgtcttgtataaggtagtgtctaaggtgcttgcaaaccgtataaaaagtgttgcctcagatcatatctccaaatcaatctgctttcatcccaggacgccttattactgataatattatgatagcgtttgaggttatgcactatctcaaaagaaagcgcaaaggaaaagaaggctatatggcgctcaagctgtatcttagtaaagcttattgatcgtgtggagtggggctttcttcgagttatgatgagtaaaatggaatttgatttgcggttcgttgatcttgttattgctacaattagctctgtgcggtataaaataattcatcgcggacatgagctgggtccgattgttcctgggagatgtattagacaaggtgatcctctatcaccttatttat

SEQ ID NO: 404424 - DNA, 1031 bp, Cannabis indica
gagcgattccctgaatactgtatgggagtgtggacgttttgggacatccgtttgataagtgtttgatctatctttgaaaaagatagataatggtgaagaaccaaatatggagtatcggcttactatgaaaggtgcccccctaccagttttcgagtttacgatcatgttacagaactgatttctcagatggtaatgcttagccatttacttacccgtctggcaaaaaactcgatgatctcggcaataccaagtctaaaaaacagagactctcctcatccaactcaattgttaaggggggaatcctctcaatctaatgttgtgtcctctgttatgacatctcaacctcaaacacacattgaacaactctcaagaaacaactcacatttgcatcctggaatgcctcctgctacagccacttctcttcccagccataccatcaggcctctggcttctgtcacaccagcatcagcactcaacaatgtgctgcaacattctgcagccatgacccaacaaacttcaaatacccttgtaacaaatgcttcagttgttgatttaactaggattctcactcctctggctgccatgaatttggaaccaaatgtctttgcaacctatcctccaacaagtcactcattgaaagcttgaaagacaagccaacttatcacacctttgccaaccaaaatgcttaatctttcaaagcctattgtcacaacagatgttggtatacagatggataaagagaatttatccccaaatcgactctctaagagaacctctgatgggataaatcttaggcaaacactaaaaagatgcaggggcaattaagcaacattgttcttttctcctttgtcagcagaaaatgaacctcacttggatgtttccattgatgaaatggattctactggtgtcaatgacagcaatgcaaagtctgatgtccaggtccgcaatcagccatgaaaatcttaagttgaaactctcgtggtttggggaacccaagtgctttcgtcatctcaaattgcttgtcaaagagc

SEQ ID NO: 404425 - DNA, 528 bp, Cannabis indica
cctgacctgcaatgaaccctttgaattgatcttttagtgttacaagcctcctccaataccaactgccttggtcaggagacttgtaattctcccagacttcatttcgaatatacacacagtggacccatgtcatccaaaaactatcttctttatttgaaatggcccaaatgtatttccccatagccgccttgttccattcatggaccttcttgaagccaagtcctacagtagctttaggatgacataaattatcccaagccaccaaaccaggtcctgctgctatagcctgccctttccacagaaagtttctacaaatgtcatatttttcaatttcaatcctataaatgccaaaactatttatttaataattataattaattatcaaatgaaattgtcatttatattatttattaattagactcaaaaaagtcgcttaattaacaaataaaccctaaaatcttttttcttcacaaacaagtcataacttagtgaaagttcataaatcagacatagtctaatttagaatta

SEQ ID NO: 404426 - DNA, 784 bp, Cannabis indica
tagtattaaaaattgtttattgtaatcattattaggttcatattttttgagttttaattgtttgtgtatatttaataatggtaataactccctaactatagccattgccaattgacactttgaattgcctcttgctctactgggtgtccacggttgcagttgcagggcttaattatggcaatgttattagaaaaaaaacaggttaatgcatagttaatgtagctttgcagtttttaatgtatagtctattaaaaaagagcattattattgggcaccagtagtgcttagcaccttaagacgtatcgtcttgtgattaattagggataatccctaaaagctattatattaaactatatgggatccaaaacttaattaaaccaatagcaatattgatacataagagataagagagtgtggcactacgggtgtcttttaacatttctcattaagaaatacagcttttatcatgtagatcatgataaatttattatagtcttcattatataaatatacatatatataatatttatcatctctctttgaatctatctagtgatatgagcaatgaaagaatcccattccatacgagtgacacctccttcttcagtagactttctaacttcagcacccaattcctcagccctctttctcatctcaccaccttcatttgaagccattaatgtcctaacagctctgctaatggtggatgaactcacaacctcatctctctgctgcctttccataacagccacacccactttgagcacatgtgtgattaacagag

SEQ ID NO: 404427 - DNA, 882 bp, Cannabis indica
aggcatttgggtatcctattgaggatcctgtcaattaggagtgttcgcagtgcgagtagtgcgatttttgactattttttcaaaccaacccgcacatgtggtttttctcatttctcaaaccgcacccgcaccgcgaaactaaaaacccgcaaaaaccacaccacaaaaaatagtgtggtgcggtgcggtgcagtttttgtggtttatgcggtttggactatcactaaataattaaactatcacaaagcaaaacttgttagaataccataaggcttgaaaatatatataaagaaaaaatttaagtgtcaaaaatacaataattagtggactttgaattgaacattcacatattggacctaaataaatataaaattagtatttttataatgtgcaatgcggtgcggtttgaaccgcatattaacaattcaaaaccgcaaaccgcaccgcactgcgaagtttaggaataattcaaaccgcgactgcaccgcaaagaatttcaaaccgcatattttttgcagtgtggtgcggtgcggacagtttcagcggtttgggcggtttgatcaacacccctactgtcaatggttgaattggggaaaggaaaaatcagccttactactatttacagagaagagaacactgtaattatatatactaaaactaaagacgttaaaactaagaatgttttctattattactatctcataaacgaaaaaagagaaaaaaacagttgtaaaaactcaaaagcaattcattaaatagcaaaaattttttaagagagagcaatttgttgagaagcgaacaaaatgaagatttttagcagcagagagaattgaggtgcaaagattttgagcaatggcaaaaatttctgattgaatgaaattg

SEQ ID NO: 404428 - DNA, 1140 bp, Cannabis indica
aagaacaactttggcttataactacaagaaaaaaaaatgagtatttacatgattaaattagtgccaataaactcattttttagtgcccatttgttgataggcacgacgtgtcgtgcctttttggtcgggacacaataggttcgtgccaatatgtgacaagtggcaccacaaatgatatcatgccaacagccaaaataaatggcacgataggtgtagtgcccacatgaattgttgaaagttatcagccatagcagtgggcaccaaaagggtcgcgcccattattcttcattcttttaaaaaaataattttgtaattaaaaattaatttatattatatttaaaatattcataaaaaaactaataaaaattacaataatctaaataataaagcattcaaataattaaataaaactactaaattaagtgctcaaataaaaatacttatattgtcacattaaaacaactaaaataagtgttcaaatatgaaatacttatattatcaaattcattgttcaaataatacttatattgcgacaaatgacgacactataatttcaattatgtggactctttctcgtcgtcctcatcatcatcattgccattctctccagactgttgttgtggaatatgcgacatttgtggatagtaaggttgtgtcatcggtgatgactgctgcatatgagacactggtggtatatgttgcattgacgtcatcaaaggcatctgctacatatgcggtgtttactgcatagaaggcatctggtgaaaatgtgacacatgctgaatatacgcaatttgctgcatcggatgcatctagtgcatctatggcctctgttgctgcatctatggcgtctgttactgcatctgtggcgtctgttgcatggagggctgctgcatttatggtgtgtgctgcatggaaagttgttgctacatctttatctgtggtgtctgctgcatctgtatgttttgcatcaaaggttgttgctgcatctgggatgattgctgttgcatctgttgagtctgctgcatttgcggtgtctattgcatatgatttacttgcagctgcgacattggtgaggacaaccaaggaaacggggacatttgttgagttgatgacgaaggatacataaatggaatagga

SEQ ID NO: 404429 - DNA, 583 bp, Cannabis indica
tttgaaaaaaatagaaattaaaccaaaaaaagttatgtttactcaaacaaatctagatttttggagaaaaaattgactcaaacttgttccggcaaaatttagtttttacaaaaattgaatttgtaatattcttttttttatatctaaatggattttttattaaaaaaaattaataaatcacttaattagtttcaaaattttgatttcaattttaagtttcttaattattcaaaaataatttttttaagatctaaactattttttaagatttaccaaaaataaaatgttgaatatctttcttatttttatttaaaaagggtacagtttcatagttgtcaaagtttaagagacaacattattaatttacaaagacacatgagcatttaaacgaaataatgagagagaacattacacaaggactaaatttttgtaaatgtaaaaatttaaggaaaatttttaacaaaccagaataggatcgtgttgaaagttgaagacaaaattgttagggaaaaaaatagaaaaatacaaaaaaggaaaaaaaaattacaaaaatactttacgccggcccattaaatatttatac

SEQ ID NO: 404430 - DNA, 1670 bp, Cannabis indica
agaaagttgaggccatacttccaagctcacccaataaaggtgtacaccgactagccattgcgagaagttttgcaaaaacccaaagcatctagaagactaatcaagtgggccattgaactcggctagtttgatataatatatcaacctggaatggccataaaaggccaagcccttgcagactttgtggctgaatgtacaagtgcacctcttgaaatctctcaagatttaggagaaaaacaagagccagagaagaagcgagagcaagagcagcagcaaaaacctaaagaatcaacatggaagctacatgttgatggaagctacattgaccaattctctagtgcaggcattgccttcatatcacctgggggcaacaactgcacggagtaatcaaatttggcttcaaagcctccaacaatgaggctaaatatgaagccttaatcactggcctcaagctagcacatgaagtatgagctgaccacctagacatatatagtgactctcaactagtcgcaaatcaagtcctaggtgaattaacaactcgaagtgatgaaatgatgtcctatttaagcacaatacaagacttgtaagtcagttcaaaaagctatacataaggtagatccccagaagaatagaataccacagcatgagcacttgcccatctaacaagcagcactattttcgacaaggcaaacttggtgccaatacagttcctaaaagaacataacattacaatccttgaagaagttgacatgttggacgatagttcaacatggatgacagctattacagcttacctccaaactagagccttgaccaaaaaataaaaatgaggcaaaaaagatgagaagtaaagctgctaggtacctaatcttagacagagtaatgtacaaatagagcttcacgatgctgctcttaaggtgtgtcactaagatagaagctgagagtttgacgatagaaattcatgaaggcttctacagtgattatgccgggggcaaagcctatctaaaaagatactccaacaagggtacttttggctaacaatgatcaaaaatttaatggattatgtcaacaaatgtgacagctgccaaagattctcgaagatccctagagctccacctaacgagctcacgatgatacagtctccttggcccttcgcagtatggggaatagacttgattggtcaactcctaaagggaaaaataagggtgcagtatgccgcagtcactgtagactactttaccaagtgggtagaagctgaacccctaacaataataacttctaagaatgtaacaccctaactagcataggcgtgttaacgtaattttaaacataatgtgcagcttgttgctaatcaacgaggttattgaaaatcgtgattaattaaaattttcttattgaattaaaaacttaaagtattacataaataatatttcgggatcccgtttacaaaatactttacaaaagtttgctatacatataatcaaaagttcgtcgctcagcgactaatcaacaaaagctcagatgtcccgaggattgtacactccaggccttgccctgacctacacatggaaatagcactgtgagtcgacagactcagtaagaaaagcataacataatcatacaaatacccaggttataacctggcgcccatacacccgatcataacccta

SEQ ID NO: 404431 - DNA, 847 bp, Cannabis indica
acattcattcgtttgtgctacagcacttcggcacattgtcagcgaggggagagggcgttatgtcctctttattttaggtgtgataggttgaggattgtacgacattgtaaaatctcaacctaatatgttctttagtttttattacaactaatggggttgcacataatttaactagagtatctcattttatttgagggaatgatagtccttttcatgtcattgataaatttctatacttttattaaaaaattatagtattgtaaattaatataaaaataatttttttattcaatattgggcattagcgtgtctaacaccttctaaacgtgtcactttacaattggttattgatattttttaaaagttattacattaaattatatgagattcgatatttaattgtaccaatagtgatattgatacgtaggagggtgttagcaggcccaatcttgaacatagtgggctaggcttgtgtctagggcccacataacctaggagccccaaaaaaatttctctttttaaattacacattttcttactaattttgaaaaatactacattttatactaaataagagtctaaaaatattttttctcctatagtgccttgggtaggggtgttcgcggtgcgggtggtgcggtttttgactattttttcaaaccaacccgcacatgcggtttttcaaatttcccaaaccgcacccgcactgcgaaaaataaaacccgcaaaaatcgcaccgcaaaaaatagtgcggtgcggtgcggttcttgtggtttatgcgttttggactatcactaaataattaaactatcacaaatacaaaaactttgagtaaaacttgtcaaaa

SEQ ID NO: 404432 - DNA, 514 bp, Cannabis indica
ctctgtatgatgagcccttaacggctctatctctttgtctctccactcggtaaacatacgcctttgttcttcgaacgcaagatttaccgcagtgcagatttcttcctcatcatgatgtagggtattgttatgaccctgcatcagtccaagagcatcacggagattttgtaacttagtagcatctccaatagtcgtctaggtgttggttcgaggcggaacgcctgtgttatgaatgccctgattgggtgcggaaccgttattttcggtctcttgcacaccacacgtgattttatctataggagtcgttacaccgttacccccgtttggtggctgtcgaggattaacagctggcggaacccttgtgtttttgggttctgcaatgcacgatccaccgtctgtgaattttctggatcagtcaggcccctacgagtctacaccacaatcgtatttgcgattagattttgaataaagagcgattcttgattctgctctcaatgaaagcactgaaatattg

SEQ ID NO: 404433 - DNA, 630 bp, Cannabis indica
tataggttcttatattaagtttacagaagaattaaggggatttgagacagaaaataaaaatgataagtgttatatataagactctcatactagctctataatcgatcatctgactcagacttcagtgacttccttctgacaaatagatgttttctttcacttaaaagaaggtaaaattaattttatatatatatataccttatcactactacaaaattggactttagaggcagtttttaaggcctttcagcgtcggttttggcgaaattcgctaccgacgctgatccgggtgacgctaaaggggtatgaaataaccgtcgccatagggaccctatggttagggaccctatgaagtcggtttttataaaataaccgactccataggggtttcctaaaatttttttcagctttaattaatatatttttttacatttattaaaaatctaaatttatttttgtattattaattaaattaaattaaagcataaataaaattaaattaaaaagttaaataaatacaaatttacattgctctaagtgtttgtatattaggtatttttttattaatattttatattttataatatgtgtttgtattctagtattttagtatcatttttataatttttt

SEQ ID NO: 404434 - DNA, 1115 bp, Cannabis indica
cttttattttcatattctttaagatatacctacttttatagatgatgtctcaattatactctttaagttaatgtaaattatatgttagacttaagtgaagagtgatgatttattggacaatccacttacaaaagtgagtacattctaattaaatataatatgagagtatttttgattaatggatattaaaagaagatattcttcaacttattccaaaaaaaaaacaagagaagttgaaaaatacccttttttcatacactaaccaaatttacccttaaataaaatttaatttaaatatacctctttttatgagtattgtactcaaattatccacataactaacatataatttcaaacataatagatttgtgttctttgtaaacagatgcataggtttgtaggaaaatttgggcaaaattttaattagaaaaaaaataaaaactaatcataatgtgataggagtaaaattggtaaaataattgaaagaagaggtaaatataataaattttgaaagaaatggtaaaaatcaaaagcatcaaattaaaagaggtatgtagtgtaatttcttaaaaaaatggtgtatttggtaacagtgctgttaggcccgtgtggagtgcagggggtacacaccaggccccgttttccaacactataatcaaaacatgggcttttttatggaactaataaatcaggcccattttagagctcattccatcattccttttcaacaaaagttgttttctattttgactcttttttttcttttgaataaaatgaccaaaatatttattgatacgaagttgtctatttttaactagggctgtacatcggtcggtttagtcggtttatactatatattttccaacccaacataaagatcgggttataaaattctgcatgcaaactgcccaattttaaaaaaaaaaattctggacccgaccgacgggttgggcgggttgggcgggttaacccgcccaaaccgaattaggagtttttttttttttttttttttttttttcagattcaactaaaataaaaattaataacattaaatacataatattccaaatctaaattcaatttagggattgggtttttttaatatatattatata

SEQ ID NO: 404435 - DNA, 675 bp, Cannabis indica
ttagagcgcgaatgctcgcggctgaaagcagaaagaagagttatgttgatccaaagtgacaggagattaattttaagattagagatatggtatttctccgggtatcgcctatgaaaggcatcaaacgctttagtaagaaagggaagcttagccaaaggtccattggaccttttgaaatccttgaaagtatagggcaagtagcgtacagattggctaagcccccaacgctggtagctgtacatgatgtgttccatgttttgatgcttcagaattatgtctcagattcatcccatatcttgagttttgaagcattggaactatagtcagatttatcatatgaggaacaaccggtgcaagtacttgatagaagagagaaagtcttgagaaacaagaaaattgcactggtgaaggtattatggaaaaacagtaaagtggaagaggcaacctgggaactcgagacggatatgcaacaaaatattcgaagttgttctggtaaatttcgggacgaatgttatagtgagatttctctcacctagaaactcgagactagactcctgtttagaggacacgtgtactcagatttccaaatgaaaactgagacgtccatgagagactcctcgaagttttaaacctcgctcaagatagattcagtgagatacagcgagtatgaccaaa

SEQ ID NO: 404436 - DNA, 819 bp, Cannabis indica
gcatgctgatgacagttgccatgtccaaccgagcactttgcagatatatcttagataccgtggggaccatgaagccggtgaaatccaagctctcaatacatagaattaaattaggaaattatctcatattaccattttttgattatttttttcatacttagaataaggattagtaaggcaattagcaattaaataattataattttattattatatgtaaatgattgattatgtaggtcctattttcaagaaataagtattagtattatatttttatcaattctggatattttattaaactctagatgtattatacttgacatatgtgaaaaataatattgctatgattgttgcttggtagcgatgaaaatacgacagtttagccattagggtcacatgggttgggtttaaacctttcttttagcgtggcaaatatgtttgatattgaaattaggcgaggttgtagtatttgatcattttttttctaaggcctaatgttacttaaggagtaataatttagggcattttggcaaattatgcttaagaattaataatcttatttcggtactgggaattctagctagaaaataagtgaatttattaggttgatattatctaaggaattacgttggtaaattcaaaattaaattgaaactcactctcctcactttctctctctctcgccccctcttagaaccaaagaaactcaatctttttcttaccaatttttttatcatccagtagataattcagctagagtttgagtaggaattgagggattcttcaaaggtaaaccaacgtactcctcatttctcttat

SEQ ID NO: 404437 - DNA, 663 bp, Cannabis indica
catgcgactgaaggggttgttagtagtgtagatacacaccttgcacaatagttgagtgctcaagctacgagttttgctgcaacaatttcgactattgtgtcttctgagcggtagatgaagctgaatatacgtgttcttaaggtcaactatgatgctgcaatctttttcatttgattttattttagttttttgtaaaacgatatgagagtcatatctcaacaggagaaatgtcccgattaaaatgtagactaattttttttaattaattgctattaataaaattgcatgatttaataaaaaaaaaaaaaatcacgagtatcagttactcaaatttcccaaataaataaaatcatacaacatttttagaaaagtaattaaataaaagtctaatttagatttttgccccctgaattttgacatgtattaaatcatgcctctttaacttttttgctcgttaaaaattcccctcgaattattgagattgttagatttaaaaacttttgtctaattttactaaaaaaattcggatgcggatgaatatttaggaacacaattcggtacatgtataaagttaagggggtataattttgtaaatatcaaagttcgaaggcatagttttagtatatggacatttgccataagagcaaaattgaatgaaattag

SEQ ID NO: 404438 - DNA, 740 bp, Cannabis indica
actctagttcaggatttatcgtccaaatcgttttagagttcgagtttcctacagaatcggtcatcccatataaacaaaaaccctcaaaacccacctctaaattagagctaaatgatgctagggttagggaacacatagtgagaacccaacaggaacatatttctagtcgctacaagtgcttcttgtaggaaatatccgaaggcagacgtcgattctcgcgagaagcagcctagccagaaccatccagtgtgtcctttattcttgtggcaaaacctttgtttttacccaatgtcacaatttcttttgaaccaggtgacttgaattttgaaattatgcctcccaagccacgtacgtctaaaactcctcacgatccgagcgtcaccttcgaggttgagttgatagaatcaaaggtgtgttaggttatatttagcctatgtctcgggtctaatagttaagcattttctcagttattggtgtcttttggagaggttttacgattgattttccttgttttaggttctcggggtgttagagttcaaattcagtcgattgatgaaaagacgggacaaactggtgaaaaatcagccaaagctgctcaatgggagtcgcggccaccttgaagcctagtcacaacccttttatctggtcgcaactatggtcgcgacttgggagatttaacagaaactcaatttttcgagttttgcctgtggtcgcaaccagcctttaagtgggtcgcgacc

SEQ ID NO: 404439 - DNA, 1145 bp, Cannabis indica
tacaaaatacaaatcaagtttattcattattagaaaatatgcttctaattcaaacaaaaaatactcttttctgttataaatattatattatatgttagatatattattacaatagaaaatagtaaaaataatatacaaggacaataaaagagattgattaaatatatgttacacaatatacatatatacactatatatattgttggaaaattgttgtgctccaatagaaatatcaaaccaacaagattacaactcaatgacaaataatacaaaggacaaaaatatagattaaataatgttacacatgaatcacaatatatatatatatattatatataaattagagatgtgagagcaatctcaacaccacatacaccacaagtgtataataggggaatcacaaaacttgaacaaggttttacacctttgtccaaaagcttatttccccctaccacaagcacttagggaaaagaaaagaatggaaatagctttctggatttatcaagcctatagtgtttctagcaatgtgctctcttgatagaaacttcttctctccaaagtaaactcaagacctctatttatagtgttttgaggatcacatttgaaaatcaaatcctttcatcacatggctgttaccaacactttaatttgtgtttaatgggataaaaacgttggacaagagagctggaaacatgctcaattaatttatatacgtttatgaacgttttcaaaaatctggttccagatgttcgaaaacaaccataaaacaacatacaaacaactattaaacaactgtttcctgagaactcaaaatgtaactcctctccgagttaaatcatttcccaacgtcccaatacccatttaaatgatataattgagtattgtaacagtttctaacagctagaaacttatcccattaattccataactcccatatgtaacaactcacataattacatatttatcaattgtgatccttaagttacaatctattttcagatttgtaactcctcatatgttacaattttatgtgtattattatactatatatgatataatataacctccaacacataatatatattaatctcatattaatatataatttgtcacatttaaatattttaatctatattatattatat

SEQ ID NO: 404440 - DNA, 598 bp, Cannabis indica
tggcacaggcatcgctcgtactcggttcttgcagattctgacttatcaccgccctcccgtcactcttgttcttagggatagagctcaaaaacttgcctgactgtcaggggaagatcggaatattatccagttgacctccgaggataactttttaaggatgggctcatcccaaggaatttattcctaagttcgagacggggaagaggaggaaatctggtgctggccggactgaacgagctcatctagagaatgagctgattcaactgaagcgtgaagctaagttgaagggaggtgcaagggccaagcagtatgctcaggagcccttgaatcctaaagatgaagctgaggaagagcaggtgactccacttaagagaaagaagaaactcccagccccgcccaggcctattgaacatgcaattcgcataagggagcccatttcacctagtcggccattccctcccgttttcaaaaaagggaaagctgtaatgtctgaaataagggtgatgtctggtgatgatggacttttgagtcttgtttgggcagtcaccttgcatactactttgtcttgttttcgagcttcttcactattatgccttat

SEQ ID NO: 404441 - DNA, 556 bp, Cannabis indica
attttttttaaaaaagaaaatgaaatgaaaaaatgatttatctaataacatttgtttaatattcaaattaaaaacctaatttaaaatccagtaaaggacaaaatacaaataggcaaaaagaccatttttcccttcccataactaaaaatcataaaaatcacttaggggtatttttatcaattctaaaatcttgactattcccgacattcttaatgtctaactatattgccccgctatactaaaaaaactaagatgtgattcttatagccatacaccgcgttctaatattgttgggcacaaaacatggaaaataatgaaattccatatatgacatataaaatccactctgaatttaaataaatcttcgtaaacgtataattcataactaatatgcaagtttcataattaaaccctaattatctgctaattttaaaattaaagttaagcggtctttacacaacgtgtaaggtctgttgggttttatgccctaaataaaactcatttcaatataatcagatttaattattaacatagatcagaaataacatttaatgtt

SEQ ID NO: 404442 - DNA, 587 bp, Cannabis indica
ggtggccgccgaaaggccccttcgtattgggagcccggtggagcgaaggaccccctgaccaaagcctttggtcccagtgccgaatacgggggctcccgatgccagcacttctggttctggtaagtcccctttaatgatacactacgtcccatctgtccgtgagtatgctagccttaggcctatagggttcgatgaacgtctccataggtttaggatgccctccactcggtggggggatcatgccaaagagtattatttctctcacttaggcgattatttaggtcggtcccggatgggttctggaccttcggtgcccatactcttggacccttcagcctatttatcttctagctggttccgtccctcggacagctatctcggggatgatgccgccagtgttaagattcgggactttgctagggccgaattagagagtcagggtagggctagcttgattgctttttgttaagtgtacactgctttcacagatattctaacacttaaccttttctcttgttgcagcagccgttcccatggatgaaatcttggccactcttgctggagcccacagtcctgatgtttcccct

SEQ ID NO: 404443 - DNA, 647 bp, Cannabis indica
aacattagaacgtgggaacgatgctagaaaatcagaaagcttctatttaccaattaattaaatgcgttttaagaaaaaaaatgttttaattaattaaataaataataataatttaataaataaaatttctaccaaaaataaagtgacaccacacccgctcagctcggtagcgacacgcgtgtggtggttcagtgtgtaagtcctcacccatgcgtacaaaacttggtaccccttgggattccaacccaagttctaaacttgaatattatatacatttttaatgaagtgtttctatcccatgtggaattctatttactcacacggtaacaaaaaaaaagtagttataaccttaattttttttctcccattgatgagtcaaacatttctttagtttagctttttagctatttatttagctaaatgcagctacaaacgatataagataaaagaatatttttaggtgatattagagcacgtttggtattgttttctattttttgttttcaaaaaattgttttcagaaatgagaacaaaaaatagtttttgaagtttttaaaaacaagtcatgtttaattagtgttttttaaaaataatattgactaaaagtgaattggtttttaaaaacagaaaacaacattttgttgttt

SEQ ID NO: 404444 - DNA, 546 bp, Cannabis indica
agacaatagcccccttagcaaataccgtaaatttgctttttcataacatattaatgagaaaacatatggaatatagaacattctcattgcgctacttcacataacaaatacgaaaaatgtgaataacatataattttgcaacttcacattgaacccatttacgaaaattgctacacaaattagaaatgtagaaaacatataattttgacaacgtagtgggttcttttaaccaaatgtaattttcatcatcatccacacgtatctattaagttctacacaattaagttaaacattagttttgagaacataagatatacaaaacatactcattttgcgacaacccatatctttaacgcaatataagttggacaatgatgaaaaggcaaataaaaatgataaaaattaattttttaataacattctcattgcgtttcttatcttcctccaaaatcttgatttggtttcgcaatccaggtgtagcatctgtactttttttaacatgtgatttatcgatccaacaaaagtaatcacatcctcgactttcat

SEQ ID NO: 404445 - DNA, 656 bp, Cannabis indica
actatgatcaatccctaggagccgaaattcggatcacatccaatcctttttatattgcctgctcccgcacccgactgcggcctcatatagccaatcccgcttctttggctccacctcctccctgccggtttcaccaagcccccgttatcactgaaggccctttcaatgagcctacctcagcctatggagtacaacatctcagccagccacaaactacactaatgggattacacactaatctctcttcaccccatttcaatctcaatcattccccccccactaccactatttggccggctcaccaaacttttgctgctacagcaaccattccttcacaaggtaactcccctgctatctcaccaaataacactgctccacctaacctaccaccatttccacccatcaccattgctcaacaacttgcaacaccacttcctaggcccatttccacttctcccgaggctcttgtggccaccactagggcccctcaacatgtggtgccggtctcccaagctttttctaccatattagcggacctgaacccatctcagccacttcgcttcgctgtgggctcttctaccaacccagctccaagttcctcaagggctaggaagttcaaggctcagcgtcctgattgcctgaacgctgctgaattt

SEQ ID NO: 404446 - DNA, 676 bp, Cannabis indica
gctttagcctcagcaacatccagaggtagtactccttgcaatgggagcataaaccctgctttaatgatcccacactcatccgtgacaattgaagctaaactagtcttttgggaagccacatcgatagctgcatcagtgttgacctgccaggttcctataaccgggataggaattggatcttgaccctctgaagttacagtctcctacttgaaattctggacacgagctaactgaaattcatccaaaaaattacaagcagattgaaaaatatcttgaggccaaggccttttgtaacgccctaaaattaggcacgctacccaatatgattaagaaaccctaatcccctaaacggaattggttttaaaataagcgcggaaattaaactttaaacgaaaacggaatgaaaataaacttgtaataattttaaccttacaaacaaaagttacatatttcgggatcccaaaaattattttacaaaatattacaagtcttttctccttaaccgacctcagcggcaaaatagagttacaaaagtttcaacactggtagaccccaacccgcttggtctagtgtggcacgaccatgtacatacatcgcccaactcccatactcatggctgatcagagatagatttaccctttcctgcacagtagagcacccgtgagccaagcccagc

SEQ ID NO: 404447 - DNA, 547 bp, Cannabis indica
tcaaaatgttcagccctactgaacacaacatgcaggactgagcatgaaatttaaaaaactaaagaaatcattcaaactgacttggtgaacattacagaaactgacagaactgaaaactaaaaaaatcgctaacggttaaaactacggtcaattttttttgaataataaaccgatcgaaaaaatcgaaacccgaccgttatacatatatatatattaatttattaagtttttttattttatgtattatagttattgataatatataatgatagtatattattattttattaatattaaaattaaaaaaataagacaattattttttgaacaattattttatatgttatagttgtaaaatatacaataatctatttataaatttatattaaatcatattttaatgaaaaaaaaatcaatttaggtagtttaaagcgattaaatagaaatttaagtagtttaagacaatgggtaagttgaaaaatgcctcttttattcatcaattaatcaaatttacctctaattttatatttatttgaaacatacctct

SEQ ID NO: 404448 - DNA, 605 bp, Cannabis indica
atattaaagagagaaatatgttattttagtggaaataatatttattttattccttgttaaataagaaattaatgagaactaatcaattattatttattgacagaataaataataaatcttatttatggaaaaattaaaaaatcaatttggactttaaaatatggcacaggcgtgtaggcctagcccacacgtgtagggtgatatataaagactcatgttaattttgtttaattattttattgttaaaataaattcaaattaaattaattaattatcttttaattattaaattattaaatatattattagataatctatttaataaaataataaaaaaaaaattaactgatttctgttaatcaattatatgatatttatatttgaatttgaatcaaattaaatattatcttttattttaaaaaatttatttacaatcttatataagtataacaaatcaaccctaagaataagagaatatagtgatactttcaaagagaaaataactttttcactctcattctctctctcctcgcatgcctctctttatatatatatatataaatatgctagatagatgttacgtgtcaagtcacgtatgttaattt

SEQ ID NO: 404449 - DNA, 587 bp, Cannabis indica
tggtatagatttaaaatccaacatttataatagtgtagaatttgatgtataatttggtgtgttattgaagtaaaatagtgtgaagattccacactaatttaataaaatagtacactattgaagatgcttaagtcatttggtggcatattcaatttatataactttcaattgaaggatgcatcccacaaaaaaggaaaaaaaaaactagttttgtctttttattaattttttttattattttttttaatttgtttcataatttttttcttcacaatttttttttactaacaatttatgtgagtttttttttttttttttttttttttgctatcttttgtggtacttgacaccaatatataacagtatgccaatactatttatgttatttagcacttcctttatagcattttcttatgaatgaccatttttttacaacaacttatgtgaagtttttttcttaacgatcttaatttttttttcatttgaaagattttttttatgtataatattttgtacaatattttttctagttaattatatttttttaattattaatagaacattattattggggtaagttgaaaaat

SEQ ID NO: 404450 - DNA, 630 bp, Cannabis indica
ggtgtgtggatccgggtttcgccaaggctcttggattgaaggaagttcttagttggataaagacttcaaacttctctaatgttacgatggagacggacagccttgtcacggtccaagctcttcggagttcagtgattatggcctctccgtttggtaattgtattgaggagtgcaaaggtcttctttctaatttgaacaatgttaattttcactttgttaaacgatctgccaaccgtgttgctcatgcttttgctcgagactcatggttatatgttgatcgtagttattcgggtagttctatcccgagtaacattcttgatgtaatcgtgcatgaaatggtttaataaaattcatcttctattcaaaaataaaaatatatatagggaaatttgcggcaaaagtcaccaaaaagttcacgttgatgcaaattagtcaccaacctccaaaaatagcggtaatagtacctaaggtggactttcgtgtttgttcgttcataccacatccgttactatgactaacggtacacgtgtacgcataagatttaatctctttttattttatttttttatttatttcttttcaaaaataaaatttttaattaaaaaattaaaatggtaaaataatgaaata

SEQ ID NO: 404451 - DNA, 583 bp, Cannabis indica
ttttttactacggtattttgtaagaaacagaatcaggaacatcacctttaacttcttgattatcaacctgaaaaaaacaaacaaaaacaaaacagaacaaattaaaaaaacacaaacaaacaaagaaaatcggttttatataacatactcaaatccaataacaaacatataaaagataaaaaccaattttcgagaaacaaatacttgaaaaatttaaacacaataaaaataccaatcaacaatgaaacataaaataaatgtaaaatcggattcagtaaaatttaatacatactttaagttttcggggagatcttcttgttggagctttcaagggaatatcttccacaacattatcagccttaaacaaaacaacaaaaaatcaatttcatccaaaaaaataaataaacaaaaaaaatgaataaccagcaaaaaatatagagcatactttggatttacgcggagatttcctcgtttcaacttcagcaggtttttcttcttcgacagaaggatcataattaaaaaaaattaaaaccagtttcataataacaaaaaaaacatatacaattattaaaaaccggtttca

SEQ ID NO: 404452 - DNA, 583 bp, Cannabis indica
aattcaattataggtatttttttattagggaatcgctcaaccacttgagagaatatgtcaactaacttggagagaatatctcaattactttaagagaatatctaccccaacttggaaatatctttaaccacttttaaaatttaaatatttatctaattgaatgaattatttaactcaaatgacaaaactaatagggtcaccctactatagggtaggcacataccttgtcttaattaagataaggatggtgtcttttgtcttgataacttttatcttaacaatttttgtcttgataaattttatattttccctattttattaatttgaaaaataatttatcaaaaaaataaataattactattttgccaatacaaaatagattttttagagcaatattatacaactctttatccctacccttgacagtattttaaggtggcgatttagggaccatagacctataattctaagctctaatgtaaagaccgcttagctttaatttagaaattagcagataattagggtttaattattaaacttgcatattagtcttgaattagtaatttatgatgatttatttgaa

SEQ ID NO: 404453 - DNA, 512 bp, Cannabis indica
ctctcgtcgctgacggctctcacctaaccccgacgacagtgttgactcaatcccaatcccaaaatttgatggctctctcacaggtttagtgttttaattttttaatttcatttttagactattttgactttacatttttttagccattcatccactaaccctctcttgttctctttgttcgtcgccctcagggattgggatcaaattctctctattattggtataattatttttctccacacatatatatttaatgattgagttggttgtaatttttttcttctatttttcaattacttatttcttttgattatataaagagaaaatttttaatttatcaagtttatggttttgagattcatattttgaattaggctaagctaatataagtgtggaactgataaagtaaatgcttcaaaagctactacaaactgagtgatatcatttctattgtatttttagatatctcataaaaaaaaatgcatataaaaatagtttgcatgcctggtgtt

SEQ ID NO: 404454 - DNA, 529 bp, Cannabis indica
accagaagaaagaaatgtaaaaaaatgagagaggctgtgagagaagacgatggcgaggccttgcgactggggttctgggtctgtgtgttcgcggtagggattctgggtcgaggttaacgctggagagtgagtgagttagagagagaagtttttttttttgaaatgtaaaaatatttttgaaaggaaaagatattaaaattatatatatacaattgtaattgagtggtatattaaaacaacatgtttacattaagcatactaagtcaaattttcctattcaaatagtctattttacatgcatatttttatatattaagggctcgtttgaaacgccgtattaggtcgtattgtattgtattaaattagattatatatcatatttttatacaatactatgttaaactttaatttatactaaaatattatatatttaggtgtccataaaagttaataccacacatagttttacataaaaatattgcataaaatacaatttaatataatacaatacaatacactacgacctaat

SEQ ID NO: 404455 - DNA, 493 bp, Cannabis indica
atgaggtattctcatcagtcgtcaagcatccatttattcgatttttttttttggctttggtagcacagtttaatctcgagttagctcagctcgatgtcaaaataacttttctccgtggtattttaaatgaagagatttacatgtcttaaccagatggttacaaatttccaggacgtgagaattgggtttgcaagctaagcaagtcactatatggtttgaagcagtcgctacgacaatggttcgagcattttgaaagtttcatcaaagagaaaaagtacactcccgaccaatttgatcactatgtatacttccagaaaccccaagatggtactttcatttattttctcatatatgatgatatgttaattgcatctaagatcaaggtggagatcgtcaggctaaagactaagataagttcaatcttggagaagctaagaagattgttgggatggagacacaagaaaaagagttgcaagcacagtctgtttgacac

SEQ ID NO: 404456 - DNA, 609 bp, Cannabis indica
tgagcctttaacgtttccatctctttatgcatccattttgtgaactgacgcctttgctcttcgaacgcaaggttcactgtagcacgaagctcacctgatcatgatgcagagtattaatatggccttgcatgagcccaagaccaatatggaggttctggatctcggtgtaatctccaacagttgtctgaacatttgttgctgaaggaaccccagtacttggagtacttagatcgactgctgaactggtatatccagtctcttgcacaacgagtgtgattccagccaaaggagacgtcacaccattacccgctgttggtcgttgggtgattggttgttcggggttagtgactggtgggatcattgcattccctagagtctacagtgtgggatctactgccagtggatctacctgatcgactacacccttgcgagtttgtaccaccatcgtgtttatgattaaatttgaagtaaagagaaaatttatgatccttgctctctgttgacctcgctttttgaaaatgacatgagtcttaattgtaagcgatgagtgatgtaattaaaatgtaatatgaaaagataaataaagaacacaaagtttttaaagaggtt

SEQ ID NO: 404457 - DNA, 659 bp, Cannabis indica
gtgattttatactaactgtgcagttcattgccaatcaccaagtttattaaaaatcatgagtaattaaaatttttacttaaacacttataaatatcaaaataaataacatatatatatatataatcgggatcccgtgtacaaaatatttacaactgattcaagtacttgatacaaaagttgtcgcctatcgactatacaaaatataaccagctgtctcaaagattgtatgcttcaggcctaactgtcccaatatgtacaatcttcatctactcgctctcacggctgttcaactttagcatttcccttacctatacatgcaaacaatatctgtgagtcgacagactcagtaagaaaagcataatcataatcataaaaataactcgaattataattaggcgcccatacacccaactataaccttatccccgtgtccaacacggtactgattctagaacattcatatgacagtactatcgactataatatcagactatactcggtactctagtcatactctagtcgtacctatgtgataacatcgatcttgtacatgagccaaacataactctatgtatattattgatactgctataatgtaatctaacaggctccataaacatgcacactaaacatgtaaacacatatgcatattattatac

SEQ ID NO: 404458 - DNA, 829 bp, Cannabis indica
tggaggatcttgttgaaataaagtaaagataagaagagcctttgaaggactacattcaatggttcatggccgaggccaccaaggccaaaggcttgacaaaaaaaggtcgatatacgccatacttagaggcatcctaccattgagtgacttctagaaagatattagaaggatctcaacaaacaacatgaaggagttccttgagcgagctaatggcttcataaagtgggaaaagttgtccggtaagcgtagacaagagggcaggtcaatgaagaacaaacacagggcctcatagtgccccaagcactgtccgacatgccaaccaacacagacaatctctgtcaattctccaacaatgagaatggtggaggcaagtgcaacaacgatggctctaaccaacataatggcaaaagagggaaattcaatgatgcccttacgccatgaagtctatgagagaaggaggagaagtgcacatgcttcactctcctaccaaactcccaaaggaatgcatgcccagacaaaaccagacagggcaagtcagcaacaggcagtcacaaggcatccaacagcccaatgacttgccaagcgcacaggcaggtaccagcaactctacccaaaccttcagtgacaagatacttagaggtcatcatctgcggaccccatattgtaggcaagaccagcaaagctagggagtggtatgctcagacactccattacgagcccaaaagcgacatcctagcactcgaggaacgaggatctaagcatccaaagcttggatagcccacgatctctttctcaaaaggagatgtcgctcaagtcaatttctcgaaca

SEQ ID NO: 404459 - DNA, 714 bp, Cannabis indica
ccaacaaacaaacaacctatttatcaaagattcaaatcaaacttcatattcatgttcatgaatcatgataaaagtgaaaactaaaatatttcaaaatacatccatatccaatatccatagtccataaaaatctaaagtccatattatatatataaaaacagtaataaaaaaaatatatataatatatttataaaccgggttggcgggcgggttcgcgggttcaacccgaaacccggtacccctaaaatctcaacccgccaacccacccgaagggtaccgggttgaacccaacccgcccgaaactttttttttaaaaaatttttttgcgggttcaccagttcgggttcgggcgggttgctcgggttcgggtcaaacccgctcaaaatgttcagccctatattttatttcgttaatttttcaatttttaatttaattttatacttttttaatattaatctaatttatataattatattagtatttatatatcatttatgacatttatttgctattaatagtaatttttctcttaattttttcttgcatattatttttccgtaaaggagtgtaaatcttttcattttattaaattagaaattttataaattgtttccttattttatttttactttaatgagattttattattattaatatagggaaaaaaatagaaaaagaaaaaaaaattacaaaaatactttaggccggcccatt

SEQ ID NO: 404460 - DNA, 512 bp, Cannabis indica
gacttatagcagatcgatttcaacattcgcttgaaaccattgataggcattttcgtctaacattgaaggcaatatgtaaattaggacaagatatcattcgtccaactcagtctccattaccttctcgtattgtcaattcctcgaaatactatccatggtttcaggtatttaactacatctagtgtaagataaataatactttcacacattattagagtgtatttttttttattaacttttatttatttttttaatcagaattgtataggtgcaattgatggaacacatgtgagtgcatgtgtccctgcagataagcaagtcagttacagaggtcgaaaaaatgtagtaacacaaaatgttttatgtgcttgtaacttcgacatgttctttacttttgtatctgctggttgggagggcactgcaaatgattccagggtgtttatagatgcaattactgttggatatattttaccaggatctagatttactaacaattatgtttcattaacatc

SEQ ID NO: 404461 - DNA, 812 bp, Cannabis indica
ctgctgagtcagagcacttgctatgaacagagagagagagagagagagagagccacactgggcttgaaccaaactcagaagtaacaatactgccaatatttaatggtaaaaggttaataatccttaaaatcccaaagaagcagccgtaaagcgcagagccgtgcgggaagcttactacaaaatggtaataaataaataaaataaaatgagatttataaccaaatatatatattatatttatatgagtgtacgtggggtgtaaatgtaataaatgataatgaatgtgatttttggtgaatatatattttattttagagttgaatacgtggctgatccatgacaacaaaatgtgaaattagattagatgcaataccattggggagtgtgtatgtgtgggtcttttattctagatgttgtgtagtgagtgtggctgaactaaaatgccatatgtatctctattaatctctactgtcatctgtcgacgctcataaatgaaaccagagtgagagctgatcggaatggaaatggtacggataatgagtggggaatggaatgctgcctcgcctctctctctttcctgcatatttaatatttttcatctcccttggaacacacaattccaaattgatttgtttactttaaaaataataaaaactatacataaattacatattaaaaataataattcaataatgtaaagtaggagacattattcaaaaataaaaaataaaacataaatatatatactaatatattataaaaaatttataaaggaatatgtataataattaaaaatactattataataaaaa

SEQ ID NO: 404462 - DNA, 881 bp, Cannabis indica
aatattatgcagtattagattataaaaagaatatgcttagtattgtagttgtatatttattttgattaatttttctttattatatttttataacatttatatatttatttaataatgaatactgaataatatattattgaatattgtatcctaaaaaattaaatatagctaaaataaatattataaaaaatagtggaaacaattaaatattatttaccatatataaaatttgaataaataaaaatattaataataaaaaaaaagatatggtgacacttcatgtgtgtggctgttacttttttagtctgacaaaacttgactctatatgcctatagtgacgcgcataaagtgaatgtataagggtttagtgacacgtgtgaagtgtcactaaaaatagtctttctagtcaccctcattagtgacgcgcgttgaagtgtcactaaacagttttagagttactcaatgtgtgtcactaaaacccgtttttctagtagtgaacttactgttgcagttcctcatagaaggcaaggtaccttgggtgccaggtgggtgaaccctctgtccaaggttactgagacgcgcctgcgggatctcgaccaagatggctacctcagtgaattggactgttacattcccgcccacaataaccgagccacatacccttaaaggggaatgtgcgcttggtcgagtgctcatgcccagcaaggggcattgttgcctttgcacccgtattttaggaatgtggcagacttcttctgcctctgtccgacccaatttactcccaagggcattaaatatctgtccgccctctttgtcctctatgcctcccagaactgggatatgccttctccccacgagattagctggttttttgatttgaa

SEQ ID NO: 404463 - DNA, 765 bp, Cannabis indica
ttagggagcccacaataaaagtatggataaaaaacccaacaccactataagttagtaggggtgtacgtcgctcgatttagtcggattatataacatatttttatcaacccaatataaatatcgggttgcaaatatttaatcttaacccgtccaatcaaaagttagagaaagctcaacccgttcaattatttcatcggtttggtcgggttaacccgtccaaaccgtttttctaattttttttttaataattattattgttagtttctaatattcaaataattagatttaaaaaaaaaatgtattatttatatttcaagttaaaaaatactataatttaaattaattttaagaaccttaatataatattaagataataaatataattgagtaaacataaaataattataattgaataatataattaaaaaaagcaataaaatatggtagagattttaaactttaacttcaatatccaaatacaataaaaattattaactataaagtctaagttttaagttaaacactaaaatgtctaaactttaaatacaaaatagtttaactaataaatgtaatttatgtgatataatatatacacttctataaaaatatataaatcagtttaattcgatttattcgggttaattgggcgatttagaataatttgtaaacccagtggcggacccagaatttaaagtgagggggcgtaaataaatttaaaaagaaaatataaagtgtagttagtggggtttgaacctttaccctcta

SEQ ID NO: 404464 - DNA, 790 bp, Cannabis indica
tttaaaaaccaactttccataagcgaattgcttattttacaagaagtttccatacaagaaaagttcaactaaaaatgcatctttcctaacatagaaaagagcaataaaaaccgaataaataaggtgagaaaatcggttatgaatgcaaataaatctcaccataaagtaaaaaatcaattgacctcgcttttagccaacgacggtgagtctaatttcgtaagcgataagtagtttataacgattgaaatataataaagcaatataaagacacataaattttatagaggttcatccccgagcagttcggtaatagcctaatcctcattatttgtattaactcaagaacaaggagaaaggttccttttcttatagctcttacaacaatatctttgaatatgaattcttagacaatatctctcaagtaaaaatcctttgaccctttgcccagtgaatatgcatcactatttatagggctatgagcttggagaggaagtatttcccttctcattataatcgatatacgcaaaaagattacatagtaaatacagaatacaccgattgtgggatttggacagcttgccatatctctgcaatctgatccccaagttatagggatttctttgatgactcacgatgcgaaagctgaattcgctaagtgttggtcattctgtgtggattgctgattgctttgcctcgagcatgcatatgaggtatcctgctcggactatatcttgcgagcggatactcggagttgattccatgtctcaccatcatgtgatgccacgtcaga

SEQ ID NO: 404465 - DNA, 521 bp, Cannabis indica
tatatcaataattagacacatcacgttattattagaattaaataaataaacacatactcacatgtaaatttcccataataataataactaattttattataaataaaagtgacgattattagactttatttatactatatagtataacacctaacatgattcctaaataacgtgagatttaaaacatgtatcaacaatctttcttcacaaaatagaaaagtctcacaaatgagtaaaaatagaatgaaaattataaaataccacacaatttcttttgtactttcctttatataaatatatagattttttagtatttaacacacttttcttaatacgacaaaataataaattaaaaattataactaattgtgacagtcagtagtctcgtgatccgtaaagggaaataccgggtaagttgtgcaatctcacaccgcctggggaaggtcatgtgggatgattctgagaatgtgcaagtatgggactgcacagttgaagagagcttaaatggattgattggtact

SEQ ID NO: 404466 - DNA, 647 bp, Cannabis indica
attagacccgctatttaattacaccaatagcggtatgagactaaggagagtgctagctcctttagcaatttctctttaaataatgcctgatgagtaagagaacttagctgaacaaaatataaagatattatattattggagaaaaataataatatttttaaaatttacatgatgtcacacaataacattaatacttatatttttttatttaactttttaaataaaaaattaaagtgcaacatgtatataataatttgataaagaaaaatatttatgtatattattgttttttttttttttttttttttgaatttaataaacggtaacacatatatatttatatacataatttaattctttgatgttaaaatattataatttttatatttttttattataaatactcacgaacgatcattcatttctcacaccaatgattttttatatattttcacgcattctttttcttacaattcaatattataattatttaattataattttgttatattaaaagttatttttaaatttagtgtaatcattttttatttagttaaaaaattaaaattttatgttatgcttatttatattaatatatgattttttcttaatttatagtgataatatttataattaaataataatgt

SEQ ID NO: 404467 - DNA, 821 bp, Cannabis indica
gttgatgatgataatattgtaatatacaggatgtataattatatataaatatatttgggagaaatttgagtttattctttttaagcaggacacaccatgtaaaaaaaaatatttcaaaagttaaatctactaccaaattgtactaacaatttttattctacataaaatacccctcccacaactttcacacattctctctctaactcaaaactaatctattttctatctctctcccacagcatttacacattctctctctgattgaaataaaagtaaaaatttgaaagtaaaagtaaagtaaattttgggtgtgtttgtaatatttttaatcaatttttgttttaaaatagaaaaatgaaaatattttccaaaatgatgttctataaaattgtttttactttttaattttttaactaagaagaaaaattttgaaaaaaaaaaacactttcaaatttttttaaacaatattttttatcaatattttggactcctaccccaacctagaccttgatacttgagctcggatcccgacccaaaccctaactaagacctggacgcgaatcccgaccctggctccaaacctgacttaaataaaagccacatataaaaataaaatgaaatttacaaaacacacttttgttttttgtttttaaaatttaaaaaaaaaagatgttctagaacacattattatttttaaaaataaaattttaaaaacatacttttatttttgtgattaaaaaaatttaaaaacaaaagtgttagcaaacgtcacctttgttttcaaagattttgtttttgaaaaacaaaaatgtattctacaa

SEQ ID NO: 404468 - DNA, 943 bp, Cannabis indica
gataggggtggagacacgatacctggttatcgagcaactagttttttgcctcctaatggcctcgagaaagctgagaccttatttctaagctcacccaatcaaagtattaaccaaccgcccgctccgacaagtcctgcagaaatcggaggcgtccaggagacttctcaaatggaatatggagttaagccaatttgatctacactacattcctcgcacctccataaaaggacaagtgttagcggacttcattactgagtgtcacgaggcagaggctaacgcaagcatgcgtacaacgcaacgaaaatagatccagagtaggggtagcaatgatatccccgaacgaacttcgactccagatagccctgcggtttgaatttatagcttctaacaatgaggctgaatacgaagccctgatagcaggactgagattagcaaaagttgtggggcccaaaagagtggaagtctacagcgattcacaattggtagtaaactaggtgtcgggagagtatcagacgcgcggagaaaagatggctgcatacgtagcaatagtttgggaactgctccacgagttcacaaactacaaagtagaaaggatccccagagaaaagaacgctcacgcagactgtttggctaagttagcttcagacagtgaaattcagaaactgggggtagtacctgtggaacgcctggtggagccaagcattaaagtcaagagcaccatagcaacagttgagcaagagctcaactggatggtccccatcatcaaatacataacgaaaggcgagctgcctcaagaaaacgcacaatccaaaaggatacaatatcaagcgcaccgttacgtgatgatggacaacattctctatcgaagaggactcagcatgttgtatctaaggtgtgtatcggaccctgaagctaagaaaattatgctagaggtccacgaggg

SEQ ID NO: 404469 - DNA, 841 bp, Cannabis indica
tggctgccttggagaaccacctgttcaagtcgtctggccagtcaaattggccacaccatttggtaatctcacaagtcagttttcgggtaaaacagcaatgcacaaacagatgctggtgcgactcattttccctacagcagaccgggcataaaggagaagaaattgacaaaaaccgactgagattgtctctggttagcagctggttgttcacaatttgccaacctatgaatctatgctttggaaggaccattctattccaaatgttccttgcataatcaaccttgtgagcttgaatataagagagatttgattcattgacagttgaacgaagacgaaatatttttttgaagtaccagctcgcatcttgcttgaagtcaactgtccagaagctcaaccctctcagatatatcgcattaatccacctaacccaaaggttgtcttgtttgttggatatagcccagatatactttgccataagcgctatgttccaagtcttcccttctctgaagctgagacctcctgagttcttggggagacaaactttctcccaagagggaatatgaaatttgcttctgtttcccttggagccccaaaggaagtctctgcaacatttgtcaatagccgccgtaattttttgaggaagcaagaataaacccatccaatagttcctaattcccagcagaattgaatggatcagttgagctcttccagcaaaagagaggttcctgttagcccaagtgtgcaaattcttatggagtttatcaaggatgataccacaatcagtagatctccatttggttggtcttagattcacacctaggtacttcaaagggaaagaacc

SEQ ID NO: 404470 - DNA, 747 bp, Cannabis indica
gatgatcttcaaaagacaacctgacagttcttataccaaattgtaacaccctaactattttaggcatgttagcgtgatttttaacttactatgcagcttgttgctaatcaaagaggttatcgaaaatcgtgtttaattaaaattttacttatttaattaaaaccataaaatatcatacatatgaattctgggatcccatttacaaaagtttaactttacttatacaatagtctgtcgcctagcgactatacagcaaaagccctgatatcccaaagatcatacgttccaggcataactgccccgacatgtacaatctccatcttcttgctctcacagctgctcaaccttagcctttcccttacctacacatggaaatagcagctgtgagtatacaaagtcagtaagaaaagcataaacaataacatagcaataacctggattataatcagacacccatacccctaatcataaccctatcctcgtgtcccacacggtgctgagtctagaatgttcgtacgacactactattgacaataatatcagcctatactcggttggctagtcatcgtctagccatacagatgtgatactgtcaagtagtacggtactatcaaccgtaatatcagcctatactttgtacgctagtcatactctagacgtaccaatgtgatactgtcaaatagtataaaagccaacatacaaatctaatgtaatcgaacaggctcaactaacatgcacactaaatat

SEQ ID NO: 404471 - DNA, 836 bp, Cannabis indica
ctgacaactgcttctacagttttaatgtcagtttttgcttatttattattgatttttcatcacatatcttgtttaatgtatagttccctaattttgaatttttcaacttcttaagaagtgacggttacccttgatgtgatggtggaacctcgagaaccgttttttcttataaatgccctattagttccctaacctccctctatattttggcagagcactcttgagtataagactaccaattttgaaaattcacttcgtgcttttctctatgctgctcgtttcaacttctctgtgttagatcttgctgtcttcaggtatatatattatgtttctcttttatcttaagttttatttcttccctcttttttcttatccctttttatttttccctctcttttttatattttcctttcatccttacccttttttttgtttatttttaccctttttgtacgttttgtttttaatttccgtatatattttcgtattttcatccttctgttgtcttccctctcattttttttttctgggatcctcccctttcttctaccctattcttctatttccccccttctaatcctgacacttcctcgtttcctaagggcagtcttcttcttatggtcagtctttctcccttcccctttctttttcttgggtaggttttggttctcaattgttgttttagtggtggtgtaatgtcgaatacgaattgtcaaggtgtctcttcttcggtttccgattctctttcctcgagcattgctcctggatttgttgaatcattgttagtttcagatactcctcctatggagactgaaaatgttgaagtccccgacgac

SEQ ID NO: 404472 - DNA, 595 bp, Cannabis indica
tcttaagtgttgattggtgctttctgtgtcatttagtgctgtcttattcgttctttgcaaattattttaggaggcatattttaaaaaaattaaagaaaaaggggggcattattttcgattctttggctatttcttttcttttatggaaacatgttttcattactttctatcttttgcgtttcctttatttttggagatttggtcttattttttgtgttgtaggaaacttgtttttaattatataattatttaattattttgtggtttcctttttggtggcaattttagatttggttgggtttttaattcttagattttgtggggatatgttgtttcctttttccatttaagataaccttgaccaatttttgaaaaatctttttggtttcctcttttctctccccacgtggtgtctaaggtaaggaagttactttcatttttcatttttttttctgattatggggtaattaaatttgaaatgctatatatgctcaactacccacttacctacgatcaccactcttcattcctctctaatattttttttcaaaagtcttatgtaacaccctaactaacataggcgtattacgtgatt

SEQ ID NO: 404473 - DNA, 703 bp, Cannabis indica
ttggatagaccgcatgatagctacgaaacatggtttggaaccctactgcttggcagagagttagttatctccaaaagatggattaggtctatgccgatctgaatagaggatagagagttgagtgctgatttgatagagatgaatttagtggattttgatattatactgggaatggatttcttgtccaagtactcagccagtattgactgtaagaggaagatggtaatcttccaacccgaaggtgaagaaccgtttgtctttgtcggttcggttcagggatctcggatcccagtaatttcagtgttaacagctagggaattattacaagagagatgtctagggtttttggccgtggtattggataccactcggcctgactctgttcggccagaagacatcaaggtggttcgggaatttcttgatgttttcccgatgaacttccgggtttaccacctcagagagaaattgattttgttatggacttggcacctggagcagaaccagtttctaaggccccctatagaatggctccaactgaacttaaagaattgaaaattccactgcaagggttgcttgacatagggtttacccgacccagtgtgtcaccctggggagctccagtattgtttgtttaagaagaaggatggagtctttacggtagtgtgcattgactacccggaacttgaataagctaacaataaag

SEQ ID NO: 404474 - DNA, 599 bp, Cannabis indica
tgtaaattcgtgtgtgttgtgctaactcggtttataatatactgtactttttaaaatatgagttatgtcggtgttataaaagaaaatataaatatgtcgtgttgtgctattaaaaaaatatgagtcgtgtcgtgtcgtgtcaatgtagactcatatttttatgttgtattcggatttgtgtcgtattttacttttgttggcccatttttctctctttttgtattcaggttcgaattcgtactttaatttttcacatctatttttataattaatgaaccaattattaaaagagaattgctaaaaagtattattaatgtctcactttttttagagtcatatcgttattagtttaattaagtaggagatctcatataacttaagaaaataacttttagagaataatgctaaccaatcagagggtgccacttataaaaggtattaggcaccactgatatctgatagcaatactctatatatttctcataacttcaattatatttatataattttttacaaataattatattaaaaaactattaaaattattataattttaatatttattcataaatacttaaatttttatgtcatactttata

SEQ ID NO: 404475 - DNA, 500 bp, Cannabis indica
tttgagcacgcgtatcaagtaacaaaggtgtatggtctgaaggagacacctccaaattaattaatcttgcacactttgataactgaaaccaatcggagcttgccattgctcaatcaagacgggattctattagtgtcattattttgtgaccgtttttgttctgttcaaggtgtattggtctctgtactatctaaaatgttcttagtgtcatctgatcaataaattttgcctatgagtatgcttgtgtttcaaagttcttgagcaatgggttgattatgtcctttcccatctactatatgctacttcgattgatactaagcttgaatcttccccagataaaaaggctacctcttccagatgcaatgggaagagctctcttaaacctttttctaataagtagtatgctccttctctattagttcttggtaatcaaagaggacggctacatctctggaagagagtgaaagccatgtctgggtactaaagcaagagccagagtg

SEQ ID NO: 404476 - DNA, 512 bp, Cannabis indica
aaacactaaaaacatacattatagcggtagtaaaaagtatttcgaggatccctgttataaaagatttacccaaaagactatataaaataacaattcaaaatacaacagatatagccagtctaaaacaacttctggcaactcgacacgcaggccggtggggtcaatatgtacattgctggagaagacctccatctcatggttgttctaactttttttctcttacctacaccacagagcacccgtgagtcacatacacacagcaagaaaagtaataaagaaggatacattaaataactaattatatatttcattactacataatgattaaaatataacattaaatagtaggtaaataaccagtcgtataaatataaatagatatgctcacgtatttgcattacctaatcaggcgagcccctgtcataatgcaatatcatatataatatcactgtgccacctaatcaggtgagcctgtgccacaacttggctctaatatatcgcatcgtctaatc

SEQ ID NO: 404477 - DNA, 680 bp, Cannabis indica
gagcggacatcaactgacaaagagattgagcaaaatcaaagtacctcaggtgaattgttatgccactggttcctcattgttattttttattgaaaaagttataaatcaaggaggttcatataaatttattcatattaattgtttattctcttctgatttcaggccaaaataagagttctgaacctgttggacaagtattgttctctttgcccaattttcctcaaaatccttttgctgagagcaatataaattcttctatgaaacttaagctccaattattcccaattgatgatggtactagacgagccttggaaatggtaggcactactattaacaaaactccattttatgagatttttcggaattaccattcactgagcgccactacttttggcttcaatgtgttcacaggataaattgaatccccaccttgagctcactcttagtaatcgaaaaagaatatcatcagttttggaacgtctgaatcgtaaatggggcagttcaaaggttgcctccggagagctaatgcttttccctttcagtgttcaaaaagaaaacatagttggtcatcagagctggactctagactcagttgctagtgcagccgatgtatatgcgatgattggaagtcctcaagtttttcgattaaggtttctaactatactctctctctctctctc

SEQ ID NO: 404478 - DNA, 1025 bp, Cannabis indica
ttgttgttgttgttgttgagtaattgtgttggatgttgatggatttggtggtgttgggatgttggttctctcaagatcatcatcccctttcggagacgcatgccttatttcgatgtgccttggccttcttggaatccctaccagagggtggtggaggagtcttgcattttggggtcgtggatgcatccgacctgggaaagataagtccatccagactcttatcaagggcatcgatgccagtcaagccctcctggacagttctctccatgaccactgtcggcgaaatctccatcggggctgttattaccaaatggctagtgtgaactgtgccactcccaaacacaaccaattcccttggggtctccccaatggcggcaggtgttttatctgccccatcgagaacctgggtgtaatgccctcactattaggcacgttacccgagatacttaagaaaccctaatcccctaggcggaattactaaacagaaaagcgcgggaaatttaaactttaaacaataatagaatgaaaataaacgcttgtaataactttaatttcataaccaaaatcacatgtttcgggatcccaaaaatattttacaaaatattattacaagtctgtttccactgaccgacctaagcggcaaaacagaattacaaaagttcatcactggtagaccctaacccgcttggtctagtgtggcccgaacatgtacaagaatcgccaagctctcacactcatagttgatcacaaatcgatttaccctttcatgcacagtagagcacccgtgagccaagcccatcaacacagtagataataacagcaattataattaccatatcacgtgtatataataatgccattcatatttgtctatttaacgtagacccatgtattacgctcacatgcccaattatgtctacgtgacatagacctacgtgttacgctcacacgtctagatacaataaggccttagaacggttcatcttggttctagtaaccgagtccaacctgattatgccttgaac

SEQ ID NO: 404479 - DNA, 522 bp, Cannabis indica
tacggactcaatgaccaccgcgtacccaatccacagcttcactatcggtaatgttgtcaaaaaaataaattgtgtaattaatgtttgtaatctctaagtagatgttagatttagggttgaaaatggccatatttgagttttgagcaaaaaactagtttttttgtcaggcccgatggtgatctgatagtggtctgatgccttcatgttattaaaatgagcaaaggctaaagatgaaggtctgatggtagcccgatggtggtccgatggtcacctgatgctacttttattatgtacaaaaaaataaaaaaaaattggtagcagatatggtccgatggtggtccgctggtcacctgatgctactttttatatgcacaaaaaaaaaaattgtagcagatatggtctgatggtcaccttatgctaactttttatgtaacaaaacaataaaaaaaaattaaaaaaatagggtaagcattgggccatcatcggaccccatcagacccaattgattttatatattattta

SEQ ID NO: 404480 - DNA, 812 bp, Cannabis indica
cagggccggccctgactcttagttcactgcagctctttttggctcactttcctcgaatcacaagcggctattttgactcgtctttttagactgatgtttggatttggatcgattagtcgttatagtttaatttggctctaatactatgttagaatgtgaaagtgtagggttaaggtagtagaataggtgagtgtatagtaagatgcataaagttttatatctcaaaactaattgacaataaaaaaaatagctcatgtatcttatgtatgatatttacttttaatatattatcagatattctctaaaaaaaaatattatcaaaaaaattaagtatataaaattaaaacacgagaaaattggatcaccgccaattaccttgttttatagtttgaaatcctttaacaataaataaaataaagagctaaatatctacagttctacaccaagcgaatttttttgtttcttttttataatgttgttagtggtaattctttcaaaaaaagaaaaaatagtgttagtggtaatcattatgagtaaggtaataattaatctctctttcttttatttattttattctttttacattaaatatttagtttgatctttgtagagtttaatttgcgtatagtttacaatcttaatttagtactttaaaaaaagataaacactattttggaccctatgttttacaaaaattattaattagaccctctattttgttaaatgacaaaataaactctgtatttttcaaaatagtacaaataggaccatgaattaattttttgtcaaaataaaatttaataataattcga

SEQ ID NO: 404481 - DNA, 870 bp, Cannabis indica
  modified_base (822)..(822): a, c, t, g, unknown or other
tcgactgctgagtttgagttttatagctgctgcaacatgaaaacaaggtcgaggtttttttgagttatggaatgctgttttggctgccactttgtattttctttggaaaaataggaatacttgtatctttgatctttgatctttgttgtgctacttctagtagattgagcatggagataaggaaaatagttcagcttaggatccttagtaagggtcccttcaaagattgtaccagaaataagtatgtaattaatgtaattaaaaactggtagggagttcgggttggggttgctgctgtttgcagctgctgccgctgtgtgtttttgtggcttttttcctagcttgtatttgtttgttctttgaataaaattcctttttgctaaaaataaaaaagacttctgaatgaagtagctcataagctaggtgcttgggctgcttcatcaaactttaatggttttttggtatgagagatgtagaaccctttgtttctactaatgtaactgcttttgggcctttctttgtttattgaataattgttctgcataaacacaaaatactattctctttgagtttgcctctattttttctattggttctatggtcactaaccatcacaagcaataatttagagtgttaaagcttcagctactgtgaagtctattcgatcgtcctagtattagtatggcagaacaaccaacaatgtttcttctcgagtcctaatttattgtattattccatcaatataatatatatatagggatatgattttgtcccgtgattgtactttcacggaatatattccgtgatgtacggcagccgtcngagtgagggacttatttgatctgacggctgagattgatttaggagtaa

SEQ ID NO: 404482 - DNA, 720 bp, Cannabis indica
gtttgcctttgatgcattcaatgtaaacatcgaagtctgaaaaatcaattgaatctaaaattccatcagacacaagtcgctcaactctatttctagagatgtaacctaaccgtttgtgccataacaaacttgatttttcattatccattttgcgcttagtaccacatgattccacattcaagatttcattataaaaagaaacggtgtcaagcaaatataagttgtgataaactataagagaacccatttcaaaagtatttgaattcataggtaaactaaaatagtggtttccaaatgaacaacaataacccaatttgtccaaacaggaaacgataaccaaattctatctaaatgacggtacaacaaaagtatctatcaagtccaaatagtaaccaatacttaacaacaacaacaacctaaaataccctattgcttccacattcactgacttgccatttctcacataaatacttcttttagcatcactcggctttcggtaactcaggtaaccctacattgaaacactgatgttagtagtagcaccaaaatctaaccaccaagtatttcttagtactgaaactaaacttacctcaaaacagaccaaagtaagaaatgtacctttctttgctcgccatgcaatgtacttagcacattccttcttcatgtgtcctttcatgttgcaaaggaaataaccatcatcattgttgacttgagtttgtt

SEQ ID NO: 404483 - DNA, 598 bp, Cannabis indica
gtcgattagaggaagcaaaccggggcaatgctgaattagagtgtgaggtagctgcagccacggcggtacatggaaatagctcccaaaatcaacctgaccttggagaaagagaaccacgaggcagacctcgagactcacaaaccagggggcatgaggcaacccaaaggaatccccataacgctcaagaaagacaacctggggaaactgggggataccttgaaggcgagatgccatatgatcaaccaggaaccaaggaaccagaagttcctcgtaggaataagggaaatctatggacacaacctgtggtacatgggtcatcgttaagggatcgccaacattctctccaagctcataggaaaggagctcgcacaaatcccaagagggggaacgagacaaatcaaacccaagggagaagagcagggcgtgaagaggcgtgtgttaccgctagtgcacagtaactcatagttgatcaatgcaaagaggatagaatactcgttgcaacaatgatcaagaaggcagaatacggtttacgggtggagcaagatcccccagccgtcatggccaatcggacctatgagaacgcttgaaccagaaaaaa

SEQ ID NO: 404484 - DNA, 592 bp, Cannabis indica
tcaatgtgctttgtacgagcatgaagaactggatttgttgtgagcagtagtgtagtctgattatcacaccagatggaaggaacaactagtgatgaaacatgcaattcatggagtaaagattgtagccaggttacttctgtgacaacacttgccagacttctaaattcagctttagtagatgacctactgattgttgtttgcttctgagacttccaatgcaccaaattttattcaaagaagatacaatacactattgtggacctcctatcatctggggcagaagcccagtcagcatcacagaatgcttcaatggtgaaatcagttgttactttgatgagaagaccataatcaagtgttcctgcaagatatctaattaatctacaagaaaatagggtctttacctacaaattataagtgtaagtaaaagtcaccactactacaaaaatccgttttcccgacgtttttaaatagtcgttcaaagtattcctgccagtttctataaccttggcctatacgaccgtcgtaaaacgggcataataggcgatggttcaaaaccgtcgctaatgtgggtttcccgacggttttaaaccgt

SEQ ID NO: 404485 - DNA, 1387 bp, Cannabis indica
attattttttatcattcactctttcatctttttttctcacccctctatcaattatatgtattatgagaatttggattatgaatgaaacaaaaagttcagtgttgcttctttttcttattcgagtataggacttgaatttgtatatgttatgagatttacaagatttttagcctctgaatcaaatttattatatgtattatgagaatttggattatgaatgaacaaaaaagtccagtgttgcttctttttcttattcgaatataggatttgaatttgtatatgttatgagatttgcaagatttttagcctctgtatcaaattttatgtccaattaatttgtctcgagaatggaacatatgtatatagagtgtttaatgtattgttatatcaaatttgtggcaatgctttcctttgatttttttttctcaaaattgcacggggcattggcattgccgtttgcagggatttcttagttaaatatcttgtgtatagatatactagaaaaaaaattaaaacgcaaaaaaatatgaatgtaacaataataatattaaacaatcattaatactatatcataatagaattatttttgagtaaatataatatttatacatgtattataattcggaataaaattattaattctacataaataattttataaaatatatatatattttaattagatgtaattatctttaaatctatacatctatatatataaaggaaaagtataagacggtgacgtgacagtttaaaatctctccaaaactatttttttttctccttaattatctcatcatttttaatattttattaaaatataaatttacaaattaatattttactattattttaataattttttttataaaatatctattttaattaattatattttaaaaaatacataataataaatataaattaaataattattcaattatttatatatatgtattcataactatataagtgtgaagtttttttttttactttgcagaatataggaaaagtgttttttttattataaaaatttattatgaattgaacaaaaaaacaaaaaaaaaaagtcgtgagattatgtagaagaagaaacatgtgtgagattatgaatcaaattttttcataatgcattatttatatatttcaatcatatatagttgatatcatcattgtagtttctattgatatactcaaatttctaaatttaacacttaatttattgttctgttagttaatcaataaagtgtcacatgtaaatacagtattagccactaaggctagcttagtggtgagggagggatgggaaaaaaggagaggtcatgggttcgaacccaagacctttaagctataagctattaattgattgtaaaataccattacacta

SEQ ID NO: 404486 - DNA, 509 bp, Cannabis indica
tggatccgtagtcccatcatattacggaacatgtgggtttttgaatccctgaggaaattcagaattcgaaatatcaagatgaaatggctcggtctcttcatctgaatcgcaaccaggaaattttccatgttttccatcttgatactttttaaacttatcctctagttcaattattcgcaattggatgggatctacctgctgctgattagcattaagttgatggcgcaaattaggtgcattttggtttagtcgctggcgaagatcgggttgtcttcgattcagctgctcacgaagatcagcctgtcttcgctcataattactcacagaccttgtctctgagtaactctcagattggtagcttcgcatattgctcatgctttcttggtcagcataacgtcgaggtctacttccctcttgcgtttgcctacccaatcgactgtgtcctcgagtgttggaaattattttaccaggatcttagatctacttacaagtatgttgtttaaacaccc

SEQ ID NO: 404487 - DNA, 623 bp, Cannabis indica
ggtagccgtgaggataggcagcgggtttacggtggcagaccgtggacaatagataaacaattgatttgttttgtgaagccaatgggattgggagagatttcgaaaatgaattttgattttacgtccttttggatatcgatcaacaacgttccgttggcgtgcatgacgaaattgtttgcacgggaatgggccgagaggattggtaagcttgaagatatcaagcttgtcaatggcacaatgaaggtgagggtgcggatgaatatcactgaacctcttaaacgaggactgcgggtggcggtggacgagctaggtaatgaggtttcactcttatttcaatacgaacatttacctgacttttgttttgattgtggtataattgggcataaggcattggattgtcctttgagggactttgttggggataatcctagacccgatcgtgggaggtatggatcttggatgtgtgctccgagttcgccaccccgtgatcgtgttcggtactagaaaaaacgtgacaattcgccgtctaataggccgatcatgtctatgggagaggcctcgagaattctagctgctgtggagagggggcgggttcgttattcaggtcctacacatgaggagtt

SEQ ID NO: 404488 - DNA, 623 bp, Cannabis indica
aaaaggaaaacatcaccttctgttcgtacatgttttatcactgtcttgaaaacaaatcaagaagattccagagacgcgagtgaagatttggttgtacaaattcggaacttaggttggagccccaatgagtatttagttttgtgcatatgggtgagtactcacacgctggaccaccatacatgcgtcggcaccgccgatcgaggtggcaggcgagtgtggtgtcactttattttttagaaaaaatgtatttattaaattattattatttaatacatcagaaccaatagaagaaatagagtgacataatccgcgattcaacctagatttgacgagactgatagtttgcttgtacaattttagatagtgtcgcgaacgtcttaaatagagcgatataatctgcgacttaacacaaattttaaaattcattgtgttctttatgttttattgcacatgttttctgatttaaacattattgcatagctctgcatttgttatagttggttttcattgatcttatttgttctacatttgttcttgctgaggtgttgttttcacaacaagatattattgccaaaaattaaacttaaatattttatttacaactaaaaattaaacataagtat

SEQ ID NO: 404489 - DNA, 973 bp, Cannabis indica
tcctaccaggtattgcaaataccgtaaggactttgggcacacaaccgacgaataccgtttgttgaaagatgatataaaaagtctcattgctcgaggccacttcaagcagtatgtgaagagatagggaaatggacccaactagcccagtctgcccaacaactcaaacaaccaggtgttacaacctcttcctattgaaggagacgatatcttggttatttcaggagggccgcatatcgcatgggagagcaacaacccccaaaagagatatgtgaaagaaataaaaaatgagcagtcggtatttgctcctgaaccttctaagaaggtaaaaactgaagaacctccaatcatattttcggaggaagatgagaagaacgtgagatatcctcacatcgatccattggtgattactattcagctcgccaataaaaggataaaaagggtgttaatagataacatgagctcagtgaacatcctttacaaggaaacactgaggaagatggggctcgaaaggcaaaattgaggccttgcatggtgaatctttgcggcttcactggcgacagtatcgctagttagggcacatttgagctcgcattaaccttgggtgaggcacccctatccaccacagttatgcaagactttctagttgtcgatttaccatcggcttacaatatattgttgggtcatccagccttgatcggaataggggcagttagttcgatcaagcacctattcctgaaattcccaacacctaaagttatgggagtggtgcgaggcgataagatgctagctcgcgattgctatcgcatagagctacagtatagaaaagccggtcatcaattaatggcggtcttgtcagaagaaaacgagaagaagtacgaggatcttgaccctcaggttcaagatgaaagaaacttattaaaaccaattgaagaattggaagaagttgttctcgacccaggaaatcccacaaagt

SEQ ID NO: 404490 - DNA, 877 bp, Cannabis indica
actcaggttgagcctgtgacatcatcaacttcatggttcatcattttagggtcacagggacttgttcacttaaactttgtcgaaggatggtagttagaaattctttgttggatcttagtgcctacctaggcgcccactactatcaactagggaactgacagaatttacaatgcccaagttgaccaccattagtctcggtggctggggccctagggttgtttccttcttatctcatgtcaaaagtgttgtcagagtcatcgagtcaaatttttgtgtaaataaattgtaactctgtactttgttgtttctctaatgaaattacaacgtttaaaaaaagtagaagctacaatcttttgtttttgttttttgtttactttaaaaaagaagagaaataagaaaaataaaccataatctgtactgtatttttttgatgtaattattctaccattgaaaattgtcttaaatttaataaaatatacaaatataaatgatatcttaatgttattgttaagtttattattgtttatagcttgaaaaatatacatgttatcccaatttttacactatgacgtggcatcacaagaatggtggcacatggaatccacttggaatatctgcccgggaagcatagtctgagcagagcatatcgctagcacgctcagaacaaagtattcagcaatccatgcagagcaaccaacacttagcgaattcagctttcgcatcatgagtcatcggcacaatccctataactcagggattagtttacgtggatatggtatacacacaatcccactattagtatattcagcctcaatcccacgatccttgtattcagcattaatcccacaatcttctgtttatacgcattgtaacgaga

SEQ ID NO: 404491 - DNA, 567 bp, Cannabis indica
ggttgaaaatccagaaaatgttagcaacccacataaggaaaccaatcatcgttcttggaaagagcccatgggctctagaagacctaccaacccgcagtccaaaaggaccactcgttccaggagagctcaacctgagtgtggtcccagcgcacggagcacacgttcccggagaactcaaaccgacgtaggtcctagtacgcggacaacacgctagaggagaactcagcgtgggaagggtcagaatgccaggatgaaggatgaaaagctcaatcgtggaggtgcccaatctatgggagaaagaacttatgaaacagaatgtcaccgaatggaagaagcgcaacgtcaaaacgctgagttagaacgtgaggcagcctcggccagggcgatacaagggatgaatgttcaaaatcaacctgagcctggagtgagaagaccacaaggcagacctcgtggctcacgaaccatgagacatgaaaaggcctgggaagaacaagctagggaaaatgagacaccccttgaaaatcaggacgaacagccagatggtagacaaccgaaaacttatgaatg

SEQ ID NO: 404492 - DNA, 705 bp, Cannabis indica
gaggtggaggccttgaagaagattcttcgggaggagtagcagaatactctccacgaggaagccttccggaatccatgggacttgaacatggatctgttgacggactggttcaaccgttacgttgggccgaccttggctcctttttcctcggagatgaccaaccatttcgtctcccacttgacgcaattttcggccaagaggtatgcggcttgcgcctctctgaactccatctaccaggtccaagacatcagctctgccatggcttgggtgagtacttgtaatctatatttctcctttgatattttgtctaaggcatctggtctcactcttacttcttttttcagattactgctgagaccggtcgcctttccaagactctaattgaccatggctacgtcatgtccgaattcagaggcatagatgaggccatgaggatccttcgggatttgtctaccgaaaggcgggcgatctaggaggaggctgaatggagggaggccctcatggaggtgaagctccgggaggaggccaagcagagtgaggccctcatggaggcgaagcttcaagaggaggccaagcagagagagcccgaggtggaagcgaggcaccaggaggcgctgaaggtgaagggtgaggccgcggcccgggccagacgcgagcttcgggaggctagggaagccatggaaaaaatggctgccaaggtgaagt

SEQ ID NO: 404493 - DNA, 731 bp, Cannabis indica
cattttaagggatttaattatatgttgtggagaaattgataaatatagcaaattagtaagaaacaaaagaagattgaaactttacttctatcagttttgctgccatcgaggagaggagggagaggaggatggtccatcaaagaacgattgggtacggctggttaaaatcgtagacttagggttcgaaggaagagatgggagaagatgtcaacaatggagaggaagagagaggggaggagagcggtcgatgatggaggattgacaatgaagaggaaagagtggagcagagcgatcaacaatggaggatcgacaatgggtcgaagatgcccagtcgttagagctttgttgtcttcgcaaaggttgaagatgaatgtgaacagtgagattgagtaggaggtttagggatttggaagttgttttcataagttattcattaaccttaggccttttatttctcgttagttttaaaagctcacacgtcttttactcgatatttttgaaccgacgagaataaggtctccacttttaatttttcgttgatttatttttcgtcagttttatttgtagtgtcattttattaaatgacgctaatccatattttttaacgtcattttgtaactgtcagttttattttttggatactattcacgtcggtcaactctgtgaacagtagcgttgaccgacgcaaaaactaattttgtagtagtgataaatcaagaattcgattatat

SEQ ID NO: 404494 - DNA, 671 bp, Cannabis indica
agagcgcatatgaacatagaattatgccagttggtgacaaggatgattggaaattgcctgatgacataaagaacatgacagttggagtgcctgttgagaagcaaccagtagggcgacccaagaagcaaaaggttcgaagaattaagtcaaatcgaactgcttgtactggtgaaagggttatcataccacaatattgtgccaagtgcggtgccaaggggcacaatagaagcacttgcacctactgagattaaaaaacaatttttaatttagtcataaggttatgtgttgtactgttatgtattgttattgaattcatgttagacttttttaaacattagaatttttaatattttatgtttagataattattataatttgttgcatgaaagaaaggcctaaaattgttatgaactaataaaagaacataaacataccaataaaagaaactagttacattgttatcttaataaatactaattaaaaaaaataattgttcatgctaaattctggtaaaacaaatctacacaccaccgctctctaaatttcttcatattgtcatcgttcacattatcaaacgtaagatccagcatactatgctcgatgtgctctatcacatacatcccgcaatcaccgttgtatgagacaataaaaaagtaaataaaataaaagta

SEQ ID NO: 404495 - DNA, 582 bp, Cannabis indica
aaaaaaaaaactaaaaaaaaaaaaaaaaaaacaagttgttaatatacatagtacaaaaaactaaaaaaaaaataacccacccccttaacctttaaaaaaaaaaaaaaaaaaaaaaatcaaatcctttaaatcatgagtctagccactgtatataataatataataacaaaatatatgctcacacaaaatatataattttactattgtaattggtaggttatgactaaaattttgcataagtaatttttatataattttttcatttcaatttgtatttacaatagaatctttatctaataatacatttggaaccaatcaaattatattctaactaaaatgttataactaaatagaggtatagtagaaaaaaaatataaaaaaaaaaacactaataatcctttactatatcatattaaaattattgtttagtaaatataatatttatatatgtataacaattagaataaaattattaattttatataaataaatttataaattatatatatatatatttattaagatataattatgaaatttttacaccaaaaattcaaaatgataaatttattacataaatac

SEQ ID NO: 404496 - DNA, 694 bp, Cannabis indica
ttcacggagggggttgaggaagagtaccttcaagaaagggggtcttgtttcttgctctaatggaaagcttgaagtctcttttccatggatggaaatttttgtcagaaagaatcgaagtaacaagagataaaccgggatgatcagtcgtgctgatgtagtatagagatcgaacatctttataggctggtctgtcaactggattggggcgatgaacaacagaaagaggaggaagatttgttcgagaagggttgtcagcggaatggtttgatgctggaggagccatgggagcttcgactctagaaggattatcaaaagttgtagcaaaacttgtggcgcgtgtgtgcaccatgattgtggaggggagatcttgaatcatgaagtgcttgaagcttcagattatttcatctgataccatattaggaacagagcatataggcaaaagctagttgcaacttagtaaccgaaataacagaaaaacaagaaaaaataactaacttatccctaactctagtatagtaacccaatcatcttatatattatataatatatatatatctttccatatatttacaatatgagactctttactatataataaaatataattcttaggttacaaaattatttttagattttataacgactcttatattacaaataatgtagattattaaattatatattatatatatat

SEQ ID NO: 404497 - DNA, 751 bp, Cannabis indica
agaagtttgatgcttctaagatccgattcacctccaaatctggcatccatgaacaatacactgaggtcttctgaacattaggctccaaaccagaagtggaagagaaaagcttcaaaccttggagcatgagcataactgaaataaaatcaccattgcaaaacaccaataaatcatctgcaaaacaaagatgattcagtttgagacctgtacacctgtcatggaacttgaatcctggccattccccaatcttcttaaaaattcgagacaagtattccatgccaaggacaaaaaggagaggggacatgggatcaccttgtctgagccctctctttgcttcaaaaaatccacacatagagccattgaggagaagagaaaactttggagtcctaatacagttcataattagttggatgaactgaatagggaaaccaaaagcaactaacatctcctccatgaaatcccagtccactgtatcatatgccttccttagatcaatcttgatcatacaactaggcttgcaatttttccttccatagagccttacaaggtcctggcataccaatatattatgtgctatatacctcccatgaacaaagccacttggttctctgcaatagatcaggagaattttcctaagcctattgcagatcaccttagtagctatcttgtacaatacattgcaacaggagataggtcgaaaatcagctacacttttggggcaaaccgatttaggaatgagtgtaatggtagt

SEQ ID NO: 404498 - DNA, 542 bp, Cannabis indica
ttatataattatttctaatcacacatatctagttctttaatgtattttattatttaggttgaatatattctaggatttaaatattgatttttttttaacaaaaatattgaatttattttgattgtcgataatatttaatgaaagttagaacaacccaacacaaagtctgttttcataatatctaatacattacttaacttgaatttcttctccatttttgtttaataaatttatttgccatataggtagcctaggcttatgagacaataagctaagttgtatatatatacatgtttttttttttttttttttttttcacattagagcacttacaacaagtgaggtataataactaaaatgtaaaataaaatagctaagagattaaaattaagctccatcaaatgctttgaactcttagccattacacatatttccaaactcgaagaaattaatccttctctacatatagctcaatgaatagtggagaggtaaacatattttatattttttctttatcttttttgtttctttaattaattttt

SEQ ID NO: 404499 - DNA, 770 bp, Cannabis indica
gtcataatgctatagcattctgggcattttgggttgatgtggtcaaaagttacaaaaaaaaaatcatccatccacatcaccactcatgcggcaaccatttaaattcacgctagctggctgttgtggagagaggagaataaacctagtgggccaagaatgggaagaaatgagcttctattttatggtattacattgtaccataataacctagcaactaaaaaagtacagccaccttcatcaacataattagctcaactgccatttttagaagaattaattgtagagaataaaaagtgcaaaaaaggaaggaaaaaaaggaggaccgaagtgtaaaacgagaaggacaaaaaaggccatatcattctcagttttaggatttattttctctatttctttctattcttcttattcttctaaactctataaaaactaatttgtagccatgtattataatactttgtattggattatggtaactaaagtgagtatgtaatatcccaataagcttaataattaataattagggtttaatatttatattatgagttaaccagttaataagtgggattattatcctactaatctagtttaacataaaattttaaatttgttataagtggataaataagcgtaatttttaaattacgaagatttatattgaatgtgtgaatgtaatatgaactatatgtggaataaaaatattttcaagtttggcgaccttggaaactcgatcgggggccagaaatatcataacaagcttaattgataga

SEQ ID NO: 404500 - DNA, 508 bp, Cannabis indica
gtttatgcaataattcaacaatactttccgtacaatcttcgtcgtcatcttgaaaagcataccaacaaaatcgtgggtttcttttacccatatatccaaatcactttccactttccattaatacactggtgaccgtttcaaacgcaatgaggtctacacagctatccaaaactatctcagtgctaattcatcttctcgagctaaacgattaagcgctaacgatatcaaagataacaaatctttagttctaagtttggaccaccacgaagagagagagaaagctatggcttccttcgacacgtacggtctcgacggggacgatctcaactcctccgaccgccatttcgacgacaacggtctcgacggcgacgatctcgagggtggtcgggggtggtcgtcggagttggtcgacgccgcacaaggggcaaagggggtcggagagggctggactggagttctataggtaaaagaaagaagaagaaaaaaaaaaaaaaaggaaaagaaagaa

SEQ ID NO: 404501 - DNA, 659 bp, Cannabis indica
aacgagtggtaagggtactatatgaagtaccaggattggttacaatgttgtgaaatggattaagggtgatattatgtgataagctgtaattgaatacatttttattatagtgtgaatggatgaatgttatattgcttatgaaattagtcactttccatgcagagctttagtgactcacgggatataagaatatgtgtttatagggatgtaagattagaatgctttacgaagccctgaaaatgtgtggttatgtattgattagatattcaattagtgcaacgataaagttgttgactttaaggtgttgtgattttctcataacacatagtatgtggaaatgtataaatgctaatactatatggttatggctaactgatatgtgagagtcacaaatatatatatacttgttataatgagatgtgaatatctgcgtttataatgcttttgattcaataacttttcttgcttagtcattgtgactcacaggtgcttcatggtgcaggtaagaggaatgaagctatgttcggccatgaatcagaagtgtaataccctagaattagaaagtggattagcaaaaccataattagataattatgaataattgaggaactatattattatatagttcaaaatatgtgaatttatatgatttatgtcat

SEQ ID NO: 404502 - DNA, 589 bp, Cannabis indica
gaaagagataatggcatcagctatcactacaccaataatgtcccaattttgtttttgagaaaatagcttccaaagccgtctagaccaggggctttaacccttgggatttccagcaccatctttttacatattctcttgtaaaattttccataagtagttcgacttgatctcttgtcaatgcatttccttctttaagaatgctcttcttaacattcagcctattgtgcatacatgtgcccagtagactaacatgatagctaatgaaggcctctttaacatcgtttggttcctcaaccctctgcccgtcaacattggtgatggacaacacctgattatgccttcttctttcacgaatattggtgtgaaacagagctgagttctcgtcaccatcctttgcccatgttaatttcgccttttggtgtaggaatgatagagacttttgtgcttggagacataatcattcctagctgctagctctgaaagctgtaattcaacgtcaagaggatgctgatgaagcttgtttggcactcctcaagtatattctttgcttgagcctcttgagcctgaatgtcaccaaaggattgagtgt

SEQ ID NO: 404503 - DNA, 663 bp, Cannabis indica
attatcatgccagtctaaacccattgaactgaaaaatcaggggaattaaacttttgaacatataatcatgattatatttgttgacctcacttttagccaacgacagtgagtctaatttttcaagcgacaagtagtttcatacaaatgaaatatagaaaagtaaataacgacacaagaatttatagaggttcagacctgagcagttcggtaatagcctaatcctcgttatttgtattgacataagaacaaggaaaatggttccgtttcttagagctcttacaacaatatctatgaatatgaattcttacacaaaatcttttgaccctttgcccagtgagtgtgaatcaatatttatggggctataagcttggagaggaagtattccccttctagttacaattgatataagcagaaagattgcatagtaaatacagaatacactaattgtgggatttggaccgcttgccatatctctgtaatctgatcccagagttatagagatttccttgatgactcacgatgcgaaagctgaattcgctaagtgttagcgttctgcgcggattgctcactgctcggcttagagaacttcgtccgagcatatgtgatgtgtcctgttcgacctgtgtcttgcgagaaagtacccagagttgattccacgtgtca

SEQ ID NO: 404504 - DNA, 830 bp, Cannabis indica
cttacataatatggcattagttatataaatgtgtgtttgcgactctaagagcaactccaaggagccttcaaatttgaggatgcaatggttaatcttctccaaggtagtaccattttaaggtgatttatacagtctttgctattatttttataattattaataataatatttaatagctaatttttgtttatatatattgtttaatattaaaatatatattttttttttttatgaaatatcaacttcattaaatcaactttctgagtacaaaatgtctagcatagaaactggaacattaggcgcagaaataagacgaccagatagagactgtgatatcttatattttattaatataataataaaatatatttttttgtgtaaattttagtgttgtagttggagtggaaatattttttgataccaaatttagtgatagtgtaataccaagtttaatgtctccttggagatgctctaagtctaacgaaaccagaatttgcagaacaggggccagtttattttctataaaataaaaatagtactatataatttatattattatataaaataattatacttggtaatacttattattattattattatttgacgtgttggtaatacttatttaaataaatataatataagtattaaaaataattatattaacaaacagtgtgattaataattatattaaatttttattaaaaaaaataattatattaaatttataagtgtaattacacaatatttatttttagaaaattaatattattaaattatttaaatattaactcatttgttaaacataaaaataagaattcagatgtaat

SEQ ID NO: 404505 - DNA, 656 bp, Cannabis indica
taagctcaagtttgtgaacttgacgttgtgattttgagtatgatttttgagtggttgtacaatctgaaatcttgagtttattgctggaaattggtgtttgaaacatgagttttaattccttgttgattgctagcaataatttttggtgattggagtgtttggttgagttttagagatgtaaagtttggttttcgttgctgaaaatcgtgatgttcttggctggtttctgggttatacacccagatgccgcggcatgctctggagcatgccgcgccccccctcccctccccccatttcggtggaacctgggttttgtcccaggtgccgcgacatggtttggggatgccgcggcccgccctcgtatttttgggcagattcgacttgaatttcgaatatgcataacttttgattctgaactctgatttgggagttctttatatcgttggaaagctcgttccgagctctatatgattatctgaattttaattcccatgattgaattttatgagtatggaatcaggggttaaccctaagtgtgaaatatcccaaatttgtgtgactaggattaccggcacctcatcaggagcacctggggattcggattctctatctatagctagacaacaggtaagtcagtgattagcacgtagagtatg

SEQ ID NO: 404506 - DNA, 769 bp, Cannabis indica
acaaaattagcgcggaaattaaattttaattgcaattggaagaaaagtaaatttgtaataatttaaactttataaactaaaagtttcatgtatcaggatcccaaaaatattttacaaaataatattacaagttcattttcactagccgacctaggtggcaaaacagagtcacaaaatacatcactggtagaccccaacccactcggtctagtgtacaccgtccaactcccatactcatggctgatcagaaacatctttaccctttcctgcacaatagaggacccgtgagcgaagcccaacaagacagtataaaatatcaataacatattatcacactatataaacattactgccattctcatatgcatgtgtgacatagacctgcatgttacactcacaggcctatttatgtctatataacatagacctacgtgttgcgctcacacgtctaaatacaataaggccttagaacggttcatctcagttttagttaccgagtccaacctggtcatgtcttgaatacataaccctaaatctcaatatactcatatattcaacatggcatagcatttacacaacatgtatcactaggttaataaccctaggctattaaaccgctcatgttagggtgacaaccctaatcccggttactaattactcacatatatcatgtccaatataagcaccactgcacataactctacgtgctaactactgtcttacctgatgtcccacaataatagagattccaaatccccgggtgctcctg

SEQ ID NO: 404507 - DNA, 692 bp, Cannabis indica
aaacgatagttatgtaatgttgtatgttttgatttaaatttgtaacaaatagtttatttttgtgttcaaacttgtccatggtaggcatagtatgaccatagaaattttgtatacaagcaacaagaatttttttattaaccatggtgggtatggtatgaccgtacgatttcgtatgagcttgatgcataatatgtccactaaaattttaatgcaagcatgatatgtagcatggatgtaatgtttttatatgatgcgtagtatgatcgttggatatcatagcatatatatatattttgagttttcatagatcattaatatttgtctagtgtttgtgaccatactcttgttgagtggtgagatgggatcttgggaaagtgtgacttcaccattaatgattggggtcccttcttctacagaaggaggtgctcactcaatgttggatagtgatgaagatatccctaatgctcaacagggccgtattaaggtgatgagagggcctagggtgaaatttgaaatgaggccttttctttttatataaattaaaaataaatttaattaaattttgacataatatcaattttaattcttttatctttatgtaataaataattttttgcaacttaagctaactcgatcaagtaatatttaattactaagaacatttttattgaagtgctatatattttttaagt

SEQ ID NO: 404508 - DNA, 576 bp, Cannabis indica
aaaaaattaaaatatatttttgacaattcacctaaaaataaatcaaacatcaccaaacttgtcatccataataagtgaaattggcattaaattttctttatattttaatttttatacttaatcccttatttttatttgtagcaaaactctactaaatttatttttctttacaaatttgaggcgttaattaaatatatcgttaaatatcaactagataatcaccgtgtgtacctgtgtatatgtaaaaataaaacttcaaaactaatacattaataatctacttggtatttaatggtaagaaaagtaaacataaagaaatttgactactggaaaaaaataaagaagtaaagtgtaataaagaagaaattacattgtatacccacttttaatttttttattttatctttatttcatattttttgagatataaccacttttataaataatgttcccattataccccttagttaaaattatgtgctaaacttaagtgaagggtaagagtatattgagcaacccacaaagtggtacattttaatgaaatataatatgaaaatatttttgattaatgggtat

SEQ ID NO: 404509 - DNA, 464 bp, Cannabis indica
ggagtcgtcataacattactatttttacctattagtgatagagtttttctatacgaaatgtatagattagaggattgattttaataaattttgtgaatgtgaaatttataagataaattgtagtgataaagagggagatcatgatacatatgtataattatttccacaataaaatatttatttgtcttattatcctacgataattaaaataagtactttataaaattagttgtgcaatcatgcgattgttataaatatcgtgtgcctagcgcgatcgttatttcttgaaaaataaattttaatttatgaatattttttattttaaaattcatattttaagtatctaattattagaaaataaataactacttaataaaaaaaatgtataaaaaaatttattagataagacattaatcaatcactcataaaaaataatattttttagataaaagaaagtaaaataa

SEQ ID NO: 404510 - DNA, 337 bp, Cannabis indica
tgacatttttgtagctccgtccctttccggtgactttctggtaacatcgtgcacggatttgacaaacggttggcatgggtgtgatctactcgtcgaggtggtcgttttgatatatactactcctattttcggcgacatttccggtacaccaatttttaccgccaccaattgttaatgtgcaccgcttaggtgaggcttcacaaccccaaattttaaatatagtcatattatatgtcgttggactcattttttaatgtagaatgcgataatgataattatttaaccattttgtggtataggtgagagtaatatgtaagtttggactaaacaattggag

SEQ ID NO: 404511 - DNA, 770 bp, Cannabis indica
tggtcactgtggaaggtaggagtattaattggatcatattcaatgaatttggattcaaccgatctaatccaattatttattagatattgaattttgttatccgatcaaatccaatcgaattaattcatctgatccgatccgatccaattgatgtattgaattggatcggttccaaccattagatgcattgactggattagattggatccatccaattgatgtattctgtggtacattagatggatctcagggtacattagatgggtctcagggtacgttaccattttttaaccctaattacccctagatcaactcccagccctcaaatcaaataactcctccatctaacagcggtcgtacatcatagaatacattccgtaaagtacatcacgggacaaaatcgtatccctaaatatattatgggtaactttctttcacaaaaaaatatattatagataaccagtagtagtacagtgccattccacttctacaagtaagtttaaaattttttaatctctattatgttattataggttttatacttaacaataccaattttgtggagaaaaatgaaaacagattagcctataggatatttaattcaattttatgatattaaacactataaaaaataattacttttagtgataatattttagtcacaatacaaagtttttgtgactaaatgtgacttttaatcataacaaaaaattatttttgattaaaatatagtacttaaatacaagttgtcactattttagttttaatca

SEQ ID NO: 404512 - DNA, 982 bp, Cannabis indica
tgctcaatcaattctggatcactctcttggccaatcattatcctttccaataaattagattgtaatgtaatgttacataacttcccgaccacgaactcaattttcactctggtcatgtcttctgctaactttggagaaatctacttcaagtcatacacttgatctgggcctcttcgactaagtgcatctgccaccacatttgctttgccgggatggtagagaatttcatagtcataatccttgactaactctaaccatcatcgctgcctcatgttcaagtccttctgagtgaagatgtatttcaagctcttatgatcaatataaatttcacacttctcaccatacaagtagtgacgccaaacctttaaagcaaaaaccattgctgcttgttctataacatgagtaggatatcgctactcatattccttcaattgcctataggcataagcgataaccttccctgactatattaaaacacaacccaaaccttgtcttgaagaatatcataacaagtttaattaatagaattgataggaatattgtgataagttgatagtataagtattggggtaattaggagtatgtgggatttgatgtagcgctctagaagtagaagtttcttagtagttaagaaatgaaaagataattattaataataaagtgtttattaatattattatattattataatattaacttttaaaaatcttgtcgttaaagttcaagttcatatacatattataaattatatcagtaaacagtaaacgaacgaaactctcgttctctcccctttgataaaatcttctcccattatatccaatttctttgattttcaacccgaaacctagcgatctaagctccgatagtagcaggatagcaaattctcagagcaaaaaagcttaaggtaaggtttaattttgttttaagtttaaaacaattggtttcatataggggttttgtgaattagaatagttatgaaggt

SEQ ID NO: 404513 - DNA, 562 bp, Cannabis indica
tcctataaaaaccaggctgcttagttagcaacctcctataaaaaaccaggctgcatatttagcaagctcctataaaaaccaggctgcttatttagcaagctcctgtaaaaaccaggctgcttatttagcaatttcctataaaaacaacgctgcttatttcataacctttatagaaaccaaaccgttcacactaccttccaacacatcagctcaccaaggtcaccacgtatgcccgagattgatcattttttaagaatatagacatcatttgctattgatccttgtaatatttcacattaacaaagatgcacaactgactgtttgctaccgtagatgtaggcaaatacaatttgctgaactacgtaaatttgtgtcttatttttatttaaagcagtatacatatatatatatatgatatatgtttatatatttatatatatgatatatgtgtatatttaaagtaatatatttttatattattaaatgtttggctggaacccctaaacatttatattgattttttcatcagtagtattcttaaattaagatttataacatataa

SEQ ID NO: 404514 - DNA, 758 bp, Cannabis indica
tgtgaaatgaaccgattattctaccttaatttgcttaaatggaaagaaatgaagagtcctttatgtcatttcgcaaaagtattttgttttatattatataaaacgttagagaacatttaataagtgtcgtaaccttttacgacaagacaaaggtttatccgttgaaagaaatatataaatataagatagggacaaatattttattttattttatttttgttattatatattattggcaataaatattttattttaagaaaagacattgatggttacacttacacctctctatttatttatatttatgtggcttgtgttaaattagccagcagtctttgtggtcttactcactcttcttcacttcaaattggagtgtagggaggtgaggtggtagtgtagtgtaatgcattgaatttcttatctccacaaacacccaaattttatttcagacctttaataactattaattatgtcgtccatgtatatatgcatttaaatttgtgtgttggaatgttgtttggtaagaagaaaaaataaataacatgaatggagagttagtcacggaaagaattggaaaatgaggagggcaaattgtaaacaaaataatttggaaggctaattactaataatatatctattttttatgtaattaatatatataaaaatataaaaaaaatctagaatgcacatctttaaaagaaatgtaccgattcacttatatctgttttggtattcgaataattttttagtcaattttt

SEQ ID NO: 404515 - DNA, 500 bp, Cannabis indica
tcatcacctgacaagccttttatatcagatataacgactttcccttttccaagaatgggaggaggtggccgagcaagcgaactaggctccctaatgcgaattgcatgtttaataggcctgggcggggccgaaagtttcttcctcctcttgaacggagttgcctgctcttcctcagcttcatcttcaggattcaagggctcttgagcatattgcttggcccttgcacctcctttcaacttagcctcgcgcttcagttgaatcagctcattctttgaatgagctcgttcagcacgtctaacatcaaatttcctctccctccccttcattggcttaggaatgaaatccttcggatagagcccgtacttcataaagttatcctcgaaggtcaattggatgatattctggtcttcccccggcagctgagcaagctcttgagttctttccctaagagtaagagtgaggggagggtggtgatatgttggaatctgctggaaccgagt

SEQ ID NO: 404516 - DNA, 522 bp, Cannabis indica
tatttatttgtattattatgtatggagtaagtttattggggataacaatggcaacgactataagtagaatatggtgatagcaataaatgagatataacgattgacaacgactttaaataattgaggtgtaaataatattgattgttgaaaagagtatttacttaaataataataataataataatctaattttttctctatactaccctatttattttattttatattaataatattttaatagagaaatttataattctatatgtacattattcatataaattttaaacttcttaatagagtaatttacggcataaatacttaagtttaatttccagttgtaaataaatacctaagtttaatttttggcggtaataatgcctaagttatatttctagaactctgtaggtacctaaccgttaaatattaagctattaaatccacgtgtcgttttttattggtatatttgaactattttttttaaataataaaaagttagtgagttggaccaatcagggattg

SEQ ID NO: 404517 - DNA, 636 bp, Cannabis indica
agttttcgtctagtgaccatggtttcattcgaatctcctatgacagtggctgaagatgagctttctgaatccaggatgggggtccatttttatacaatttagcttgttggggttctttggtcagggcactattaacttcatttcctctctctgggtcactggcagtagcttgattgtcacctgatacacctggttctgtatttagagactcagtaggagtgtcaggatacacttgaggcggtctagtgatgactggtctaggtccagagaggacaggggcatcatcctcgacccacacttcttcatgtccttctaagtcatcaaattttacgttcattgattcgaccacagagagagtccttttattgaataccctgtaagcacgattgttgatggagtacccaagaaatgtcccttcatcacttctgggatcaaacttggccaagtgatcacgttcattcagaacataacacgtacatccaaaaatgtgcatgtggctaacgtttggaggtcttcctttccatagctcataagcagttttagaggtgccagtgcgaagatgaactctgttgcacacatagcaggcagtattgacagcttcagcccaaaatcgttttgaaatatccttggcttgca

SEQ ID NO: 404518 - DNA, 765 bp, Cannabis indica
ctctctctctctctcttatagttcatatctcttctctcttcaaacaaaaaaaaccctagcctcctcatcttcaaaccttctcttctcttctcatttggacgacgactaggcttcaatggcttgtggacggtgactcggcttcgacggctcgtgaacggcatgtggcttcgacggctcgtgaacggcgtgatggtatagtcatgaacggtgttttcattatttttttttttgggaagacagtgatgtacgaggcagagataggctttgtctcgcccgtgggtagctcttgaatttgggggttcttagaggtaggaggttgggatttcgcaaaggtgggggtttcgtagaggcaggaggttgggatttcgtagagttgggggttcacagatttgggggcttcttagaagtagatttgtggtttcgtagagtcgtgggttctcaaattttagtgtttcgtaggaggtggtggagctcgattcttgcagctggaaatcgccactgaagaacattggactgttggaattattttaccaggatcttagatctactcacaagtatgttgatttaacaacctaaatatgaacttctaaaatgatagaaaattaaacacataaaagtaagataaatcttacattgggtgcagcggaatatatgtctcctcccactcagatctctaacccttgattcctttctgtcgcatagtataatcaagatctgagcccgaatgtccttctttgttgactcggaattctacacagccttcct

SEQ ID NO: 404519 - DNA, 587 bp, Cannabis indica
atcgagaccggaactctggcccaggcacggtcatatacacagatcaggaccaagacacggacccaaacttggacccagacctagacctaggactttatctaagacccagacatgggcccagactcggactcacatcgggattaaaactcgggacctagatttggaccgagaccctgacccagacctagacttggacccacacccgggatctgaactcaaacctagacccgaacgcagacttagaccaggatcagaacctggacccaaacccagacccagactcggaccaggacttcgactaaaacccagacccggacaataacccgaaccgagacactgaatcgaaatcaaaattgggactaggacccaaacccaaacatggacccaaatcgggacctaggacgcggacctggattggggacttagacatgggcctcagaacccaaactgtaaagcccgcttagttaatttggaaattatcagttaattatgattaattatttatgtgattttagtatggaggggcaaaatggtctttttgccccaatgactttttgtcttttgtgactttatgaaatggaaaataa

SEQ ID NO: 404520 - DNA, 937 bp, Cannabis indica
agaccaggactcgaaccctgacccgaactcaaaccctgacccaaactcaaacccaaactcaaactcagaatcgcaactagaactgaaccgaactaggactaggaccaggaccaggacaaggacctacactgggacacaaacctagactagaattgggacctggaactaaaatcagaattgggacctgggcaacggagctaggactgggacccaagacttgagcccagacccggacttgagcctaggacccaactcgtgacccggcaccaaaaatggaaccagaccagaacgcgagatcagggtctggatcaggacccggggcttggactgaacccgttgtcggtgtttggatctgggacccagccccaaacccaaacctagagcaagaagcaaacccggaccaggacttgaactcattcccaaacccaaaccttgatccaaagccataccctgtgacctgaaattggaacaaaaatcagaagtagaccgagacccgggaccgggaccggaaccaggacttggaactggacctagacccgaaactgtaaccggacaaggacccagttttctacccagacctagatccgaactgggacgcggacctgaatcttaatcaagacctagactcggtgccgaaccttgacccaaacatggaaccagactcgggacacagaattggggccgagacctagaagtgcaccctagtcacggtccggaacgcaaacttagacatgggacccaagacctgaaccagaaccagaaccagaccgagacacgtgatagggatctagatctgggactcaaaccaggaccctaacccaaactaggaccaaaacttggaccctaaccaagacctgagacttgcaactggaacctgaataagaacttccaaacgagaatactcgaacaagactaggaccatgatcacgaccgaaac

SEQ ID NO: 404521 - DNA, 680 bp, Cannabis indica
agctctggatattgagtcctcatctcggactctaattcccaagtgacttcttccaccttaatgttcctccagaggactttgatgaaagcaatagtcttgttccgaagaactttctcctttctatctaggatctgaagaagttgctcttcataggataagtctgactgcagttcaagggcttcgtaaccaaggagatgagtcgggtttgaaacatatttccacaacattgaaatatggaatacatcatggacagccgaacgtgctggtggtaaggctagccgatacgctacctgcccgactttctcaagtatctaaaatggcccaattaacctagggcttaacttaccccgcttcccgaagcgtctaatacccttcataggagaaatccgcaggaaaacatgtttccatgcctgaaatgacacatctgtgcgcttcggatcaacataacttttgtgcctgcattgggaagcaatcatccgagccttgattctgtctatagcttcattggtcctctaaagtaacttcgtacctaagtactacctttctccagtttcgtcccaatgaataggggagagacattttctatcatataacattttatagggagcaatccctattatactttggtagctattgttgtaggaaaattctgttaaaggcaagtacttactccatgaacc

SEQ ID NO: 404522 - DNA, 602 bp, Cannabis indica
tgtttcttgggtgcacgcgcttcggacaaggctcatgttcgagttttatcggtcagaagggttgttttgtctaaattttgggccatgcgcgtgtgggacaccctccttgcagcctcattggctgaggtttaattttattgaatatttaattttattttaataacataaaatttgaaaagttgttagcattttttttttgtaaatagatatttaggtttgttgaaaacctaatttttcaaatttataggtttaattttgaaattaattatttaatttttaattttttttctaatttatttatattattttaatttttcgaaattattaaattaattaattaatttaaaattaaataaatcctatatccaactatccaacttgttacatgcatgtgtgttttatatattgttcaattttgatctaaattgccatagttaacttgttgacaaatccagtgatctgattttaaccaatagttcgattgtcaataagtgaaataaataatttgtaacatgtaaatcttccaatcatctttcatctctgtataaacctagtaacatgataggatccatccaaatctgtatgcctgtgtgagcctatat

SEQ ID NO: 404523 - DNA, 568 bp, Cannabis indica
agcatcccgattaaagggacctcacctatgaaacacctgatttgtacattgtgtatctattttcaaacaattgttgttacatctataaatttctaaaccactccaagtcctttgcctcaacctgtttcggccatatgctatttctatgcttcaccatttctttgactgtacaacttactctatttacatcctcatctttcccattccatatcttgtcattcctagctttccatataaggtacactaggcttgccattacagccgaaagggtgtttttcttgaacttgctgtatttgcttctttcaatccacctcaagagtcttgataaggtttgggtagaaactttccatcccaaccaatccttaatcatctgcaagcaatgttgtgagaacgaacaagagaaaaaaagatgatcacaagtttcttcctgagcattgcatagcacacaacccgaatcattgataataccaaatctatgcaatctctctcttgtccttagcctaccctgaatagcaatccacagaataaagctacattttgggatattaaactttccccaaacttcctt

SEQ ID NO: 404524 - DNA, 741 bp, Cannabis indica
aggccaatgcccatgtggtgactgaagagctgaccaaaacttaatggaccttctcatggctgcatcagctatttcatatttgatgtcctcaacatcctcatccactttcacttgcccaatatcttgcttaaagttactttctcttagcatctaaaaattactcaaaaaataaagaaaaatcaagcattacccaatagtacttcttataaataataacttttgcataaaaatattacatatattaattattaagaatactttgttttactgacatctaataataaatgagtagtgttaattgaattgtgttttttcttttttctttcttgcttttctaatgtctaatagatagtatgtgtgttaggaatgtctttttgtaacccgaatagtctcacaatggatttgggggctatgggactttgcatgtatgttgatcaatttcacaacttcacatgaatggtgaggctatatatctactacactggatgaaaaaacgttgttattatttaattcttgccaaatttattataaggaagaattaaatatagctaagcccgatactttttaagaagaactacaaaaaattgtaaattttagtaataactttttagtcacacaattttttttgactaaatgtgactttttgttacaacaaaatgttacttgcgactaaaacatagtatttagttacaagttgtcattaatttattttagtcacaacaagtattgtgactaaaaata

SEQ ID NO: 404525 - DNA, 523 bp, Cannabis indica
ttgggcccgatgggtccgatttaagtttaggtgaaaagatgggaagagggagttgatgtaattgggggagagtattttggggaaaacaataaagttgtcatatattaaaaatattagtgagtataagtttaggaaaaaaaattaaggtaatgtaagcatagaaattcaaattatttgttttgttgagtattgttatattggataatatcatgcttattgcttaatattttcataagtagcgttttaaaattggttagcaatattttgcaaaatataattttattagggtaaatagtggtataagtacacaaagttttaggtttgtaaatggcataaacccaatgatttcttttagtggcataagtacccaatatttataaaactgtaattttcttccagtttcatcagtacagactctgttattgtcttaaacaggacacatataagaccaaaattttagattatttgctgtggacgaaaaatatgtagtatcaattacttctaaatctttttttaataaatt

SEQ ID NO: 404526 - DNA, 643 bp, Cannabis indica
gaggagtctgagtctgcaattctattaatgaaagttgaggttatattagttagttcaattataaaagggaaatttaattttttatacttacatatacctaatattttttctctaaacacataacatttaatatttgtgggatatagcacattttagaatatccctaaaataccccatttacattaccacctcccctctctcttcttctttatttgttataaacagaaaataattaaaaaaaaaagattaaagtgggcatcgggccagtcatctgaccatcgggccctacatcgggctcttcgggccagtcctattaaaaaaaaaatttaaaaataaagtgggcatctgaccattgggccgaccatcgggccctacatcaggcccattgggccagtcctataaatagattttttttttaaaaaaaaagtccaaaatgggcatcggaccatcgggctctacatcaggcctacatcgggccatgcatcgggccttcatcttcaagctcatatcaaaccagaaaatcagattttcatgcccagaaagatcacagaccctagatctactctatctaaccctatatctaatcaagaatgcacatatccaacctaaatctatcaacaaacaatattttcaccataatcaa

SEQ ID NO: 404527 - DNA, 522 bp, Cannabis indica
aactatttttattatgaagtttggaaggttttgaatgattttgagttttggtagtaggtagctaggtaggtggtagaagtagatagagtaaatgccatatagagtattactggttcaacaatttccatagggatgtactccacatgagccacttgaagtgtaatactatttttatgcttttatcttacaataattttatcaatttaatatatatatatatatatatttatatattgtagaaggtcggtttggttttggttgtgtggctcgcgatttcaacagtaatttggtagaagcttacacgatggaaaagatggggcgggtgcaatctgaaatagctgaaattgttggcatcaaatgtaatatccagtttatatacatatattggtatttggtatattaagtgtgatacaattatattattattattattattattattattattgttgttgttgttgttgttgttgttgtgcgtgtgtgactggaaaaaaaaaatgatatatatatattaaatagtga

SEQ ID NO: 404528 - DNA, 541 bp, Cannabis indica
atatatatatatattagtaggcatgtatgtagaaagaataagaattgttatccacattttgtacaagaccgtacacgtggcgtataatagagaatgcccaattaattctcctctaattgaagtttttttaagccgctcaatcacttaagggtctccctaaaagaagaatcatccagagcggagggacacacggaggcctacttgcgccagcctttgcttcccaaatgagaataagaaatgtatctccaggacccagaaaggtctgatagggaggctcattcgatttactcctaaatacgctctcgaaagacctaaagtggatgtcgaccctcactgggtatcgcaaatatcaaatttttccatacgccaggtcacctaagtgaaggttatgctttttctggtagaatcagatcttgtctcctacatccaagcatggtagtgtgtgcatcaccaccatccttttaccagacaaatactaaagacttctgcttgtaaaggaacaagctttgagtgacacgtgtgttagaaattattttaccag

SEQ ID NO: 404529 - DNA, 574 bp, Cannabis indica
atacactccttattgtccaaactcaacccaaccaattgaagaagaggagaatatactatcacttccagaagagattaatcgcttggcggacatggcaagagctgtatgtgataatttaatggcgcatgattcagagagttttaaggataataactcaaataacgaaagttatgagagttgtttgaatatagtagaagcaccattatatgaatatatagaagagattgagcctataatagaagagaaagaatcctttgaagtggctaaaaatttgggtacaatggaagcttgctcaagaaatgatgatctcaattgggtgaatgaagaaacatccatcctcaattatcaagttattgaagatcaaatcacaatcaaagatgtcgatggtcatgagaaaactgaacaaccaattgagaggttatttgaggaaagtgaaaaagaggtgtcattggtggatgaagaatcacgtgtagttgttaggctattcttatcctaagtttcgggtcacattttatagttgtttttcttctttattattatttttggaatataattacccttgttttctttggtt

SEQ ID NO: 404530 - DNA, 957 bp, Cannabis indica
ttctgtagttgttttgttgctttggtttagttctttatagtctatatagcaggtctagaaagtttggtttgaattggggatgatttggttgagatatggaagttttggtcattcctgcactgaatcggaattctggttcagaggggcatgtaggaaccggaatttcggtttgctcccaggaatcccccagaaccggaattccagttggggaaccggtctaccggttggggcaattttgggaaccctagttttcccctttttgtgttgtttagggtattgccatgttaattatcgatagggaaacttttagtttcaagtttaagtcctcgaaaagtgatttagcgtgtcactcacctattttatgattgatgtgatttaggagcctgtagttcgccgagcagttgttccactcaagttggccgacacacctgaatttggaatcaaggtaagattagtctaatgccatgcatatgcttatacatgtttagtgtacatgttagttgccgtcagaataacatattagatatatgtgaggcaaattttatatagccatcagattagcatatcagggcaacaatgaggtgtacatagagttgcaccgagatgccatcagatatatgctagtctatcagatagtatggattaactgctaccacatcagtgcgaatagagtactgagtataggttgggttcgcagttagtcatacttgtcaagatcgatcctgattcagttagggttatggttaggtgtatgggtgcctgattataacctgggatattagtatgtttattatgttatgcttttcttaccgagtctgtcgactcacagtgctattgctatgtgtaggtaagggcaaggctaaagttgaggagccgtgagagctagcaggtgaagattgtacatgtcggggcagttaggcttggatcgtacgatcctcgggacatcagggcttctgt

SEQ ID NO: 404531 - DNA, 1378 bp, Cannabis indica
ctgtacattcgtggtggtagattgaccaactgcttacaacgcaatccttggccgaccggccctagtagactttggtgcagttacgtccattcgacacttgtgcctgaaattccccacctaggaggctggaataagagccgtgaggggcaatcaaggtgaggccaggcaatgttatcatgtcgcggctcacttgccagtattgatggtccgtgaagggatcgacacagaattggcagaagaagatgagttggatccctgtgtgggatccaaaaaaattgtagaacctatgaaggacgtcgaggaagtgccagtatgcgacctcgatctcaccaaaatcctccggctgggaaagagcctagaactgaaggaaaaagaaaaataattaaagcactaagggcagccacagatgttttctacgtggtgccaaggagacatgaccggcataagtccccatgtaaaaacccacgtccttaacgttaatccagatatgccaccagttcagtagaagagacaccccttgatccagtaaaggcgaaagctctggagaaagaggtggacaagctactagctagtggcatgatcccgaatgtatattacccagaatggctggccaatctagtactggtgcctaaaccaaatgggacatggcgggtgtgtatagattttaccgatctaaacaaggcttgcctaaaagactccttccccctaccccggattgaccaaacggtggacgccacctccggattcaagctattgtccttcatagacgcctatgccggctacaaccaaatcaagatacacattacggatcaagaatgcactagcttcaggactgataaaggggtatagtgctacctggtcatgccttttggactaacaaatattggtgcaacataccaaagaatggtaaaccggatgtttaaaggccttctgggacggaacatggcggggtaactggacgacatgttggtcaaatcaaaggcatatgcaagtcatgaagatgacctcgaggaatgctttgaagtggtccggagatatggaatgaaacttaacccgaagaagtgcactttcagggttaaatcaggaaagtttttgggatttattgtcaatcaacgggggatagaggcaaacctagaaaaaattcaagccctcctgaacatgccttctcccaagaagcacaaaaaacgtccaaaagcctaaccaggaaagttgctcctctgagccaatttatttcccgatccacagacaagtgcattcccttcttcaacattctaaagaaaatgacaaaaaatttgaatggaccgaagaatgcgaggaggcattcagaaaattaaaagaaacacatggccaagcctccaatcctgtcaaaactcgttct

SEQ ID NO: 404532 - DNA, 786 bp, Cannabis indica
aaaaaataaaaaatatgaaaaaaattgcattttgctcggatggtatgcattgcataccatccgcgcgcatgcaagagggggacagagcgtcatttgccgcacaaggaggctgcacgcagcattttcgcgtgcggatgaagggtcttcaaaaaacgtatgtgtgttcctttgaatagacactgtctgaacacgcatgctgaccgagtgatactcggtgtctgcgcgcgtggggtgtcaccaaccctaagatttttccaaatttcaaaaattcataactaattcaaataaaatcgaaattaagttctgtaaaaaatgaattgcttaatgttttccataatatccaataaaaataattctagaatgaaattctaattattttatgtaaaaatttcacagacatcaatcaatcatcaataaacacatagatcaacatgaatcacatccaaatcacacatacatcgttttaaatccatatttcttgaatgtaaataaattaccatggttctgaggccagttgttggaatatcttttaccaggatctagatttactaacaagtatgtttttaacttcctaaatatgaatcttgaaaacgataaaaataaacacataaaaggtatgagaaaccttacattggttgcagtgaaattaaatgactccttctgctcagatctctaacccttgtatcctttctgtcacagagtatcactaaaatctgagcccgaaactccttcagttgtttggattcttctacaatattacattctatgattgaggactaacttgct

SEQ ID NO: 404533 - DNA, 535 bp, Cannabis indica
aactcattttccgtgtcatagaagtataattggagattagaaggatgaccgtaagaaggaagcaaatctatgatgttgtggtagatttttccttgggctctaaaagtgtatattcacttattcgtttggcagagattttgatcatatttaacacccaacgatgtgaatgcaaattggttgttataagttcgaatatatgttcgaaaatgtgcagaatcacttgtgttggaggttaataatgcgtaaagttcattaggaacttcatttgtggccagatatatttttccatctgcacaacagaatccatttgtttcatggataaatctttttgctttccaatgtatgcatatgggaaccgacagaagtgaaaatgctttagacgtcacattttgtagcaattctcgaaatcgtgtgaccctattttgcaattgacctatcataatgaaaggtttaattaggtcaaattagcaaactgatattttgttattataaatattttacttaattatttatttcttgaatttaatacatttaa

SEQ ID NO: 404534 - DNA, 731 bp, Cannabis indica
ttagagtaataataatgaattataggtacctcatgagtagacaagtaagcctcccggagaacatccaagtttccagcacattcaaagctaaagtccactcctcctccactaatctctctaattttctgcaataatacacataacaaatcaattaatataatttattattttattaattaatttcacgatgaaatatgtaatcaattagccattcgattaacaaattgaaattaataaaaaaaaattagttaaataatttaagttgtgcttagaagttgaaattttttgtgaggaaaaaaaataaaataagtaaaattcagtttctaaatactcttaaaagagaagaagaatataaaaacctcatgcagaggcttttccaactcaattgggtttacgaaatccgtcatccccattgcttcacctaatatgtacaccattatagaagaaaaaaattacaatttatttatataaatattacaaatacttatatatataatgactctaaaaatattcactatccaatcatttataaatgagtgttattaccttctattacaatttctttttaattaatttttgcgtccaaaattatatattagaatattattttatagaggtatttgttataattacagtattatttttgtaaatttttaatttttttttgaataatttacagtactgaaaacaaaatttctgatattttaatttaccacgcgtgtttaaaaaac

SEQ ID NO: 404535 - DNA, 537 bp, Cannabis indica
aactgtgtagtcccatacatacacagtctcagaattatcacacttaaccttccctaggcgatgtgggattgcacaactcccggtcttttctcttgtggatcacaagactgtctgtcacaatcactccccctttgagggtccgatatccttgtcaaccacacttctggctgggtaaaaactctgatactatttgtaatgtcctcacttcaagcctccattaggccttcccccacgacctaattgactcttatacatgggtacatcactcttggtttttcatggaatggtgactgactctatagaccaacacgagtctttccagtgtactttgtcctcacgcacccgcttcttgggaaaacttcctaagatgtcatccatcttgaaattatcccaggttaagcacacttaactttgaagttctttcaagatgtgatatcaaaaagaagatgcatcttgttaatatagatattattattcaatccatttaagtcatcttcaactgtgtagttccatgcctacacagtctcaaaattatca

SEQ ID NO: 404536 - DNA, 742 bp, Cannabis indica
tttcttaataattttttaaaatatcaccttttcttttaaagaattttgactgatatactgtatttttgcatttattacttttatactatcacacgacagtaataacatttttactatatcattttatactcactacaaaaaattactatttttaatgataatttttagtcacaacaaaatgttacttgtgactaaaacatagtatttagttataagttttcactaatttagttttagtcatagcaagtatattgtgactaaaaatatatttagtcacaataaattgtaatttttgtgactaatacctttagccacgaacattttagtcacaacatatgaataataatttataattagtcgcatttttttaacttttagtcacaaattttgttgtgactaaaagtaagattttttgtagtgactatctttttcaaacgatataaaacttcaattttctcctgtaatgatacttgttttattgcattctttttttttttcaattaataatagcatgtttacttaaagagaatgggaatgaatgatatggtattgattcccatacaattatttattaaattttagaaagggaaaaactagtgggagccacacaaattaaggagaaaacaaagggaaaggttctcccccatttttatagggaatgcatttccctttccttacttaatttattttaattttaattttattaattaaaaataaaaaagacaaatatatcccttaaaaa

SEQ ID NO: 404537 - DNA, 764 bp, Cannabis indica
tcgccatcaaggcaccaacacctcgagatccctgtacctcgcgacatcgccccaaaaaggagaaacgaggcaactctgtgagcccgaaatcccaaactcatcattatgaagtcagattcacaacttcatatttttacttttctgacaaggtgaattactcaaaaactgagtagttttgagtctctcgttccgagaactggtgaccagctttgtcaaaacacagaaatagaataagtgatgtcaaaatatcacttaggcataaaaaaaatccccgataggttttcccactcacccagcatctaggttgacatcacatgtgaacctaggcactggatgtcaacctgggcattgggatgtcaacttgggtgctaggcctggaacaaccttcaattaaatggtcataactcactcaatattgatctgattgatgcgattgaacttgcatttcaaagctattttaatgctctatcatgtcatgtctcacacttcaatcgcaattctgaagttatcgactccaaatttcaccccaagagagtacaaatttaaggtgcgacttactcggggtgggtccccccagcgcgactcaagcttcgaaaattgacaatcaacctttgaagttaattttcaccgttagatcatcatctacgatcaaaaatagcctaaatgcattttctatatttttttggattattttatttcacaattaataagacctccttcacctataaaaaagagagctctactagctcattttttaagttcag

SEQ ID NO: 404538 - DNA, 859 bp, Cannabis indica
ttgaaataccattgctgcgcggcctccaacagagttgcggggaagattctgcaacatacgtctcctcgcactccttgtaaatccatatgcatctcgaaatacttgagatgagagagaggatcttctctcccagtgtacctcttccacgttgtcatcttgaacttgtgaggtagtagtaggaggttgatttctggcaagaaaggagttccgcgtgcgcggtctaactcaagatcattgttacgctgcccggccatgccatgaaacatattcttcagtttgtcaagctgggcttgtacggctgggctgacttcattggcattctggtcgggttgggctacgtcagcatctttctgagcgggaatttgagtatgggcttcggattgcacattcgtcgtagtattctgctcgtcttctccccttcttctgtttaggtcgtcccttaggtcacggggtgttcccaacctttcaaacacagaagaacttggctgccttagcggttggttcgcttggttggctccattattttgagtggatccatcgagcatgactcctcctgatgaattcccggacaaggtctgtccgcctacctcttggcccacgagtggaactcgtgaccgggaactggacggctgaccgctgtttgtctgggaagcattcaccgttgggtgatcctcgacttctcaaggggaatgacgctcggtgcctgctggctgacagtctaataggctctccgtatcagcacagtagcttgtcgactatgatcttcagttctgcatggtgagcccttaatgcctccatctctttatctctccactcagcgaacatacgcctctgttcgtcaaacgcgaggtttactgcg

SEQ ID NO: 404539 - DNA, 1118 bp, Cannabis indica
aacttttgaaaaaaaaaaaatctgaacgaaactaaaataacctttgatttcggctagtgaaaaaacatatgattttcatgtatcaaaataatcattttaaatagtagattataatggtgtagtttttgagactaaataattattagtgtagccgaaaaaaaaaaatttaaataataaaaaagtgaggaaagagaaaatattttgaatctaaatatttataatatatatgtagagtaaaaaaaaataggttagttcacaaaaaagaacaaataaaattaaacataatataaaaaagataatttgatgcacatcacattagtactccctgacgtcatcaaattccctcatcaatcccttcaccttaatcccttcagcatgtttaatagcccatctaatatagtttaaattaaagagaaggtatcaaatgtcgtttatatcaataattagacacatcaagttattattagaattaaatggataaacacgtattcacatgtaaatttcccaaaattaaatggttcaaattcaataaaaaaaataccctcctcagtatgataccgttattagtgtaactaagtatcgagtctcatatactattggtgtccaataactagggttgtacataaatttttgtaaaccgtccaaaccaaataatctcgccaaaccaaattgagaaacccgacaaaaatgcaaaccgaaaaacctgacaaaaatataactcgcacaatctttatattggacgggttgaaaataatatcaacccgaactaactcgatcaacccgattatgagggatttttatatatttttttataagtttttattatatatatttatagattatataatttatatgactatttaaaaaatacaaaattgaaactaatatatattttttttattatggtttatttaattttttttttttgaaataggttgaaattcaatctgtatatatatttgtcttattattacaattaattaagatataacaattgaatgtaaaaataaaaagaaaaatattagtagtcggtttggacaggctaacccgaccaaatcaagcaatttcattgggcgggttaatattttcttttttcttaattgggcgggttgcactta

SEQ ID NO: 404540 - DNA, 563 bp, Cannabis indica
tataactctaaagtgaatattttgatatttgagaaacatattgtttttttactttcattgaaaaagttgagcaaatattaaaggatttttttagttttaaccaaaaaaggtaacaatattataaaaatactttcaactagccaaataaaaaaacattatacaaatatctcttacacacactttcaactcacgattcatgcttcctggacaactatctgaaaaccgcacaacaacccaatgcaaccgaaacgaaagtccaactagaaagagaaccaccattaattctggtgacttcacctgagaagatgaccagaatcaatcaaaacaggagttgtttcgaattcatgaaaaaagatgcagaaaaactactactaaactaaaattcaaccaaaaattcagtttaattcacataaaactaatgtcctgactttaatttttagattcatgaaatgcatatctcaaagagttgaactagagtccccaaacaatctaactcatcaagtataatccaaaaaaattacatcaatactatgtaaaaatgtttatcctggtgtattttcgtt

SEQ ID NO: 404541 - DNA, 415 bp, Cannabis indica
atgatagaattttttaataattaaaaaacaaatatataattttattaggtttctcttaaaatcaatttaagtagctattatttaatgaatattattttgaattttaaaatttatgtatgataatctaaaattacatatttttattaattttcatgagtaagtttttataaaaaatatatgaataaatttataataagtttagaatatattaccaaaattaaaatttaaaataatgataaaaaaaatctcacctatatgggattatttatccccccatgctggtaggataaataatttcagacacatgagattagttaagttattcagactttcattatgcctaaacactagactgaacaaattagcgtgtctaattcagtctaattctacgtaccaaacaagtcccaaaactagt

SEQ ID NO: 404542 - DNA, 745 bp, Cannabis indica
ctttcatttttacttgaaacaccataaacctttctatgattccataactatcttcgtcttcattgaaccttctatctctatactattttatctcaattcaattacctttaacttatatatatacattatctaaaaatatacatacatcatatatatactattttaccttctatctctttcaaaaacttatatatagatatacattggaaaatttaattttttatccttgggggaaatttttccattaaacctaaaataccttatattggtaaaataagataatatttacttaattcgcacattacctctctcattcaaatctgactcctctctctttcccctctctttttctctttctctctctatctcgcaccctcaactgcacgcacatcggacacagacggagaccgcccacacttgtccacgcaagctgcccacacccgaccgcctccaccgtccacgcagccgaccgcccccaccattgggcccatcgatcccaatgttgcgatattttgcacacgcaagtgtacgtatcgtttcaagtagtaaactcaccaggagtgaggtcgatctcacagggagtgcagttaagtacgttaaaattaaacctttacttctatttggttgaataaaaattaagaaagaattaaaaataagaaactagtaagaagcaattattcaagaaaattgatagttaataaaaattagggcttcgatttcaattgtttctattgattatggccta

SEQ ID NO: 404543 - DNA, 608 bp, Cannabis indica
atataaatttttactcttttttattgtttagtaataataattctatgaattgattatattttgaatcgattatatatattctgattgtttatttgtattttgggttggaaagtcttgtgttaacattaatttaagactttgaatctttttatttttgtttgtttttcaaaagaattaaattaagactttatatttgtccaatattcgatcggatgtcaaaaaatattaggatatattttatagagggataacatgggaagttgacttttgattcgtccttatccttaaaaagtgttgagttttgatgttaagacacgtgtatgcacatggttggactgaaaagaacaagctcacgtggtcttggtttcattacttattattatttatttttagaaatggtaaaaagttcacatgtaaaactttttcggtattatattattattggtataattaaatattaaatttaggatatgattttgtctcgttgttgtactttcacggattgtaatccgtgatgtacgacaaccgtcagatgagagagttatttgatctgacggctgagattgatttatggtataattaaggggttaaaaaagtaggtaaacgta

SEQ ID NO: 404544 - DNA, 845 bp, Cannabis indica
aagaaaatatcaaaggaataagatagaaaaaagattaaaaaaaaaagcctcacaaaaaatgatacataaaatagagaaaattgtgcaagaaaataaagctgaaacttcaagcctatattaggctatgtttgatccaattttgtagaaagtcaaagcataaaagttctagtatctctcttttatcttaccagaacatcttcaatcgtctaaatttgagtaatatcgagagagttatgacaaaaatactatcagtcaacgtagtagaaaacttactgccccttctaatcctaagcagaataggattttttaatattttttattttttttatcattttttggctataaaataagtgaacttcaataattttcaagaagcaattcagaaagaaatcagagcaatcaaccgagtacgaattttggaaatcgaagccaatacttaaggcatttttcagagggttttcagcattctcttcttatatattttcttctcttttttaaaatatatgtgtgaatttgctacaatgaacatgagtagctaaacagttaattagggtctagatagagattgtttgatattgatttatggttctaatatgattttattttccctcaatttctatatattttattttatttgtactaattaattacttttaattatctggccatcaattaattgctttatgattttgatgcgagatctaagaagtgagtgtcaattatatgctatactgaaatagaactaaattttgatataggacaaaagtacttatatattttagataacttataaggttttcgtgtttaatgactattacatatataattgtgacagtcagtagtcc

SEQ ID NO: 404545 - DNA, 508 bp, Cannabis indica
ttctttacttagtcaatttttgatttattttgtgattttaggctgactcgctctttttattatcgcagatagaccagctcgacctacacttgacgcgactcgcatagagactgctgaagttctcgggagccttcccgtacaagatcgcgactggcgattattgtgcacgacttcaaagctgcgggaacacaagttgattccagagaacgcgagtcttcagagagagccagtgtacaaggaaccacctgaaaaacaacaagagcgaatagacaaatgcctctccaaacaaacttctcgaccaacattaggtagcatatcgcatgcataaactagtgcattaaaatcttactattattggtacttattattattttttgttgttgttgctgtcgcagaaatgactttcttgaaattcgcgcccatccttaaccgcaagccaaaatctgggacagcggcaacttcccctatcgttcctcaaaagaggaagagcgatgtggtggtcacccct

SEQ ID NO: 404546 - DNA, 970 bp, Cannabis indica
gtgataaaagtagtttcttattatctatacaaatatttcttgtaattattttttaatattttctcaaatattccttttggcttttcatgcaaaccaaaagtgcaaatgagttttatattatataactaattaagaaattaatcattaaatattgataatatttttttaataaaaaatcagttgattttataattactctctctatagtacaaccgttcatcttaattttttttccttcttcatttcttattaatatttatttggtgaataaagcataaatatttaaaaggcttaattagtacactttgagcactattaagtaatttacctttctttggattaataattatacattttctctataaattcaaataaataataaaagaaagtttggttacaaatagaaaaatgaaatctttagcaaaaagcttctttcttttatcaatattattactttaatagattagtaaaaaaaaaagtaatattttctttttgaacaaataataaaataaaagtgatattgtaagacaatctgtagctatgaagttaaaccatttaatttcaatttcaaatatgtgttaccatcgcctctataataagtttttaattttcgaatataagtacatgtatacggataactaattttgtattttataatattatattaaattgtgttatatttttatttaatattatatttgatatatttataaattacatatgtatacctatatatacacataaaatatttcgatataaataaaaagaaaattaatattatataaaaatatgatacaacacaattaatatataggcttattaggaatttttccctgaattttgacatgtaccaaatcgtgcttctgaatttttttagctgttaaaaattctccccgaactattgagatttttaaatttaaggacttttgtttaatttcattcaattttactgtttcagtgattgtttatg

SEQ ID NO: 404547 - DNA, 784 bp, Cannabis indica
cttcgagttgatcaactgtgggtgcttgattgccttgaggtcacacttgcttcctcacgctctgttctttccccctgagtgtggttgtcgtatttcccccattagggtctgtacaaatccttgctctatgggtttcggaagaacgttggtgattccctgcaggtgaccttcgttctccaggctaattcccaagatcctccttattttaatgaggaatttctcatccgtcagcatctggttgcctcccattgtcattttcgtgtgagggttctggctgatcattctaattttcaagggacatctcattttccctgggttgttcttcctgggcattttcctatctcatggttcgtgagtcaggcctcgtggtcttctcactccaagctctggttgattttgagcattagtcccctgtgctgccctagccgcggttgcatcatgctctaattcagtgtttcgctgatgcgcctcttcgagatagcgtctaaggcagcggttttctgtttcataagtatcctctcccataggatgagtacctacctgattgggctcttcatccctcgtcccagggttctggccacttccacgctaagttttcctcgagcgtgttcttcgcgtactaggatgaatgtcaacttgggtcctttgggaacgtgtggttcaagtgttggggccaccttcaagttgagtcctcctggaacaggtggtctgtctggactgcaggttagtagaccttctagagcccatgggctctttcccaagatgatgatgagtttcctcatgt

SEQ ID NO: 404548 - DNA, 528 bp, Cannabis indica
aataatggacgcccagcgaaacattataggacatggtgaaatggatgagaccaaaggtggtcggggtggtagaaatccgcaaaacccccatggacgcagtaaaggctgaggtcgtgctcctagagatggccaagagaatccaccccaagctccatttgattgggagccgaggtttgctgagatgcgtgccagaattactaagcaagaagaagagtactaagcaagaagaagagattcgaagactgaggcagcgggatgctcctgttgagcctcccctacaaccacctgctgctatggctcccgcagtgccaactgaacaactttatatgtgtttaaattctattgttttagaaattcatatttaggatgttaaacaatatacatggtagtaaatcttgatcctggtaaaataatccccaacacttgacatctgataaagagaagtttgtggtttactgagatgcatctagacagggtttggggtgtattttgatgcaagccaattaggtcatcacttatgcctcccgt

SEQ ID NO: 404549 - DNA, 1046 bp, Cannabis indica
ttggatatccgattacacatttatattttaatatttaacataaagatatgaagaaaatacgtaaaaattaaatatcacccttcatataagtttaatactccatgaacatacaatcgttacaatgaaatgtaactaaaaattttaaataattaaaacaacaacatttctaagtaataaaatagaaaaaaacatcatgaaaataaatactcaaaacaatcaagtgttacaaattcaacacacaaaaatctaataaaaatataattaatatataatatgttttttttaatatttttatacaatataaataattttttaatatatatacacatgtaattggattggatcagtttttaattggattttgagattgacatccaatgaccgatccaatccaattagaatttaacttttagcatccaattcaatttaattgtaatcagatatctaatttttttgtaattggatatccaattttttgtaattggattaaattggatgttgcccatgcctagattgaaccacttatagatcctaaagagaaagtatttattcttgattgaaaatttgcataatcctcgatagttaatgttcataagaaacgatctatcttttttctttataattaacattgaacctttccaaggtgacacactagatcggataaaccctatagcgagataagcgtctcgctattagttgtttgggttcgcctgactgttatacttagtttgtatattatacgctaagtgttttcacagtcattatgcatcgcttatgccttcccagccgtaacaaagttaatgtctcgccttgtgcatctaatgccgtctagtttcttgttaatacatgaggtaacaatttgtatatctttatctcacatgggaccttatagtcagcaagttgcaaatatactctgtcacttctgcatttaatgagttatttcattaaatgtaactactgttacatgcatcgatccatattctccttaacttgacacgtgtcctccattgaaatggtagccaaatttcggaacaattgccccttaa

SEQ ID NO: 404550 - DNA, 554 bp, Cannabis indica
agagaagagaaatgtgaaaaaataacaaaaaatcagctccatcagatgagctactgtatctcaaattttaaagaatgttatgtaaggcttcttttactataaaaaatcttacttttagccacaataaaacttatgaataaaagtgaaaaagtgatgactaattataaataatcattcttatagatagtcactaaaagatccgtgactaaatgtagttttagtccaacaagtgactaaaactaaattagtcataacttgtatccaaatattatgttttagtcacaagtaacttttagatacaaaaaattatattataattataaggttgttactaaaagtaatttttttttagtgtctgttagaattgttattgtggactaatataatcataaatttgatatcataaacacaatcattaactatgtgcctaatatttattttctaccataatggaatggttaataattatatgttatgttaggggcacatgagagcacccttaaaactataattggcttattaaattatagtataccattattgaactacttaag

SEQ ID NO: 404551 - DNA, 944 bp, Cannabis indica
cagcatctcttcctttctccacttgcgacatcagcgttaagagtacgattactatactttgaaatttccacgtgtaatcctttaccccaatcggctagaattgtactgcattgtgatattttctcagttatactgctgccaatatagaaatcccaggtatctttgacaatttgagtgcaaattggttcccttagccaggcgttttcgaatctgaacgttttgtgagcagtaataaaatcatcattccaagggacaagtaataaggggcaatgatatgagctagaccattccaaattgagaagctttgccgagttaaagagattcatccatctttggttaacaagtgctctgtcaagcctaacttctatccagttgttggtgccacgacccttctcccaggtatattgatatccagtaagtgcaaaatcattgagatggcagtcggcaagagcttgattgaatccattaatgagccagtcagggtaagcatttccaccttttttgtcttcttggcttgtgacattgttgagatcaccaatgacacaccatgggaggtcatatttcacagataaatttctcagcagtgtccaagtttgtaccctgttattcctattcggttctccataacaacccgtgagacgccatgtaggcttatccccagcgtgaacactaacatcgatatggtggttcgaatactctagaacttgaatctcatctctgactttccaaagcaaggcaagtcctccacttcgtcctacggcatcaacagataacaggccttcaaagcccaaggaaactttcaatctttcaagagaatcatgtttgcaaagtgtctcacataagaaaacatatttgggccgcttatggatcactaaatccttaaggaattgtaaggcccgtgggttcccaagcccacggcaattccaactaacggatactcatga

SEQ ID NO: 404552 - DNA, 715 bp, Cannabis indica
ttgtgtgttaaatctcttgacttctgtggattaagtttcgagaataattcatggattgtttcaagctttaatttgattactcatttgatatttgtggttggttgctgttggaaattaggtgtgagtattgggttttagctcaaagttctaaagtttgaatattgcaagtttaaagcatgagtttgtgtgtcatgcaatctgaattcttggtttagtttgggattttgatgtttgaaatatattagttgtgcatctattaacttgctagtgatcctaattgttatattgtgagtttggtattgaatttggggtgaaaagagtgaagttcttgctgaaaattcgaagtagagctactagttttctgggttctgcacccagatgccgcgacacgctctagagcataccgcgggccgctcctttgagtggacctgggaattggtcccaggtgccgcggcatggtctgggcatgtcgcggcccgccctcgtgtttttgggcagtttcgagttgattttcgaaagttcgtaacttttgaatccgaactccgatttgggagttctttatatcattgcaaagctcgttccgagatctgtatgattatctgaattttaaatgccatgattgaattttatgagtatggaatcaggggttaaccctaagtgtgaaaaatcgcgggtttgtgtgactaggattaccggcacctgatcaggagcaccc

SEQ ID NO: 404553 - DNA, 673 bp, Cannabis indica
gagagagagaaagagagaaaagtagattttgagttttatattttgagagtttatgggctgctgtaaatcgttttcttgattctatatcctctcatagagcttttgaaatgtgattaagaggtctggaatcaaatagttcgaaaatcaccattatttacgttcgaagatacggttcttgaaacggacttgaatttgaacgtgtttaagttgtttcggagatcaaaggaggttttctttaagtttatgggaccccaataatcaattttgacgtaaagaaacggggtaaaaggctctgaaacgaaaaatcacaattttggacaccatttttgccggtgtaccgtgtttggagaagacgatctcaaaccggctatttcgagacaaaatatcagtggtatttggctcctatgaggttctgagatccttgggaatattttccaaccgaaaagacgcatggaaacgggctgtagaaagactttggagtcgccggcgtcagagaagacaattacgccggtgtaactctggcgaccacgatctgggcatatctgaggtgtttttcccatatttttttttgtagaattcgattctacatattattttacggtgtttggtaaagtttcataattttcttacaattatttgatttatttgtcaaattaattaggaaaaatactta

SEQ ID NO: 404554 - DNA, 802 bp, Cannabis indica
cacatggccaaacctccaatcttatcgaaaccagttctcggagaggacttgttcctatacgtggttgtcaccgagaatgcggttagcgcggccctagtacgggaagaggaaaaaactcagcacctagtgtactatgtcagtaagcgcatgataggagcggagacgcgatacccggtgatcgagaaactagttttttgcctcctaatggcctcgagaaagctgagaccatacttccaagctcacccaatcaaagtattaaccaaccacccgctccggcaagtccttcaatagctagaggcgtctggaagacttctcaaatgggcaatgcagctaagccaatttgatttacactacatcccacgcacttccataaaagggcaggcgctaccaaacttcatcacggagtgccatgaagcagaagctaccgcaagcataaccacaccgcaagtcccagcgtggaaggtatttgtggatggcgcctccaatgagaataggcccggagtaggggtcgcgatgatatccccgaacggacttcgactccaggcagccctacagtttgaattcacagcttctaacaatgaggccgaatacgaagccatgatagcaggactcaaattggcaaaaactgtgggggccaaaagagttgaagtctacagcgattcgcaactggtagtaaaccatgtgtcgagagaatatcagacgcgcggagaaaagatggccgcatatgtggcaatagtctgggaactactccacgagttcacggactacaaagtagaaagaatccccaaggaaaagaacgctc

SEQ ID NO: 404555 - DNA, 649 bp, Cannabis indica
gtatattaacacgtaataaataagatacaccactcatttactcttttaatgtattatatgattgagataaacaatgtaggataaaaattttaaaaaaatcgaataaatgaaaagggctaagtagtaccaaaaagaaagaaagaaaaaaaaatataagaaattgtaaacaaagatataaatataaataaataataagagtgtgaattattatgtaagaatgtaatatctataaatattaatactataagtataattgtaaaattatctacaaagttttaatatgttgactttttaaataaataattgatgacataagagatagtggtaaaagtataggtgtaaatagagatatatttgtctttaaaaataacacaatattaaattaaaagctatatttatttttacaaacatcatcccattaaaagatttttgtaatagtaagataaaattatatctttacaaacatcactcctattaaaagatttttacaatagtgagataagataaaaattataataataaagacaaaataaattatttatcataaaattaaataataaagataaaatagtccaaatttaatatagatactatttgttaggctatttttagcatatattttagatcgattttatgtgcgtttttcact

SEQ ID NO: 404556 - DNA, 500 bp, Cannabis indica
gttataaagattgtagcagcaacttggcctgattttacacctattgtggtatgagtgtaaaattttcaatggttacttgtatcacaaaaatttgaatatatctacggacaactcctttgcaattttaatcttcttgtataaatttggactttttgaagttctcaagaacactatattcgaataaacttaactggactacaatacgatgcacaacacaaccctgtttaagttagcagatttataaattttttcaatctttgttgatgtgtagccatatgtgatgtacgaaaaatatttagaatgcacaaactataaattaagttttatattttacatgattatttattattatttatataatataatgatatttggttatattactataatttgtatatctatcgtgtatgattttaataaacgcaaaccctagattttgggaatttctaattgaacttggaaaaaaatttggtatttttgttatagaatactatcacttt

SEQ ID NO: 404557 - DNA, 530 bp, Cannabis indica
aaatggaacattaattaaaaataaatttaataaagagagaaagagaacaaaaataaataaaaaatttattgagaatatataaatttgatttggcatattttccaagcgtctgaatgaaagtaaagacacttattaaatataatataaagctatggagattgtttaattaaggttaagtttgtagatatttttgctagaggaaagtcattatgttaagataaacaatttggatccttcgaatatattatctgatagcttgttgcaataatcatattctgatatgaccttgcataatgcatttgttgtctttgattttacccaagatacgtggaccaaaaaatcttaacactcaaattattagctaagtctttataaaggctggtgtcttccgggagctacctcccggataaggcatacggagtcccctatgctctcggaggcctaagcggtatcaaagcatctccgcgaggtgtcaggcttcccctgagcagtcatctcgcatttgatgccgcatgggaggaaacgtgttg

SEQ ID NO: 404558 - DNA, 838 bp, Cannabis indica
gtggtatacaacttgaatcaccatcacaacaagaagttaatgatttgattcgaagtcatgaagtcaaaaattcatcccttgaagagtcatctccaccaaaagttgaatctcttactttagttggtccaccatcactgaaaaagccatacaaactaattgtaccaacttatgtcactcctccaccttttccaagtagattgaaaaaatctaagaaagaggagcccatcaaggagattcttgaaactcttccaaaagttgaggtaaaaatttcatgtcttgagaaaatcaaagaagaacctcattgtgctaacactcttaagaagttgtgtccaaatgagaaaaagttaaatagtggtgagaaaataagggtgggggggggaggaatgtttctgctgttctccaaaggaagttgttgcctaagccaagtacaatttaatgcacaattggtaacaccaggtttgatcattgcatgatagatttaggagcaattattaatattgtgtcttattctaattttacttctttaaatcttggtccattaagagaaactcaggttttaatccaattgactaatcaaactaatgctttttctttgaggatagttgaagatatttttgtgcaggctaatagatttctcattccagatgattgctacataattgagatagaagatgagggtgatcccaatcctacacaactctatttggaagacccttcttactcactgcgacaaagaagttggatacaaaagcatggatacttagaatggaatttgacggtgaaacactcaaattcaatgtgttagatttccattgataggtacataaggaatgagtct

SEQ ID NO: 404559 - DNA, 690 bp, Cannabis indica
agaatttctctcccttttgattcgtcaaaaagggtgtcaaggaattcacaaaataaagacagaaaaataaagcaacacatattatgcattagaaactaaaagagtcaaacttataacataaaaaaaacaaaaaaataacatccaacaacacaaaaaaaaaattaacacctcacacataaagtcaaaagacactaagccttttcatagaaactaaaagatagaaacatgagtaaagatgctaaaaaatgcaagaaaactagtttggtgaatgtccaaattgatccatgtatgccctccattgtgccattgattcttgaacatttgcaatcccatggaccatgtcactcctcatggtgttgatgtcattgttgaggttggtgaattgagagttgatgtcatttctcaaggtttaaaattgagtggcaacagaggtgtgaaggcgagcaaaagtctcctcaatgttgaaatggggaaagtgaggcatgggaggcgcttgaggatgcacttcttcttcttcttcactctcacttgcgggcaagttaatatcatcatcttggtcttcatatcactattttctaagtcaatttgcattcgttgtcctcttgttgctgtcaaaacccatacattattagtaaaagtgtaacccacaaccttgaaagttttggatcctaaaatgtcactagaggtggg

SEQ ID NO: 404560 - DNA, 1276 bp, Cannabis indica
atgttggacgagttccaattgttgacaacgaattggttgaacttagatgataagctgttgaaaacaaaatgaactctttgctctccagataaaacaattcccagcatagctactttctagaatttgatgttcatcatgagcaagtgtgaagtgatactttgaccaggagtcatcttcacactttggagttcattcctaaaggcatattcttgatgaggattggggtgtgggttgtacattttgacactacaaatatcaataaacaaaaataaatcattggttcaacaaattcatgtacaagtttagaaaataacaattaaagcaaatatgtttgtaatattaccaaaaactaaacatatttattattttctaaggtttccaacataatgaaatacagtgtcccagtaggtgagagtcaaagataacatcagttgaatagagtagtcagctcatctaaaatggacaccattttagcaaccttttattcgatcaaaataagaagccaacgttttcccggtaggtgagagtcaaggttactctcattttatgagcttccaccattgtttcatattttgtaagtttatttctaagtagtcaccgtaggggagagtctaagaaaaacaaaacttacaaaatacttatcatatgagatcttacggtgttaagtgctttcaacgaataaccattcataagggggatgaagtctagcgtctcgaggttatattcaaaataattaaccattgtaagaccaacaatagagatcgaatatctctttgattaaacctcattatttaaaataatgtatttttaattaatcatttattttaatttatatattttaataatgaaaattacttaatttaagttgatccaaaattaatttttaattaatttttaactttaatttaattttccaacaataattttgaaaatatatttgtaaatgaatataaaattttgaaattatataaaatataatataataaatttctgaaaaatatctaatttaagttgttataaataacaaaaatttcaacttaaataattttctaaaattttattaagtatcaaattaagtatcttcaactaatcaccttaatttgaaaaatatccctatctaagttgatccaaaattaacaaattttcaacttaaaaaatattttaaagaatatctgaataactaatttctagaagattctatttaattattaatttcaaaatattctaatttaatttgattcaaaattagtttgaaaaactaattttcaacttaaat

SEQ ID NO: 404561 - DNA, 1242 bp, Cannabis indica
agttttcaggagttgaagcaaccgttgataaaatctcctgtgttggctttgccatcagatcgagaaaagttcgttgtttatagtggtacatccagacagggtttgggacactactgcaaaaatgactttttgcttcagttgtaaaatgatacaaaaactttttgtgtcggttgtgtaaaccgacgtaataacagcagacgcaaatagtcaagttatttgcttcatttctaaaccgacgcaaactttcaaccgaagcaaaaagtactctacattagcgtcagttttggaatgaagcaaaaaacttagcttcaaattataaccgaagctaattagattattgtgtcggttacaacttgacacataagtttacataattttttttaactttttgtgtcggccataaagtgacgcattgcggtaggtaggggaaaattacatatttctttgtaacactgcctggcctccccctaatttcctctcacggttcctatcccagcctcatgagtagggaatttcagacacaagtgcctgatcgacgtgaatgcaccgaaatccaccagggtcggtcggccgaggattgcgttgtaagtcgttgggcagcccaccatcataaatgtccagtacttaaaggtgctttggggtgtgtctgggcacaaggtgactgggagcctcacttttcccatcggcataagtgttgttccattgaacccggtgagctgagaatcgcttggtgagaggtcccggtccgtgaggcctattgccgtgaagacttctttaaacagtagttcacagaactcccattgtcgattaagattctggccacaatcttgttggcgatgagagtttctatgaccagagggtcatggtgaggaaaatgcactgtcttagcgtcctcttccgtgaacgtaatgggctgatccattagtcggggcctttgagccgcaagttgagtaacttcccaaatctcactgtgttttacggcccctgcgtaacgtttcagctcctttcgggtagtccctccgatatggggtcctccggagatcgtagctactctcctgttgggtcttagtggcaggccaagaatttgctgagttttgcccgagggagcgattggtgctaatgctccagttgcaccccctggtactccttggggcaaaggtcctactgcttgaaccgggttgagatgaggcaaccgattcttgatccattcgtaaagatgacccaatcgaatcaagttttcga

SEQ ID NO: 404562 - DNA, 686 bp, Cannabis indica
caattgcacgattattataaacaaaggatgaacttcactaagaataacaaaagcattcaaacccaggattaaaggctacccggtcagctagttgtttgaaaaatgaaaaatatattccaagtttaaagaccgcttggccggtcaccttctcttaaaaaaggccttatggccgaacagatataaaaaagagatagtaaaaggaaagaaattaagcggcaggagtcccaggctctttgtatgggtcagctaggtttgaaggggcctgagaaccgtcattctgagcgaaaggagcctcaacattctgatcagtaggtgaggtggaagtggtttcgtcgggctccccgtaggccgcctgagaaccgcagtagtcgagaaacatgtctttggaagcgcccatgtaatcaaagtttgcgttgggattaacgttccaaatgtcataaaatatctcgagactagctgtctctaaggcatttactttctccctgagcctcaccagctcagatttttgcttctcaaactcggccccaagctcctcctccatagctattttctcttcctccaacctgcgaagagggtctggagaccctctcttttcgtcacagagactggtcacttcccgagataaagaggcaatatcagctttgagctgctcggtggacggcatgtcctgcaatctttgggcagtt

SEQ ID NO: 404563 - DNA, 681 bp, Cannabis indica
ggcagatattcaccattggaatgtttcagcatccagaactccaatatcgagttcattactgtgaaggccaacgagcactacactagttgcatgctttatgaaagtcaggggtacccttgtagacatttatggggtataatgaaaagattaaacatgagaagagtacctaatactcttctcatgaagcgatggagcaaaaccgcgaagacaaatctccacctacattttaaccactccgcacaacaacaacaacacatttatgagatggctagatttggatccctcagttcactaacttataacatgactttctatgcatcaaaatcagaggatttgtacaatcgtgcaaaggaagagattgaactgataacactaatgttcaaggaagaatttgagttcagttccaatccggaaggagaaacgccacaacctagaagatatcgtaacaaccccaacattattgaagtccccacagttgtgagaaccaagggtatgggaaatctaagggaatgaccaaacggagaagcagatcccaagaaactcaagacattgtcgcatttgtcgctcattagaccatgattatcgtcggtgcccaaactgtcaacagaataatggatctcaggggcaacaatctgcaaacaatcaagcaagatttgactcattcaatgaccactccaacgc

SEQ ID NO: 404564 - DNA, 578 bp, Cannabis indica
atcggttgcctcatctcaacccaagtccggcaactggagttttgccacagggaacaccagggagtgcgacaggaatattgcctctagttgctcccaccggagatgcccagcatatccctggtctgccacccagacctaatgggagagtggccatgatctcaggaggaccccatatcggaggaacaacccgcaaagaactaaagcggtacgcgagggccgtgaagcacaatgaggtttgggaggttactcagctcccagctcaaaggccccggctgatggatcaacccatcacattaatggaagaagacgccaagagtgtgcgttttccccaccatgacccgttggtcatagagacccccatcgccaacaaagtggtggccagagtcttgattgacaacggaagttccgtgaatctacttttcaaagaggcctttactgcaataggcctgacggaccgagacctctgaccaagtggttcccaactcacagggtttaacggaacgacacttatcccaatggggaaagtgagacttcccatcaccttgtgcccggacaccccccagagcaagttcaagtac

SEQ ID NO: 404565 - DNA, 901 bp, Cannabis indica
atgtggagaatgaggtctatgcaaaagctgagaccttctacatgtagacggtctttctccgagctatatgaagaagggctttatcggagctatatgaagacggtctttctcgagtttacggatccctcattcttttgttttacgaagatgactttaatggtttgcccctatggcattttgataaagataagtttgtaaccctacttggggttttttttatcttaaaggccttgtactcttttcatttgaacttaatacaactgtgtttgcttgcatttttattcacaatgtaaacagctatatttttatcaaatgtaaagtatttttgggttcttccattgcttgtaatcttcctgtttaagtagttagttatctaccaaactttctgatttttgagctgttgtcaattttgcctcgctatggcagttataatctgccttaagcaaacttgaatatacttttaatgattttatcactttgtatatttttaatttgctcatatgaatagttagattgtctatccattttctaggttcaagtgcttttatcaagacgtcttaatgtctcgtttagcaccttcctagctcgcgcgaaccgttaacattcaattttatgcacgagttatgagttatatctcatttataacttttgattttccactcccgtcagataggtttttaatcaaaaattatacttgtttgatcccttttttgtcaaaaaggtttaatcaagatgttataacaattcgacccctttcttgtcaaaaaggtttggtcaggaagttataacagttcgactcctctctcgtcaaagaggtttaggtgagaacctttaaaattcaaaaaaaaatattatttttgaaatggtgggtttacatcataccatgtatttctagatgaat

SEQ ID NO: 404566 - DNA, 485 bp, Cannabis indica
tttttaattttttagtttagtttgccggcgactacactcatcggcaaaaataaggcgccaaattgacatttggcgcctaatccccgccaaaagttttgtcggcgacttaactcgccggcaaaacgctgtcagagacacatcagctggcggacgtattgccggtgaatcacttataccgacaaacaaatacgccagcgtaagtacttttgccagcgtaattcaccacgtcgccggcaaaaggtcatacgccgacgagccattgccggcgacaaatggcgccagcaaagctttgtcggcgagtttcacgtacttttgccgacgagtttaagcgctggcaaaaataccttttcttgtagtgaccttaattttatctaagaaaattatcataagaggaccagaataaacataaagtttaaggtttatttgtttaagtatattgccacattaagtacattgttatatagtaaatatattgtaatacatgg

SEQ ID NO: 404567 - DNA, 505 bp, Cannabis indica
ctttttgtagtagtgaatcctcttccctaaccccttccaacaatgttcttccctaaagttccttacttgttctcccttgaacatgcactagcatcaaacagaatccaaaatttcatcactcagcaaaataaaacaaaatacaccaataaaattcaaatttatataccaaaattcataaaaagaatcttaatggtgagaaataaaatttggtaaaaatatacatctaatataaaataaaacctaaccgactgcactcatatctcgaaattaaaaaataaagctttaagtatcccccaaaattattcatatttcttcagttacttagaaatctttattttcttattcttcaaatttttttaccatagatcccgtgactcccgtcgatgctgagatctctgccaatacctcagctagatctatgtcaaagttcgcacagagagaaacaaagaaaagggtctcaggaaagagagaaagagcagcaaagatctagatctaggggttttca

SEQ ID NO: 404568 - DNA, 730 bp, Cannabis indica
ttctttcatctccttggaagtgataccttcaagcttaatcttcttgccagctcgaccattagctttcctctttaggattaaaacctcttccaaggtctcctcattgtccagatcgatcacgaggttctccctattaacctcttcacttccgggcatattccccgttttcatcaacaattaagattttagtgttttaggaaacaaacggagtcttctggaggtcagaactgggacccaacgcccaggttgacctggtgctgggcccagcgcctaagctgacctggtactaggcccagcgcccaagttgacactttgtcaacctggatcatttccaaggagtttttctgagaagtcttcttggcatattctctgtttttgtcaaagattaagatacatgtatttttttagaatcaaactgagttagctggtggctaaaaactagactcagcgcctaggttgacacttggcactagacccagttttgtcaacctgggctatttttagtcattttcttgaaaaagtgttttgaccttttttttctgtcattagaaataacgaagatgcatgtgatctcgaggagcaaatgagattttcagggagccagaacagggccccaacacccagtttaacatggcactgggccctgcacccaggttgacatgcaacctagtttgcatatttttgcttttgctctggacattcttcttaaaatagtcaaaaaaggggtagg

SEQ ID NO: 404569 - DNA, 661 bp, Cannabis indica
ctagtgttattacatacctcactattcgtacgtcgtgaattggcaagagcacatggtgggaggctattctaggtctaattcatccctacgacctcagcttgcagagctcgcatctgttcctacattgttgagtattgtgttgttgtcagttgcaccatactctcagcggtatgggttggtgttatttgtggcaaatgactaatggtggctgctagcgttgaagttttccctgccaaacttgagaactgtgggaagagatttagggggacggtgctagtgtgacctactcctccaaaagtggtgttgacaatagtgattttttcgttggtagtaagggtgttattcgtgcctccattgataaatctgttgttattgttagcattcgcttagttcgtagccattgtgaccttcctctaaagtcacagaagtattgcttgaaatttgttcccaaagacgatgccaaatgttgtcaaaataaaatagacaacaccaaaaaccacgagtattcttgataaacaataacactcacttatagaactgcaaatattcacctagagtggcaaatactcaaagataaaatgcgagtaagcaattaaaaatagtaaaaacataaatgagacagtgaattatagtggtttagtcagagcttagtctgcttagt

SEQ ID NO: 404570 - DNA, 274 bp, Cannabis indica
atggtaaaagtttaaattaaattaactctttgcggcttctttaaatgaatagagaatactacaaaattgtaaagaccgcttagctttaatttagaaattaggagataattagggtttaattatgaaaattgattattagttttaaattactaatttacgatgatttatttgaattcggaatgcattttatattttatatatgaaatttcataattttgcatgttttgtgcccagcaacattggaacgcggtatttggctactaaaatcacatcc

SEQ ID NO: 404571 - DNA, 531 bp, Cannabis indica
tgagtaggctccgtatagactcttgagatttctccataagtttgctgcagagtgtcaccccatgacttctgtggtgattccttcggtcatggagctgtaaagccagcccatgagtaactggtcacttattatccagttctcatatccatgaagtctatgacctctaacaatggtagagaccattttcttccatagtgtgaaattgttgcggtcaagtttgagtgaaaagggctgatttagggttggttgggcgaaggcattcgggagctgagatgcctggttagtgttgttgctattattcgaaccagctccggcaacaccagagttggctggtgaactcgcagctgaggcgggttgattgtcttgtggagtagacatggcagaggccagcaatagctctgataccaagtttggattttaaagagaaggcaaattatgaatctcagctcattttcagtatgagccagagcagtttatttatagcaatattcagaatacaaagcagccgttaggcatgacacctggcagtga

SEQ ID NO: 404572 - DNA, 404 bp, Cannabis indica
gtaaaaaaggttttttttttttttttcactttaaacccaaacccaaaccgtaaatttgaaaaaaaaaaaaattaaaaaatagtatatatggtaatttttttttaaaaaaaaattgggtttgtgaattttaatcgagagcatactaaaaattagggtatttattagagtaatttgcggcaaaatccccccaactatcaatttacttgcaaaaaaccatccaacctcatattttggtgggaaaaccctccaaagtactgttccgtttacatttttaaggtgtcgtctgtccagcctcgttaagtcctaattttacccacgtggcaatgacaggtcactaaaaaaattatcctatgtggccatattttacaaaataaaataaaaactttaagagtaatttgcggcaa

SEQ ID NO: 404573 - DNA, 630 bp, Cannabis indica
aacttatgtaatagagtggatcctctaagatattgagcaacagtgtagcatcagatcctaaagatagtaaaccttttccttcttataattttaagaattataatgcaaggctcgacgcttccataataacatcatgagtagggaaatccaaattagaagaaaaacccaaatcaccataagtgttcgaatcctcaacagtctttgtccctggacaagcttcttgtagttgtatattttgaccttcacctacttgtcctgccagcttcaccaacttatttttggaatatgatttggctttacttttaatcgagacctgtttgcgagtgcatgtcgccccctctttctttctattttcacttccagagcatccatgtgagaaaatgatggaaaatattttactaggatctagatttgctaacaagtatgtttattaacatcctaaatataaatttctattacaatgaaatttaaacacatataaagttgagaaaccttacattgactgcaacggaatatatgactcctcccacttagatctctaccccttgttcctttatgtcgtagagtattatcaagatctgggtcagatacttcttcaggtcgttggattcttcacagtcttacacacta

SEQ ID NO: 404574 - DNA, 802 bp, Cannabis indica
tgaaaattttgtatttttttatgcataggtatacttaaaaactctctgctggactcgtaataattaatatttgttggatataacatattttataatatcactaaaatacttcctatttatatcacccaacacaattttttttttcttttcactcattcgcttcatttcactacactataatctactacactacaagctatactatatattttctctcatttttggacggagcatcatacacgaagcattatatacaagcaatggataataattttttttcaagaaatcttgtttattgttgttatatttagtttaaaatattattttgatgcttgatctatggattgttgttgttattttgctgttttgtttgttaaaatatttgttgtttgtgaatactgcatttttcctagtttttacaatttttttcttctggtccgatgtaggtccgatggtggtccgatgccctgtcaaagttggttgacaaggatgaaggcctgatggaggccgatgggggtccaaaaattggttttttatttaatttatatgatcgggtccgacggggtatccgattgtggtccgaaaaatgggtttggggattttttttgtaggcccgattgggtctccgatgggtgtcaaaagatgggttcgtgcaatttttttgattggatccgatggagtctgattgtgtatagatttattgcattttcaagattttggataacttttatgtgagatttttgttctaaattgtaattgtatttttttttaatgtatgtgacaggttcaactgttaatacgt

SEQ ID NO: 404575 - DNA, 550 bp, Cannabis indica
aaaaaaaaaaatagtaacaattttttagtcagctattacaaatttacaagaacatcttttgattggtttgtttgggcctaacccttaagctactaaggtggttcggctttaagggagaaattttatttttgtgcttcttaaattatatgtttgcaaaatttatatttttaaggtaatttggttttacttaagtcgttttattttgtagtgattcatattgttactttgtatatattttgactagacaaaaataatttcacaagtgatttcaattttggagagttgctcaccaatgtggtactagttttaatgtctcatagaacaaaagcttttggctatggacaaagacaaccattaaagtttttaccttaaaatattagtggatcttattgcctatttttggtttagttatcaaaatatttaaagagttaaatatgaaaattttaccattttggtttcttttatctaaatttagtataaagaatagtatattgacaaaatttttactatcatggtaaaaaaaaatcaatgaatgtcattttcaagtttt

SEQ ID NO: 404576 - DNA, 535 bp, Cannabis indica
aaaaaaaaaaaaaatctaattacaattataaaattaaagataatttttttgctgcactcgacatatctgtactttattccacctatgtcatgtaattttatttcatcagagagacgaagtcactttattcttccttctttccaattctaaatatattgtatatgtatcaatttatcagagtggaatcataagaaaaaaaattattaaaaaagtttaaaagttattgatggttaatggtttttgatcttcaatatatattattgaaaggtttgaaagttactaactgatatcggttaataatcttaaatacatgttattgaaaaagtttgtaattaagttattaattattattggttatagatcctgaacatgtgttcttgataaacttagcaaccgatgttattgattatgtgacagtcaatagtcccgtgatccgtaaggggaaataacagggaaggtcaagtgggatgattctgagactgtgtaggtatgggacaacacagttgaagagagcttaaatggattgattggtact

SEQ ID NO: 404577 - DNA, 592 bp, Cannabis indica
tttttttttcttcttttttttctgatttgttttttcaaaataatgctaagaaaaattgggcagcacctccccttaattttctacttcctaaaaatttacaatcacttaaaacctatacaaataatatctccaataactcaacaccacaacacaataccaacaaacccaataacaataatttttttcacaacacgcactattattacccaaaaaaaatctataaaaagtaaatcaaattccttaaaattgtaggaagtgatacttacaaacccaaagaagcttttactccacctccattgttgaatgtccttgaaagcttgaggttgaagatgaagacaatggtattttcagatttgggataatatgagtgatttttgggatggtttttgatggtatgtgtagattgatgagtgaaattgggtttttgaatggattgggtttgagaaattgaagaaaagatgagaaaattgaagattggttatgataatttgaatttttggaagagagaatggcttgggtggctgaggagaatttgaaaaagtttgaatttggtttagggttgaatgagggggaaaataggatatttatagaa

SEQ ID NO: 404578 - DNA, 329 bp, Cannabis indica
agtggtagtccaaactgcagaaactgcttcgtactattttttgcggtgcggtttctacagttttttagtttcacggtgcgagtgcggtttgaaaaattgaaaaaactgcatttgcgagttggtttggaaaaatgtaaaaaaaaaaaactgcaccacccaccacgaacacccctattatataaaagtaaatatatgatttttaaagtttttatccacccggcgacgatcggtaacatcaaaactaaacaaagatccttcattaaaatactgattttttatcaagaaactgatttattttcattaagaaactagtttcttctatcatgaaa

SEQ ID NO: 404579 - DNA, 741 bp, Cannabis indica
gacgatgtgcgtcctggcagtccttccaaggcaaagggagaggaagaggttgaaccccaaaattacgtggcgtacaatgaggctggggagccagtcgatgctgagggagacgtcctggttgagggcgtggactacgccagtgagtagcttgccgcagcggttcctcataaaaggcagggtgtcttgggcgccaggtgggtaagtccttcgtccaagattacggaggcgcgccttcgaactcttgattagggctggtacctgggcgagctacactggtacattcctgcccacaataatcgcgccacaaaccctgacaaggggatgtgcaccttgtcgggagtccatggtcaccaaggagcgttgatgcccttgcataattacttcaaggatgtggcagacttcttcagtctctgcccggcccagttcactcctaagggcgttaagtatttgtctgccctcttcatcctctacgcttcccaaggatggggtactccttatcctcacgaagtttcttggttctttgatttgaagtccacccccaaacaggacaggtcagggtccttctatttctctcaaccacgcttaaagtggttgaccagcacgcatgataaggctatcaacaaaatagggcgtttcgctgatgagtacttcatggtgaaggatgcgagcattacccgaactcaatttcagcagattctgacatatcaccatctccccctaactcttgctcttagggataga

SEQ ID NO: 404580 - DNA, 721 bp, Cannabis indica
atacatttgttacacggcagtataaaaaaaaacagtatagaaataaatattaccgtgtaatagtaaaaaagaaagaaaatgagaaaaaagaggtgtaaatttccctttttttattgatctattcgtgcttcagtacattacatcgatatgtcccatagtttttttttcttgcgttatgcttcattcagtgcctaccttttggctgtatacatatatataatatatatattgaattgattcgtagcttcagttcctgtttccttcaaaaaaaaaaaaagcttcagttccagtttattattatttatttttttgtttatcaattacttgttgttgggctattatggtagggattgagttttttacctatcaatagggatattgatttatttaatccaatggtttaaatatttaactcttgaaaactacaccaaaattagtatattttttttatttataattaatttttaatattattaatggtagattcaactaacaaactccaaacttaatgtttttatcttttattttatttctatttaaaatttaattttaattatatatatatatttttttttattttctaaatttacatttgaaaaaaaataattttaattaaatttatttttaaaaaattaattatacttataaaacctaataacatattcgacttatataattttataataatcactcttaaaataattaaaataatcatgagttc

SEQ ID NO: 404581 - DNA, 518 bp, Cannabis indica
attgtgtttgttttccttcaaacaagatgtgttttatagtgacggatgagttcaaacatgattgtctgatccttgttgggaagttaatgaaagactaagaatagaatgacaaaagacgttataatgcctgcaattgaagagaaggatgtgcaacgactggcacaagtccttgaaaagcctctggaaatcgaccttactgattggttgaaatttgttgaaagtcgactaactcttgaatttcaggtacgcttattatatttatactaagataaactcttgaatacaagtacatgtatttaatgtattttttttggaattgtaagaattgagtaagttgcaaagagaatgttcggtaaaaatctaatccggacatcgaagtggtcgtagtggaatggtgaacgtaagggaatatgtggtaagtaatcaatgaattctaataatgtgcattaaaatgtaatttgtacttatttaattgttataaaataatgtagaaataggacctcgacgttcaagatccc

SEQ ID NO: 404582 - DNA, 805 bp, Cannabis indica
cccaaaatttatttctacaccccaacgttaagtacactcccattttatttgttaaatttttttactttttataactgcacccaatgtaggtagtcttttcgtcctatattttgaccctaaaatcttatttatgatttgaagagtgttaattacgatcatttagtcaaactccacgcctgaaattacatgttagcataattttttttctatagtgctatctatatatatatatatataatccatttgttaagataagtgacgtggcagcaccaataactttctttctctattctttgttttctctatttttctttaattttttttattttttttttaatattttttatataatacaaacattaacataataatctaataattaactatttattattaaattttgaattttttaatattaaaaaaaaaaaaaacttataataataattatttattataagagttactttttgtgtttacattatttcacgaaaacctaactacagtttttttttctttgatagatttatttaatatttaacatgttttgagtctattaaacttctcagggagtagattgtgtaaacgatagtgaaagaaagaaaagagaaagaacaagaggaaagaagcaactgtattataccattcaataaaccagggtattacaagtatttatatacaactcaacaagagaaggatagagctgaaacaattacaactgaaatgtaacaatcaaaacagaaataactaacatgacaactcatcattctcatcaagccccctcaaactaagtgtgcttgaacacaag

SEQ ID NO: 404583 - DNA, 554 bp, Cannabis indica
atctggaatctttcaatatctcttcatgaacatctttaaagtttgggtctggtggatttaatacatctacactcatatgacataaaacatctaaaaccttgttgaaatatcgactaactgtctcgcctgagtgctggaatcgctcttgtgtcaaccggtttccagcaccgtgacctaatgtaaataaaaacatgcctaatatttcaagagcacacattctctttgaacccttaaatccataattagcttccaattcattgcataatttaatgaaaacacccttctccatcctaaacattctatgacatctactttcatttccttgtaatatttccatcaaccacatatgaccagtttgagaagaattcatacaaggagtcttttcaatgtatgttgtataataatgttgaactagatatgtagctagatacgtcgattgtaactcaatctcctcatcagtgtctgtcattatttctaatttaaattaaacttgtaaaaattaaagagtatatgaaatacatatgaaatagccataaagtcttcatagcaaatcc

SEQ ID NO: 404584 - DNA, 511 bp, Cannabis indica
atcatcttgattgggtttctgtattcaatccaagtctttatggacttcccactttttaagttgacacctttcggagttaaatcaacgaagtgaaacgacactgttgagatcgactccgatgtggtttccgttaacgtcttcgagtagtgggtcgaaacttgtatcgtactcaacagcaaagaagggatctttaacatcaaaaggcctgagaagaccgatgtggcctttgaatgagctgaaagaatctttgtccggagctatgaggaaggatttcccgtcgccggaggaacagaacaaagagggacgttggagaagtccaacagagcgagaaccagagggagagagtgatttttaggtttcggtttagggagagagcgatttggataggggtgttcgcggtgcgggtggtgcggtttttaaccattttttcaaaccaacccgcacatgcggtttttccaattttccaaaccgcacccgcaccgcgatactaaaaaaccgcaaaaaccgcacc

SEQ ID NO: 404585 - DNA, 1003 bp, Cannabis indica
cttcagaaaaaactgagccttccccactttctatacctggccgaaatccctcttctcttttcccttcatcaatttcgaaccctagtgaaagagtaagtgcccacacacagcaagcagtaactcaatcatagattggaagactgtgaaggatcaaacttgaagaagaaggacattcgggctcagatcttgattatactctgctacagaaaggatacaagggttagagatctgagcggaaggagacattaattccgctgcatcaatgtaaggttttcttaactttatatgtgtttaatttatcgttttagaaagttcatatttagggtgtttaaacaacatacttgtgagtagatctaagatcctggtaaaataaatttccaacagaatcaagatatcatctacttgaaaaacaagcactatgtctaattcatgcctcgagaaagatgagacctactttaagcacaccttatccatgtattgaccaattatccactaaggcgggttttgtctaaaccaaacgcctcaggtcaattaataaaatggttaaaaaaattggggcaatttgacacagcttatcaccctcagtagccatcaaagggcaggcattgtcaaatttttagttgaaggaatagatgataataaagatatagaggtaaccccaaaccaaagaatctggaagttacttatcgacgacttgtcaaatggcaattgcttagaggcaggcatagtccttatctcaccagaaggtttcaagtttcattatgtcataaaatttcattttgtagcttcaaacaacgaggctaaatatgaagcacttttagcaggtttgagaatggcggaagtgttgggttttatgccctaaataaaactctatttcaatgtaatccaaattattcaatatcaataaagtaacataagtatttttcattcatttgtgtatgttttggttcaattaatcaattgtttgtctatttgatttataaattcatccaaacccctttca

SEQ ID NO: 404586 - DNA, 1076 bp, Cannabis indica
ttatgagtcatcaatgaaatcccaataacttggggatgggattacatggatatggcatacacacgatcccacgatcagtgtatactgcgtcaattccatgatctttgtactcagcattaatcccacaatcttttctctttatatccattgtaacgagaagggaaacacttcgtctccaagtttacagccctataaatagtgatacatgttcactgggcagagggtcgcaaatagtttagtcgagaccttaccctaaatatactatctaagaattcttattcagagatactgttgtaagagctataagaaaaggaatctttctccttgttctttagtcaatacaaataacgaggattaggctattaccaaactgttcgtggctgagcctctataaaattcttgcatctttatatttgttttactatatatcgattgctataaatcacttatcgctttctaaataagactcattatcgttggctaaaagcgaggtcaacaattgctaatgcttttagtgtcatggattcatataggttttgttcaggaatattgttcactccttctaggaatatttgagttcttcaaacagtttttcaaaaagtaaaataaaaaaaaaggtttaaaaaactgtgttcaagccccattggaagaataaagctacctatctcaatgtaaagaccgcttagctttaattaggaaattagtagataattagggcttaattatgaaaattacttattaatattgaattatttatttacgataatttaattgaattcggaatgcatttatgtgtcatatatagaaatttcattatttttgtatgttttgtgtctagcaacattagaacgcggtgttttgctattagaatcacatctaagtatttttagtatagcgggacaatagtttagacattgggaatgtcgggaatagtcaggattttgaatttcccaaaatacccttaagtgccttttaacccttttagtgtgggaggggcaaaatggtcattttggcccataatgtaacgccctgtccaacagggacgccacgtgtgtgtgcactttatttaaaatacc

SEQ ID NO: 404587 - DNA, 646 bp, Cannabis indica
ttagtattatgagtaacctaatggtttctttgattctcaaaatagcagaaaaatatatgcttcccatatttttaaatgttcacattgaagagtaaatcacaatactattttttttaagcttaaacgagtaacgatgtagctaaaaattcttgttaaagttaaagatgtgagagagaaataggaaagagaaaatgatttaagagagggaaagatatctagcaagtaaatgttaattcttaaaaaataaactaaataaataaatttttattttaataagataaaatcttataaaattaaatatttatttgaaaaataaaaaagtgagtgtgtgagacacagtaattgatatatatatacatatattgagataatgtacaattaaaaaaaaataaagtactgggcatgtagatttcaaaaacgtaacatgtgagcaaaaaaaaataaaactaaaaaacggtatgaaaagaacggtaattttgataattttaaaaatcacattatttatataaataaaatatattgtaaggctctaaatgtaaattttccaagatgatacaaggttattttacttgatccaaaaacccacctcttttagatatcatcaagagaaagcaaaagtattaaaaaagttgaaggtaattgaaaa

SEQ ID NO: 404588 - DNA, 741 bp, Cannabis indica
caaatcaatgccatcttaagccatggcaaactaagtaccctagtaaaaaaattaaaaaaacaatagcaaaaataggttgggtttcatttccctattcccatgctaataaaccctcataccaaacggcccattaaggcttacttaagtcgttttagcacggttgcggccagggttagaaatttagatgatagcacgcaacttacagcccttcaggcggggatccctactgatccactaactggagggggtgagttgtgggatggcttacaaggatgtccagtgagaagcatcactgagttcaacggaagggctcaggtgttttttcggaaagaagaagcccggaaggaaatgaatttattgaaaacaagctcgggaggcaaacccagcaatatttcaataggaacagtttccacgagaattgataactcgggggcttctatttcgaagagaaaggatggagttaaggaaccgtcgaatgataaaaagaaacagaaaaagcatgacaaatatgtgctagtgtatattattataccaagcttaatgaaactcgggagaatatttacctggcacatgagcagatggtggccttcggcaagcctgagcctatgaggaattcgagaagcaaaagaaatcctaacaaatattgtaaattccataaggatattgggcatacgaccgatgaatgtccccaattgaaagatgagatgaaaagtctcatcgctcgaggccattttaaacagt

SEQ ID NO: 404589 - DNA, 839 bp, Cannabis indica
gagtctaaaacctttatatctcataatgaatcaataaagtgattccagaaataaatagaaaccttggaagaaggcattgtgtttcgaatacaaaataataacttaaacatagataatccattttgaaatctgaatttgaatttgagttatgaatgaataacaaaattataaccccaaatcatataaatagaaaatcaaaactttcgagattgtttggctgtgttttcagtttttcagtttttaaaagtgagaatagaaaacagttttttgtcattttaaaaatttaatggtgtttggtacaaatttttaaaaactgttttcagattttttcttaccaaaaaaaaattaatattttagcatcataccatgacattaacccattcgggtctagtttcgggtatggtttcgggtctaggatccgagtatgtgagcaaaatataaaatgtaatatgttagacaataaaattgtttctgaaaaattaaaacagcattttgatgttttctgttttctagttttataaaactcaatttttaaaaaacattttttaaaagtttttgccaaacgactcctaatagtttttaaaaaaggaaatttgaaattccatgcttaaaatacactataattttttccctaaatgcatagttactaaaattggtcatatatgaccacttgaataattttcctaaactacccctcacatttcaaaacatcaccctctctcttcctctctctcagccgaactacgaaacccaacccccctgtcacagccgacgccccctttctcaattgaggctcaaccgagctccgtcgacgctcaaccccgaccaacccagctccg

SEQ ID NO: 404590 - DNA, 685 bp, Cannabis indica
aggttgattaagtcaatcccacgattctctcaatcccattactctaggcatccaaaattacatagtcttcaaagattgggcagttaatacaaatctagacttggtcctcgcaatcctcttggttggatcctccgcggaggatataacatctgctctcttgatataattgacttactccttccgaccagccaagtgcattggtcggatactttggcaatacattgtgcgacatctccatattccctaaatccttttgttatcctaaattttgtccacctgatgtggcatatccacgcaggcgaaagatatagtacaggtggagtacatccctgccaatagcaaaacagggcctccatacaagatatattaaaaccgccaagcaacaaccgaatggagtgaagcgagccctcaaggagttgtatcaacagccatggcttgccaagagaagcctataggctgaccagggtgagcctattggccagccagggtctgtgcacaagctggtcggccaaaaagtgactttcgaacaaaggagcctccgttcgaccaagggaatctgacctcttcaaggaaacgatgtacaaatctgtcctcaacttgcaaaaggctggcctcctcttggtggagctatagttgttggaattattttaccaggatctagatttactaccaagtatgttttatt

SEQ ID NO: 404591 - DNA, 722 bp, Cannabis indica
ggaaaaagatagtgttttactagcagagagatggcagacagaatcaagacctagagttctagaaacatctcatttgcagggagagcgattctaatcaactcggtattactttttatacacacttattggagtcaaattatgaagttaccaaagaaagtaatttcaaaactggaagcaatctgtcgagctttcctatggaagggtcaaagtatgatgcaaggggcaggactcatagcatgggagaaggtgtgtttatcacaaaagtaagggggagttggctttagaagaatattagaaaggaaccaagctgccctcttcaagtatgtgtgggcaataacaaataaagaaaataatttgtgggttggatgggtacatagtgtgtatcttaaacagagtgataggtgggaatataaattaccacaaaatgccagttggtactggaaacaggtggtagctgctaaggatcaaatcaaaagcaaaagggatattcaggtcattgctaggactcaatatgtcattgctgaagggtataactcgtttgccctgtacaacagaaagttaattgggataaggaggtatggggaaggctcaatgtacctaagcattgttacattttatggctagcaatacagaaccggttgagaacaaaggcaagactgaaagtttataacattgtcaaggaagataggtgtatattgtgtaatatgcagcaagaaactgtc

SEQ ID NO: 404592 - DNA, 791 bp, Cannabis indica
tatttttgtaagtttcccatagtaaatatgtcttctatatcagttagtttaatttgtaatgaacataaaatttaatttcgttagtacttaatataattagctttattcaaagaaaaaaaaaataccttacacaattaataatgagaacaagctatattggtcttctatattttagttaaatatcaaatttaaacttttataattttagaaaaatctgaatgataatcactctttcaatctatcaaaattagtcatctcttgcattccattttcatcaaacattataatgacatttttttataatgaaacaagcactagtctaccataataaaaatattaggttttttcagttttaaccaaaaaaaaaagtaaaaatattataaaaatacttctagccagccaaataaacaaatatacaacctaaataaaaaaaaattacacacataccacttacacacactttcaatctaagattcatgcttcctgggcaactatcgtgcaaccatacagcaacccaacgcaaccgaaacgaaaattcaactagaaaaagaaccaccattaattctggtgacttcacctgagaagacgaccagaatcaatcaaaacaagagctgttttgaattcttaaaaaaaaagtgtagaaaaacgattacgaaactaaaattcaaccaaaattcagtttaatttgtgtaaaactaatgtcctcacttcaattttgagatccatgaaagacagatctcaaaaagttgaactggagttcccaaataatctaactcaagtataatctaaaa

SEQ ID NO: 404593 - DNA, 559 bp, Cannabis indica
ggcagataaagtcatagcttatgattcacgacaattgaaaaattatgagcagcgctatccaactcatgacctggagctcgcagcagtggtgtttgccgtgaaaatttggctacactacttatatggtgagcggtgtgagatctatactgaccaaaaagtctcaaatactttttcactcagaaggatctcaacatgagacaaaggaggtggttagagctagtgaaggactatgactgtgaaatcctgtatcatcctggaatggcaaatgttgtggcagatgccttgagtcggaaaggacctgatcaaattttcaatacagtaatgatttctcctcagttagcctcagagatgtctagggcaaacattgaatttgtgattgagagattgcataatcttacacttcagtcagacttgaaagaattaaagtggtacaactagaagatcttgaactgcttaagactcgatatgatgtcttagcaagaaaagctaaggactttttgatctctgacagtggaatgctactgtttaaagcacgagtgtgtgtccctgataacactga

SEQ ID NO: 404594 - DNA, 840 bp, Cannabis indica
tggctgtcacaagtaaccttcctgggacatattgtcggaacgggattatggtagacccagggaagattgaagtagtgaagaattggcctagaccaaaaacagtcattgtagttagaagttttctcagtttagcgagttactcagcattttgtggaaggtttttccaagatttcaatttcgttatctgaattaactagaaagaaccaatggtttatatggtcagataagtgtgagggaagtttccaagagcgaaaacaacgactgatcaaagctcctgttttagcgttgccgtctgatcaagagaaatttatggtgtattgtgatgcatcaaggcagggtttgggctgtgtgttaatgcaagcagataaaatcatagcttatgcttcatgacaattgaaagattatgagcagagctatccaactcatgacctggagctcgcactagtgctgtttgccctaaaaatttggcgacactacttatatggtgagcggtgtgagatctatactgaccacaaaagtctcaaatactttttcactcagaagggtttgaacatgagacaaaggaggtggttagagctagtgaaggactatgactgtgaaatcctgtatcatcctggaaaggtaaatgttgtggcagatgccttgagtcggaaaggaccttatcaaattttcaatacagtaatgatttctcctcagttagcctcagagatgtctagggcaaacattgaatttgtgattgagagattgcataattttacacttcagtcaaacttgttggaaagaattaaagtggtacaactagaagatcctgaactgcttaagactcgagatgatgtctta

SEQ ID NO: 404595 - DNA, 619 bp, Cannabis indica
gaaattgcaaaccaactatttgtcagcctcatgtcgacctaggagaggacatcaaactagtcatgctcagagaacttgttggctaggtcgaccaaatagaataacaacacattgtttgttgcaatgcttccaccaacagagacataaattcctaaggtggatggatcacagcgcggagatttaccgcagcgcggagttcctcctaatcatgatgtagggtattggtatgaccttgcatgagtccaagaggagcgcggaggtcttggatctcagtatcatctccaatggtcattcgaacgttggtagtaggtgggacgactgtgttatgaatgccctggctgggtgctgaacttgtattcccagtctcttgcacaccaggcgtgatttcatctacaggagtcgtcacaccatgacctacattcgacggctattcaagattaacagctggcggaacccttgcgtttcctcggttctgcaatccaggatccactgcttgtggattagttggatcaaccaggtgttacgaattttatgattactacgcaagtatacgcaatcaagtagtctctcacgcaagtgaggtcgaaccacagggaattggattaagtactactaaact

SEQ ID NO: 404596 - DNA, 887 bp, Cannabis indica
ttgtattagtagtggtggtccaagaaagaattactcattatatttggttgaatttaagtctttgactttaattttagattccaaatagaaattttcttatatttctaattccagaatacaatacagttacactttctcaagtgtttaatatccatcttctattaatggattaaaactgtatggaatatgagttaggtattctgtgaccaggatccacttgcagtattctaagaactctttgatgtaactaaacctatgtcatcaatagacactaccacatttttttttttaaatctagtgacttagtttagtacttcgttttcgttactaagttagggtggttgagttttacgaaacgaaagtactaactaacttccttcgtcgaaacgaaaaggttaaagtttaaattagtccgtaccttaattacctaccctaccaaaaggtaaaaggtttacgttactacttcctacttacgttccgacgaagtaggtaggtagttacgtaacttacttacgggtaggggggtaggtaattagtaggtttttacggttttttttggttagtttacttttaaaaccgttaaaacgtactactaccttacgtaagtattataaacttatgcaaagaaatttgaaatgtttgaaaaatttcattaatttctagcaatggttaaaaccattaaggtaagtggttaaagatcttgcgaactgataggggtggagaaatagttagtagatatgcagttcaaagatcattaaattgatttttgaattatatccaaacttacctccccagaaattcgagttgcatattgatgattagttactagtcgttgcctaattccttctatggtaatacaatttcagaatgatgtaatggttgtatac

SEQ ID NO: 404597 - DNA, 648 bp, Cannabis indica
accatgagtaattttttccataagcgagtctgatggcaaaaaggtgctcttctttagtgaacaaactaacccactacaacaattatggttattagaggcggaccactccgctggtaataatcctattttccgccgctaaagagtaataccggcggggtccgccggtaataatccgctggtaatacctggtcgctaataactattattagtggcggactgacacacccgccgctaataatagtgtcagatcattaaactcacactattattagcagcggatctatccgccggtaatacttttaaatataaatatttataatttttttctttaaaataataaatataaaattaatattaaatatatttaacttttttaccattttacttatcaagaatactcaagagctaatattatataaaatatttatcatcaagtacatttatgtataccaacatttaaaaaattgtatacaatataaaaaatatatacattcaaacttttccataacagaataaataataaggagaatttggttttctataagaaagttatctctcaaattctctattgctatatacaaatataagattacaagagatacacaaaagtctataaatatacaatttttttttcttcaagtccagtgc

SEQ ID NO: 404598 - DNA, 746 bp, Cannabis indica
aaaaaaaattagtctacgattaaaaataagtttaaacagttaattttataaatgtataaaataaaagaattttacggaatattcaaactctatttttagcgtaatatatttttataaattttttaaaattttatagaatatgttaaataattatataaaaaaaataaattaaatatactcttaaggctcatttggtacgccgtataaagatcgtattatattatttaataataaatagcactatgtttagataaagtaatgtattatattaattattacgaccaaaatttttaatacaatgtatattgtattatttaatatataacaaatagtctgtattaatttgtattataatatttacaaaagattcggggtcaacactaatcttcgacctgaatccggacctgggactcaaacccgaacccaaatttgtgacctagacccgaacccaacccggactcaaacccaaactcgtaacctagacccgaacccgggacacagacccaagacccgaacctgtagttggtattggggtcgaatttattgaaaatatattataactttacacaatctattaatacaagttaataccaaatataatattatattaaataatactaatacaatacaatataacacaatacggcggcgtaccacacaagccatgctaaaacaaattaaaagtctattgagggactatttaatagattttgggctcgtttggaacgccgtattaggtcgtattg

SEQ ID NO: 404599 - DNA, 626 bp, Cannabis indica
gtaaccttaaacaaagctatatccgatcccacctatagttatttgaatactattatctcaaggtatcaatacaagaaaaacgggagtaggtcattacaggctaactaaaggggctaaacctctattcaaatctttattttctttacttttcagttctaattgtgtaacacgtgacaaacatcagattcatatgactccgctgtccattggccgcgcaaggcggaatgaatgagttagagaatttacttggtgaattgtagatctacttattgaaagctcggttatatgggcccatggtcccctcaatagttgagataatactacttgcaaactcagttaattgattttaattaataaattatagttctaaaattagactgtcttatttatgaattttcactaagtaagggcttaattgtgaggaaaagaggttttggggtcaatttattaattaagagactttgtatagtctaattaataaattatatatatgataagtttatttgataattaattataattattaaataaataattttggcatttataggattgaagtggaaaatatggtattattgaaagaagaataagtagttgaaggagaaattctaactagaaactggtcc

SEQ ID NO: 404600 - DNA, 566 bp, Cannabis indica
caaaggaataaatgaagttactcaaaccaacctcgggttacatatagcgagacatccacctcgctattctaaagaaacttggcgagacgaatcatctgctaacactttgcatttttttcacattataacaaacaaggataacaacttagaaatacgcaagatacaattgtccaaattagcattgaccatcgacaagtcaagcgagatgctattgtccaaataagcattaaccatcaaaatgataagagtaataagcagttatatatgcaattattaattgttatccaacacattatctaaatgaaacgtgggaattaatcacgtttcattaattaaacagttataatttgaatttaaatataaataactgccaacgtatattcctataaataggggtagatcccacagaaaaatacacagataatttttgaaagaaaaatagaaatacgatcaattgtatattgtaactcagaaaatatcttgaataagataaactcgtggagtatgcagatttaactgtaaaaccacgtaaaaatatctaatgttattgatatactatttgtact

SEQ ID NO: 404601 - DNA, 617 bp, Cannabis indica
aataaaacttagaaagatgaatgcattagaataacttgtatttttgtaataaaaattttagtttcttgcctctttattatttaagaaaaaaaaaatatacttttaaaaaaaaaaaagagtcgtgtgacttgaattaggggctaagaaaattggtcatttgtctttcttttagtaagtatcaacatgtgctttatttggtaaatttttgatgagtttcctcttaaaatttgatttcttattctttgtatttttttaattgtttatcatgattgtttttttagatatttaagtttttttttagagaaatcttgtttctttttgtttttggcctttataaatatacaaaaaggggagtattttgggttggattgtatactcaactgtctgggggagttaaggtttgtgtttgtgtttgtattaatctttggttaaagttagctttttattttggtttaatgttgtgtttctcaaggcgagtttatatgtttatttttctatctttgttttgcagattttgtttattaaaaatattttgattatctaaagttctaaagtgggagattgttaggtcatttttcggtaatttagttatcaaaatattttttaattaatgtgca

SEQ ID NO: 404602 - DNA, 823 bp, Cannabis indica
ttactcgacaatacgtatttttcatcttcataattccccttactaaattgttagatattgtaatagctgttactttaatataaaatgtcatattttcattcaaaaaaaaaattgtaagaatatcttcattgttcaaaaaaaaaaattgtaaaaatatctataaattaagtttcaattttatttttaattttttttaaaaaaaatcaggtagaggtagctgccccccttgtcccatgtataggttgacactaaaggtaagtattactataaaaaataaaatttttgtcagtatattttttatgttggcgaaagctagatattgcactggtaaaatagaatctactttctgccagtacattttttcgctggtaaaagagattggcaaattcgcattggtattagaacttttgccaacacaaaacaaaaagtacaggcaaaaataacttatcctagcatgtaaatgcactaaaaaaagttagacttttcccaacacattattacacaaaagtcttttactagcatattaacgcattgggaaaaatctaacgcgttgggaaaagtcttacttttaccagcgtattaatggcagaaaaatctgtattttaaacctgttataggcgatagttttaaaccgtcgggaatagtaaaaaaaaaaaagaaaaaaatacagatttttctaccattaatggcagaaaaatctgtatttttcctcatttttttcctgcattagctttataattttacctaaattaaaataaaataactaattaattttgttacaataataactaactttaaaacacattaaatttatacaataaca

SEQ ID NO: 404603 - DNA, 763 bp, Cannabis indica
ggttttgattttttttttggggagctggtgtttaaaatgctttttgaggtttttttatttctttccttctaaccctgtcatgtaatgtaaattaaaggtacaatcatgcagagacttgagcccaatttttgtgttctgaatattgtaccatgttaaagaaaaagtcataccatcttatagatatatgctggagagtctttaatttatcattttgaagtaataagatggaatctatttgcttactttggaggcatatatacgttaatttttttttttctttttaaatggtgattaaatctcgtaaaagcttctctctttcgttttggcctgtatttggagattaacctccataaatttagtccgataattaccacatcgactttacaagtgctaaactattaatctataataatgttcgataatcacctcttttactaaaataaaatgggtgaaataaaagggaataaagtactaaataaacggacacattaatttattataatattatactaaattgactagaacgggaattaaaattattttatttatatgattttagaaaaggtaatgaaaatggtttaaattgattgaattatctttcataaaaatatttatttcttttatttgtttattttaaaattaaattataaaaatatataaataaattcaaaaataattatatatgtgattgataaatatttttattcaatgatattatacttgtaacaattcacaccaaaatgataaaacttcattcaacacc

SEQ ID NO: 404604 - DNA, 831 bp, Cannabis indica
gggtgtagcaactcgagttttctgagagagagagagagtgagagttgtctttcttgctcacaattgacaggacattggcctaattgccttacatgattaaacataccccatcataccctcttgtattgttaaaaaagttcaaactccactcggcacattttctctcttgcttgaatgaactgtttttcctcattccatgctatgtaagtttttttttttggcttacacatgaaagagaaagaaatgataataatcttattccactttatttttattattattattactattgttattattaccactgacccattttcccatttgatctaaaaaacaaaagggttatcacacaatcctcaatttaagttactaaaaggtcagttactaacttctaatttggttaatataaagaaaacagagattgatattattgttaagaaaaggtcattcatatatagaaatgtagatgaaataaaaagtgtaattgcttttctgataatgaaaaggccaacaacatggccccctccatacatgtagtagcactggcatgaaagaaaaatctcatttattatgactagaaaacattcgtgtttctttgttcacttctttaatcaagaaccctcaagaacaaattagaccggcattctgatttgttcttttcaatttcaattcttcataattattatccatatatgatgtattcttataatttattaaattttggttcattacataatgtttatattgtaacatctccattttaagcctccattgggtccttacacttacgaaatgaatgactcttatacacgagtacgtcactctggctgc

SEQ ID NO: 404605 - DNA, 639 bp, Cannabis indica
tttggggatgtatcaatcatttcaacctcttctgtgctgttgatactaggtgcttcaagaaactggacaggaatcaaattttctctatcatttacaatgctgcttgcaagtcgagctaatgcatcaatagtcgtgttttcttcctttcgaatttgcctaacagcataacttttgaactgtgcaagcagatcatgtattttgttcagatacgctatcatcttttcccctcgagccttgtactctccagatacatgatttaccaccagctctgaattgctacagatctcaaaatgctcggccttcatctcccgggctagttttaggccagagatcagagcttcatattcagactcattattgggtgccttaaatccaaatttgactacagcgtacaggtgttgccccccaagtgtgacaagggcgatccctgcaccgaatagttgatctgtagctgacccgtccacatgtagcttccaagtcagcttgtcttcactgttactcggttgtggtatttgtactcgctctgggttgttttctgaaacactcttttcttaacctgtacattcaactacaaatctgctaatgcttgacccttaattgttgttcggggttggaggataatctcatattggcccaact

SEQ ID NO: 404606 - DNA, 200 bp, Cannabis indica
aaaaccttaaatttcttaaacaaaaaaaaaaaaaaaattatcctaaaaatatgagttatcatgctacaagatatatggctcctacaattagacgcatatggctctcttgatcttttgaattatacttctactactaaattaataatactaaaagatagagaagtaattaaaaggttaaacggtaatttgaccaaaacgca

SEQ ID NO: 404607 - DNA, 633 bp, Cannabis indica
agaatgcaatggagtgaattattttattagctatatctgttatccattttttgcactatgacgtggcatcacatgctggtgacacgtggacctgattccccatatctgcccgagagagatgcaccgagcagggcatagcatacacctgcacggacagtgtcttttcagtcgagcagtggataagccaagcatcgaatcaacacttagcaattctagaatttgcatcgtgaagcacaaagagaagtccctataaatctgtgatcgtatcacatagatatggcaagctatctaaatcccacaatctatgtattctaaatatgtaatatatgttcttaccaattatagctattgtaagtgttgacctcgcttttagccaacgacagtgagtctaatttcgtaagcgagaagtagtttataacaactgaaatataataaagcaatttaaagacacaagaattttatagaggttcagcctcgagcagttcagtaatagcctaatcctcgttaattgtattgacttaagaacaaggagaaaggttccttttcttatagctctgacaatactatctctgaatatgaattcttagatgaaatatctcaaccaaaaatgttttcgaccctttgcctagtgaa

SEQ ID NO: 404608 - DNA, 535 bp, Cannabis indica
ataacttggcgtttttgggaaaataggatggcgtttgctcactatgggagacactcttgtgggacaaatctataaagctaggtactttcctaatggttcttttcttgatgctgagttaggaaataatcctagttttatttggcggagtatatgggctgctcaagacttagtgaagaagggtgcaagaagatcaagtgctagtggagtctcggttagcattctaaatgacccgtggctggcccatgataataacccttatgtagtcactactcatccgggtttggttgataagtaggctgttaatttgcttagtattggtgagaggtcttgggacttggagattctgaatgacatgtttgaggagagtaatattagcttaatcagaaatattcagctaagtaattctcgagatgtggatagttggtattggaatatggagtcttcaggtttttattcagtcaagagtgcttacaagtttcttcaatcgtcaagtggaaattgattttttactctaagatgacaatggttggaaaaa

SEQ ID NO: 404609 - DNA, 914 bp, Cannabis indica
gtttttctttttttgaggtagagatttttcatcaccacagatgggtgatttactgaacttctgtatagccttatgctgtgtggattgcatataaatgaatttgcaaaatttcctatttggctaagatgtttgagatcatttataggagtaaagatgactaaccacaattcttttggagatggaaacatgggcatgcatgatggatttagtgaaacacagaccgatttcccaggtttaatcctttactcattgcaatttttttggctgtttgcactgaactacagatttgtagtgtttaatctgtatatgacgcggatgcaatttcttgcctattttgttcgctatgaggttttccatctcattcttagtacttaatgctgcaaatgcaggttgttggttatgaagaagatttgtcaggcaggcaaatgcttattgacagggtgcgtacccggagtaatatgacttaggatagttgtatagttcttgtaaaaacgaccaaagaaagaaaattgccgttaattttggcagtaattacaagagaattatctaatgtctggcatttgattcaagttttttcttctttatatggaagagttgacaaagtggagaaatggctttgttctgtattcactgtacgtcaaagagtttcagacataagagaagatatccaatccgatttaagctgcatttcttgtaagacatggtgaaaaagcatctcattatttcctggctattcaaaagggaaatttgagtttctatgcattttttatacctaaattaattatctaaactaatacttataactctttaaaaaataggactacttttacctaaaccccaaaatacccccctcattattctcaaccatttctctctcttcctccttttctctctcaaatcaaacccaccaaaac

SEQ ID NO: 404610 - DNA, 964 bp, Cannabis indica
caaaaaaaaaatacgacatgtgtacatagatatacactgtggcagtcctaattggtgtcttaattggcatttaactagaaaattcaactattatattaaatttgcaaacagaactaaagtaaaagagtattgctactaaaataaaaaaaaataaaaagattatgtacatacaaattaaaatataagaaagttcgccaaaaaaaaatctctactttttattattttgtagtctctaaccaaagaaaagtttatttgattagatactaaaactttaaactagattaaacttaagtggaatcaagggcactacacccagctaggggtggccattcgtgttcgtgggtcgtgttcgtgtcgtgtcgagacccatatataacaggttcatgctcgacccgaacacgacccgtttaataattgtgtcaaaaaaatgaaacccgaacacgacccgtttatgaacgggttgacacgacacgacctgtgtaaccgtttataagtataatttgtttaaacatgtcaatcaataacacgtttatgaagtattcaacatgtttgtaacctatttataacaagttaaagtactaaaataactttaaataggtcattaacgggtcaatttcgagttggaattattttaccaggatctagatttactaacatgtatgtttcattaacatccttatatgaatttctaaaacaatgaaataaacacataagggtttaagaaaacttacattgggtgcagcggaatataatgactccttccgttcagatctctagcccttaattcctttctgtagcagagcattatcaaaatctaaacctagatctctttctctccttcttgagcccgattctccttcttggttattggattcttcacagtctttcacactatgattgagataccacttgatatgtgtgggcactcactctatcactaatggctgaaattatttagtgtgaa

SEQ ID NO: 404611 - DNA, 823 bp, Cannabis indica
ttctctcaacctctctctctttctattttcttgggctgctagggttggatttttcttctgtacttcaatctttctcagctaattgattagtaaatccaagccaaggtatagtgcttgcacctcctttgtattttcttgaagtttaaggaaataaaattttgcatgctaggtgattttgaggttgtggctgctgttaatgttttatgttgttttcttaagcttaattgtgattagatatgtggaattaagctggttctagtggttgttagttgattgtattcaagtttggagttttaaacacaatcttgggttttaatggtggctgtagtttagcttgctgttcttgctgctgtgattaaatgatgttttctttggttatattatgtttatttaaagtgatttaagcaggttttaagggatagttagttggatgagcaagcttggagtttttgaactcaagcttgactcatcaatggtggtttttgtatttgtgcacgaagctttgttttattgctttagaaatgttcattggggtctaattagcaggtctggaaagtttgaattgatttggaattgatttggtcgggttatgaaatttttagtgattcctgcactgaaccggaattccggtttagagaggcctgcaggtaccggtctaccggttggggcaaatttgggaaccctagtttttcccatttttgtgttatttagggtattgccatgctatttatcgatagggaaacttctagtttcaaggttaagtccctgggaagtgatttagcgtgtcacttatcagtgtgtgattattatgatttaggagcct

SEQ ID NO: 404612 - DNA, 534 bp, Cannabis indica
attaattattttctataagcttgagagaaaaacatgtcaactaaaaataaaaatcaactattcgtttaaaaaaaaaacgaaaataaaaatcaactacatattcggtattcccaccatattaaagatggcgaacatgtaagtaagcaaattttaaaggttaattatgactttcgtcctccgcactttgccatgtaccaaatcatattttttgaatttttaagctcgttaaaaataccccatgaagtattgagattgttagatttaaggatttttgtctgatttcattcaattttactattttagtgattgtgtatgtactaaattatgctcctcagactttgatatatatcaaataatgcccctcgaactttgacatatactaaatcttactccctgaattttaatctatgttagacttttttaccaaaattagacaaaagtccttaaatccaacaatctcaatagttcaggggacatttttaacgaccttaaatgttccagggatatgatttggtacatgtcaatgttcaggag

SEQ ID NO: 404613 - DNA, 627 bp, Cannabis indica
aattctacaatacaccattcatattttattacattctttttatatcaaaaaatttacatacccaaaataagattcaaacagtatatttcacgcgtgacttttttatttaataagcgtgtaaaaaattatagattatttaaatattattttcgatattataaattagagtaatttatactataaatatataagtttaattctcgcttgtagataaatatatacctaaatttaattgtttacggtaatagtatttaacttaaattaatagctacatcacagtttttaattagttcaggtcattaagttttttatttaaaaattaatttaaatatactaataaaaagatgacacataaataataactcgagacttaataaataggtatttaggctacaaattattttaaatttcttaaatttttacaaaatatcttaaataattataatccacactattattaaaaaaataaactaaaaaattatattaaaagttgaaacagataaaaatgtatcagtgtataattggttaaaaaataaaaaataaataaaagagtggtccattgttttatgcggcggtcctataatgtaatagacggcttggcttttttgagcttttaatttgtatttt

SEQ ID NO: 404614 - DNA, 648 bp, Cannabis indica
aataaattagaatgatatacctcgatctcataaaataaaattaaatttcaataatttattatatataaatttctaatggcagtaaaataattttttaatataaactcaaaaaataattaaaaattatttaaaccgccttccctagtttcaaataaaaaattactgaaagttataaattacaaaaagatatgagactctcgtagatatatattcagcaagaaatatctgaaataaatgagaaaagtgtgacagctttttggcctcatcctctctcatacacataccaaaaatatatatatttaatgtaaaaatgcattacaaaattaatacaaaaattatttacaccccaaaaattttaaaagatactttattttaataatttttattttatttaaaatttatatctttaattatacgaatttttttttaaacttttttctttacatttatatttttaaaaaatatacctatcaaacaaaattaaattatattttaaacattataacaaaaaaaaattatatgaaaaaaaaaataaaaaaatatacacatcagttaaaaaatattatgaaaatgaaattaaaataagtattaaaattaatataaaataatgtgaaaaaattttttaaaaaaataattaagagtaatttt

SEQ ID NO: 404615 - DNA, 553 bp, Cannabis indica
ggttaaaaggcatgcgattttggagcttattttccaactgtccccccaagaagtgtgttgggagtattttcccaaaaacagatccagcggtaggtttgaatgagcaggcccctactaatatagatgaggataaggttgacaatgtatttgaccagtttgatgagtttgatgctcccttttacaacaatgatcatgtggtaaatttgaacgaggatggtgatgcagagttgcaacttggtgaagctatagaggtacatgctttaaggttagaactacctccgctacctccaatgaaccagaggacagagcatgaaagaagaacccctcgtagtgaaaatcaccaaacacaaggtactagtagcaaccagccagttccttctcgtagtactgtaccatttgattttgaagtttgtacaaaattcaaacctattgtgtggacaagagaagacatagaggaaaataatatgtatacaacttctcttagtggtacaccttcacgggaaatgcacgttggcaagttgtacacaaataagactgaattgaaaagtgtagt

SEQ ID NO: 404616 - DNA, 722 bp, Cannabis indica
aacatttagcggcctttagaatttgacttttttaagttgcatatttaattttactcaaattattgcactgataagggctggcaggccagatatgaaccactaggagactggtcggccagggtggcattagtaagaagctggctggctaaaagtgcaccactcaggggctggccggccaggtcttctacagtcactaactcagtttttttttatttcaagccatgttgaagtttagccttacccatggtagaggaaaggctcttctggcgctcatcaagagaatcttaaggccaaggagaccgagcttcaggtagagaaggacgcacatgtttgaatttgttttaccaagatctagatttactaccatgtatgttgtttaacatcctaaatatgaatttactaaaacaatgtaaataaacacatataaagtttcagaaacctaacagtgggtgcagcagaatattaatgtctccttccactcagatctctaacccttgtatcctgtctatagcagagtatcaccaagatctgagtccgaatctccttctcttgaaactgtattattcacagccttacacactatgattgagtaccacttgatgtgtggtgggcacttactctatcactaatagggtatgaaaatatgaagcgagaaagagaggagagtagtttgaaataggtagaagagatggcgcagaaagttttactgaaggcttgaattt

SEQ ID NO: 404617 - DNA, 514 bp, Cannabis indica
aaaaaaaaaaaaaaaaaaaaaaaaaaaagtaaaacttttaactgtaaacatgcagtctaattccatgtggttcttgattgtgcttctattttacctcttttttttttaccactatccatttttttgttatcaaatatgtaatgatctttacttgattgcttattttctgttgagatatactgttttactagatgctattttcagaacatacaaattgaagatgaaaaaaagttgatgattagtttttggcttgcttccttgctgtaaactagtgttgagaaattagtgttgattagattgaatttgtcttgcacaggagggaattaatggttcgatctgtaatctccagaagacatctcagtctaaatgcaatggtagtagtataaataataggaaaagcccaaaggaaaacctctcaggagaggtttttcagttcatcaaaagacaatttgtagaagttatgcctcaaaccaatgcagggacaagatgatagtagttgtcctagccgaaattc

SEQ ID NO: 404618 - DNA, 824 bp, Cannabis indica
gccaaaaaatctgtacaaaaaggtttgggcaataacaaccctattattcatacgataatgagaaatagcacgactaactatgtaaagaactatacctaatgaaagatcaaaaacacaatccatagggccataacaatcttgatatttcccatatttgactacagagttagcaagtcttgtggacgaagcgaaagcgccaagaaccaacgatccaccagaacacaggactaaaatcctgtagtgtaaataaaacaaactgtactacaaaaatatagtagagtagtgttgtaagttgtaataccgttattaaaattaaaaataacaaaaacaattacaaacataaatattttacttaagtgagtacatcacttttgttcttatcatagggacaattttttattttcagtatatatgcatatatatgatgaaataaatcataattatagtaggtattttgttcgtttttgggaaattatgagtaatttaaggtgttgcaaatgttattcaaatagtcacttgtatgcgtgcctgtttgattttatgcacgtgcaactggttttctttaactttatttttgacgccgtaaattattcagagttgctaaaaaacgtacaaaatgtctactataaatacagtgtacacaattttatgtaaaagaaattggaatataatttctttaggtgccgaaaacataaaacgctcacatggcagggcaaaagtgatgcttgtacacttttaatgggtattatccatgagtaggtatcattagaaaaacttaagtctatgctgattttgctatttaattaaaaaatatctcttatttt

SEQ ID NO: 404619 - DNA, 684 bp, Cannabis indica
tctccccttaagaaaaaatataagttctcttagggagttgaaagaggactataaatgtaaaaaaaaaaaaagaagtgataatagtagtagtggttaacggattggcttaatcaatgcggggtggaagacaaggccccctgcgctcctccagcagggcatcaagtctcttcttcttctcccagaagcagacaagaacctcctcaggctttggataaaagtcgagcttaaggttttggccattagtctgccaggccataaacacaccatcatcaaagcgtttggtgcagtgcttgcagacaacaggggccagaagctcatctctcttcgccttcttcaaggcctgatctttgaaatccctgagctccttcacctcaacggtcaagttggccgtcgtctgcaagtcagcttgatgcagctcctccattgacttcagcgtggcagtcagatcttcaactgcctccttggcctccctcagctcacgccttgccttagccacggcctcatcccgagcctgcaactcctcttccttggccttcagcgcctcatgatgactcctcttcgcctgagcctccctttgttgggtgtacccatggtcaattaaagtctttgagaggcgaccggtctctgcagcaatctggcaaaataagaaaaaagagtttaatatggaagatcaggtgccgcaga

SEQ ID NO: 404620 - DNA, 934 bp, Cannabis indica
ggctgaatagacaacaccttaaaaatgtaaacgaaacagtactttagaggattttcccaccaaaatatgaggttagatggttttttgcaagtaaattgatagttgagggggttttgccgcaaattactcattaaaattacattatttatatttcatttaattaaacaaatttaataaaaaaaatataaaaattattttttagacacattatatagcgctggcaaaattattttaaataatttttaaaaaataaaagatgttttgccagtgcagttacatgtgccgacaaaacttttttgcaaaagaggaaatatgcaggaaacattttgtcggcaacttatcttgttggcaaaacttttacgacagggctcaatcggcgactaaatatcgatggctctagtttcactaatgacttgattcgctggtaaaatactgtttttcgctggcgaatcaccctttcctgacaaattatcaccgcggtaactttttttggtaaattttctcgccgaaaaaaaatttgctagcgatttaaatagacttttttcgacacaaaattttgcccaaaaaaagtcaattttctcgtagtgtaatatttctctttttttaagagtattgttattatttcatatatatataattttatgtatatatatataaaaaaaaattatacataactatgaacaatcactacataaaaaaattttactctatatactattttttaatattttttttataatttataatttaagttgttctggtggtttctatgtgatttgttatgtgaattttaattgtaatttaaattactctgttagttgctatgtgaaaattttcgtaaaaaaaacgaaaaaaaaaaactaacttttcaaagtgtaaaaaaataaataaaaaaaaccaaaaaaaaaaaaaaagaaaaaaaaaacaaaaatta

SEQ ID NO: 404621 - DNA, 569 bp, Cannabis indica
agaagccaaagatgacaaaaaggtggtgagtggtgacacaccacacgttgggaggatgcgtaaagggcattagatttttgattgaaattgatggattactattctagcagaggcactgtcattgtccaactacctctaatctaaacaagaatttctgattcagccgaaagcaacacctgatttcaaccgtggaacccacccaacattacattattttattacatattgtcatgacacaccaatattgagaattatggcttgcatcacaaaacctctaaattaattgaatgttttatatatatagctgaatattttactatttagtccatgtaaaacaatgtgaactaatatacttatactgacaacctataattaattctttataatctttattagagtaaaaaagtattaattatggacaccaaaatactaaaaataatataaaatataaatattttgtgtaatgaccgagagatctagctttttgtttaatgaaccatcatttaaaaaaaaagaaaaactaatagtttttttatatttttttttaaattaaaataaataaaacttaa

SEQ ID NO: 404622 - DNA, 520 bp, Cannabis indica
tttaatttgattgatttctcattttcagcaccgttctaaaatattttgcagagggaaagactgattaccgtgctaggattagattgattaatcaggacaagaacaagtacaacaccccgaagtaccgttttgttgtccgattcgtatcctttatttgcagcctattgttttttttaatctttggatgtcttactatttgcagttgttattgttttaacttgtgtaagctttacaaccatgtgattgcattaaaaaactgtgatgtgcatttctatttctatacagtaaaatcactaaattaaaatgattgccatctcgtacttgtttttttattattgtatctgaagctttatgaagttttctataatcctacttagtaggcataggtggatctaatggtaataaagctgaatcagctctggcttacacattgccatgtaatgtgttttttacgacatactgatgtaacagttaaatttgtctatgtatatgtttcaatcctttactctgatattagacc

SEQ ID NO: 404623 - DNA, 751 bp, Cannabis indica
aagcttatagacctaaaagaaatatctacaccaaaaaagtctggtgatcaatactatccagaacaaccctcttgtagatattgtccacaaccctatttcttcaatttcttcacttttttcttccaaaataaaacctaactttcatttactataatcatctaaagcctcaagctcatcgcagtaagtgcttgcatcaccttgtaacgtgcgaacctaggcatcaaacctactgtaacgtttcgaattcaagctcgcctggaaattataattttgggtattgttggaattagacgaatcggattcaagatcatcggagaggattgcatccttaccctgagaaataatatgagtcgtccctttacaaaatggtgttcccaagctcattaatggcgtgactaaccgttcccaaagatccatgagccacctcgatctccttcttcacgacccgaactagaaaacctgacaaaatcccgccagtagggatttcaatgacagattcaaatttagtcgctagagtttagatcaaaccgccaaagctccatacaccaccaccgacgacagaaccggaatggtgggagtcgggaatcgaatctgggtcttcacattcttaatcgtcggatggttttttgggagaccaggatgtggatttgggttgaggaagatctgggttttcggagaaaacggttttgaagatcacagaaagaggaggaggagggggcggcgggtagggcaatgagagagagagagagag

SEQ ID NO: 404624 - DNA, 949 bp, Cannabis indica
aactctgtataaggctcgataatgagtccattatagtcaattgtataacttaggacttactatgtgtcttagtaagtgtacttaaactgtacttggtcggtaattgaccttgtacattatgatttacctagaaggtacccttaggtactgttgactagaatatgtttgtagctttttcaggttgctcacctccccttatctcttctatgcaggtggcattgggtgttggataggggaggtgacagttgcgcgtagatcccttatttgttttgtaattatggccagaacaaagtagacttgtcgtagagcgcctccatatgacccgccagggtggctacaaagggtagagtcaggatcgtggaggaggcttctcagtcccatgttgatgttgatccagagattgaccagggggctgaaagtcctgatgctgagtctgatcttgaggaggctgcacatgttagggaagaggaggtacatgacttgtactgtcctctccgactgtcccttgggtcgttacgatgccaatggcgattcgttgaacaggcttggtgaaccttcaatgtgaggcctagatcatgtcttggagtagtcttttgagcctaagatactggaagcgagatcatagggagacagttgggtctctcctgcttttaccctttttgacgaggcttttagcaagatacttgctagtggattagtgaggagtgtccgttgtgagataccctgtagagattaccggggcacaccgggcttccccctagggttggttggccttgtcagagtgtcatattgagcatggggcggtattgccacttcatccatacttctgagatattgttgcaactctgagatgtgtccgacataaatcaccccaaaaagcatcaagtttgtcttatatgggagctaggttggcctcaacctactccctatgagatcggatattttttta

SEQ ID NO: 404625 - DNA, 565 bp, Cannabis indica
tttaatttaaaatatgtacaaatatcaaaatatctgatcttataattaaataatatataaatattaaggaaactaacaaatttttaaatctaaccataatttaaaaataaaataatcaatttttaaatttaaacctcataatataaaaaagtaattataatctattaaaaaaaatattattaatttaaaattgatatttaagtttaaatatattaaaaaaatatattttatttaattttggagtttaaaaataaaaaaatacgaaatttggtgaataaacaccaaaaaatcgcattttagctgaaaatacgcaagctgcacaggagaaggggtgctgcaaggtgcatgtgcggggattctcggcgccagcagccttcagacacggaatcagtaggggcgagcgcacgggttcagacaagatttgtctgaagcatccgcgtgtgcagcctcgtcttgtccgagtccctgtgcgtgcgatgctcgacctagtgcagtcaatggacccagattttcaaacctccataactctctcatttttaatcggaattaagttaccgtaaaaaaa

SEQ ID NO: 404626 - DNA, 427 bp, Cannabis indica
atttaaaaaaaattggtgcagagaatctttgaccaatcataatcaataagtaaaattttaactaattttttttttttttggtaaggatattttaagaatatttggttacatttaaatatgattttcgcaatcaactaaattttattaatgtattttttttttataattaattaatgattaatttatgaagaataaagtgttgtagggtaataatgaaatggaaagaatttgggaccttttagacttaattgtatttttcaaaactcaaatgtatttgccaacttaaattgaaagttgataaaaactatataaataaagttcattgagttttacaaaaatgcaaaattaccctaaaatttaattgattactattaataaaattacatgatttaattttttaaaaaaaaactaaaaaaataataataat

SEQ ID NO: 404627 - DNA, 1159 bp, Cannabis indica
tccgtctcacccaggggaatgatattcagatgttgctgacctacagtttggtaggcttttcgtatcaacacggtagcttgtcgactacgattttcaatctctgtatgatgagcccttaatgcctccatctctctatctatccactcggtaaacatacgcctttgttcttcgaatgcaagatttaccgcagtgcggagttcgtcctaatcatgatgtagggtattgttatgaccctgcatgagtccaagagcgtcatggagattttgtacctcattagcatctccgatggtcgtctgggtgttggttccaggcggaatagttgtgttatgaatgccctggttgggtgcggaactgttattcccagtctcttgcacaccatgcacgatttcatctataggagttacacagttatccacgtttgtcggctgtccaggattgacagctggcgggacccttgtgtttcctgggtgctgcaatgcaggatccaccgtctatgaatttgttggatcagtcaggccactacgagtctgcaccattgtatttatggttagattttgaataaagagcaattcttgattcttctctcaatgaacgcaccaaaatgttgacctcgcttttagccaacgacaacgagtctgatttagtaagaaataagtgatttatagcaatctatatataataaagcaatataaagacaaaagaattttatgcaggttcagccccgagcagttcggtaatagtctaatccttgttacttgtattgacttaagaacaaggagaaatgttccttttcttatagctcgtacaacaatatctctgaatatgtattcttagataatatctttagggtatagtctcgactaaactatttgcgaccttttgcccagtgaacatgcatcgctatttatagggctgtgaacttggagaggaagtccttcccctctcgttacagtggatataagcagaaagattacacaatccataaagtatacactgatggtgggataaatgcggaatacattgatcgtgggattaatgcagaatacactgatcgtgggatcgtgggtatgccatatctctgtaatctgatccccaagtaataggaatttcgttgatgactcaatgcgaaagctgaattcgctaattgttggttgctctg

SEQ ID NO: 404628 - DNA, 509 bp, Cannabis indica
caagcaacactgttgtctcaagtaagatttctattcacggattaccttctaatgttctctttgattttggagctactcattcttatatagctactagggtaattgatagtatagacaagccatgtgacctacttagatgtggtattgtgatggaattaccctcgggagaaacaatgctatcaacaagaagaatgcgagatgtacctatcataatcgaaagcaaagaactcgtgggcgacctaatagagctgaaaatgaaggaatatgatgctgtacttgggatggattggctatctagtcacagtgcgacaatcaattgccaaaagaaactggtcatttttgaaacaaaggctggggatcggtttattttcaagggcaacaagtttgccctgaggactccattaatctcttcactaaatgctagtcggctaatgaaggagtggtgtcttgcattcttggtcaacgtagtggatcgagcaatagagacgcaactaaatgtggagaatgtg

SEQ ID NO: 404629 - DNA, 509 bp, Cannabis indica
tttggaagtagtagcagttgtagtagatttgaattagtttggattttgagaactcaagctttgctcaactatagtgaatttcattgcatgttgttttagatgcttttaaggtgtgggttatgtttagattaccctgaattgctattctagaaaatttggtagctattggttaggttgggagctagttttggggacttaaaagttgggaatttttgaacccttgctgcctaggaaaaagcttccacgattggagaagcttccactattggagagcttccacgattggagagcttccgagattggagagcttccatgattggaggagcttccatgatcggaggagcttccatgatcggaggagcttccatgatcggatgagcttccatgattggaggagcttccatgatcgtaggagcttccatgatcggagagcttccatgatcggaggagtttccatgagcagagagcttccatgatcgaaggagcttcctattgggttttgtgcccta

SEQ ID NO: 404630 - DNA, 448 bp, Cannabis indica
ttggatatcttatattcggaatgcttaatttaatgaaattgttgtttcttcaaaaaaaaaaattacttcttaataatattttcataaaattaatgtaaaaaactaaaagtttaaaataatttttaaagatttattttgatgagcttttacatagtatatttttttttctaaataatacaaattaataatgtattcacttcacgtttaaatataatttaaacataaataaataaataatcacctacacaactaaattcaaataaaactaaaggaataactcttaatgtagttttattagtgaagttaactacttatataaatacttagatggcaaatcgaaaaatagtaaattttgttgtaattagtggtctatctacaaatattttaaatttagaaatagtcatagcattaggcatttattaatttttaattaaaattataattatta

SEQ ID NO: 404631 - DNA, 503 bp, Cannabis indica
tgaaggcttgagttctctagaataagattttattcccacagctttaaggtcgtgcacagtagtcgccagtcacgatcttgaacagggagacttccgagaacttcagcagtttctctgcgagtcgcgtctagtgcaggtcgagccggtctatctgcgacaataaaaaagaacaggttagctcaaagtcacaaggtaacttgaaaattgactaagtaaagaagtacgcgacgtactaggtcgacgattaaagtcagtcctaattcctggaaccttaaacacataaaacaatttggatttccaatcccccatattagaaaccatgccttccaccccgttgatttcaaaagtggcccacttgctgaaacagtagaagccgttgtgaaaacctacactctttatgtcataaaaataactaaactcctccattgaaggctccctatgcacatactccatatacatcgcataaaaacctaaagttatgcgataactatttggagttagtt

SEQ ID NO: 404632 - DNA, 782 bp, Cannabis indica
aataataataataataataataataataataataataataataattgaactacttttttgggctcataaagaagattgtattctgcaatcattatttaaatatttaatttttaaatttatttaagcaatttattttatttatagttattgtatttttatttatcaatattttagaatataatcccgcatatggaccttggacgcaaacaccaaaccttgctctcggctcgaacctcaatctcgctggacgttcccttaaaatttatacacaaaataagttttacttttttttttgaaaaatttaacaaaatactatttttggtcatttttacacttttaagttcaaaaatatatataatacatttttaccgtgttctataaaaataataaaaaaaattcatgaaagtaacagaaaaataatatccgaacaacataaaaataatatacaaaataacaaaaaaccaacaacaataaaacaagaataaataacatgaaaactttaaaaagagcatatttttttgtaaataattaaaaaccgtaaaaatatttaaaattctgtacaaccgtatttttataattttttgttgttttatgtatttcaaaataatctttttttttcttttctaattgttgtcatgtaataccatattattattatttttaatatttgaggcgtaaatacttaagtttaattctggttatagataaatacctaagtttaatttttgacgataataatacttaagttaaatatttggaacttctgtaagtacctaatcatt

SEQ ID NO: 404633 - DNA, 656 bp, Cannabis indica
aagtatgccatagtggccgtagattacttgacaaagtggacagaggccgagcccatgaagagcataaccgccaagaaagccttagaaattgttatcaaaaaaattgtgtgtcgatacggcttgcctcacaagatagtatcagacaatggaaaggagtctgactgcgaggaattcacaaacttctacaaccaacacggagtcatcaaaagcttctctgcggttgcaaggccgcaaacaaatggacaggcagaggccatcaacaaaatactaaaggtcaccctaaagaaaaagttgctggcctacaaaaaaattggcctgaagaactgccacgagtattatgggcctaccggaccactccaagaaccacaactggatactccccacttctcaatggtgtatgaatgtgaagctatggtaccaatagaaaccttactctcatcccacagaagggcaacgtaccattcggcaacgaacaaagccttattacaagaagcgctagatcaaatagacgagctccgggatgagtctcagatatagatgacagcttaccaaagaaaggtggctaaataattcaatgccaaggttaaagatagaaaattcactattggcaaacttgtaaagcccgcttagttaatttggaaattagcagttgttta

SEQ ID NO: 404634 - DNA, 787 bp, Cannabis indica
ggtggcgtgctgggccacttgagtgttgatgcgtcaatactacgcattgtctttttggtacaagccatcatcctatggctggacagaagacttaaggaagaatgactgtcactcgaagaagttggactagaacaaagacgaggatgatcctcgtgcaagagttgaagcagatcctggtcgatttggtgtatgtttccccaaaactcaccagggttcatctacaaaagacaacacacaagatgagtgtttggtcgggatatcaaacgttaaaacaggaaaatatgccgaccaggagtactcaacagattaaagagtaagaatactcaacgaaaggtcaaatctcaagaagtttggaatttttgcgagttagggcaaaagattgtcatgaagattagaataagcaagatgaaagacaagcattatgcagtttaaaaagaaagcattatggacgatgaaatcgcatgaaccgtaacaaaggaaaatcgcaaagtttctaaacttagggtttcctacatatcttctacggcgaaatcgaaagtgcattcagaaagcaaatgtgaaaagtacacataaaggaaatcgagaacttactcaaggaatcaagcgtctgggttcaagttacgtcaagccaaacgagcagttttgatgaaagcacttcagcaaacttgaagctaaaaacctctcttttcgctctgaacttacttagcaaggaaagttggtgaaaatgagtttgtggacaaatgctcactggtatttataggcagacaacgaaaaggggtaatcattt

SEQ ID NO: 404635 - DNA, 1415 bp, Cannabis indica
ccaggttgcctactttatcaacagaaacatgacctactcaaccatttctttcctgctgatattgttaatgatattttagacatcctactccatctaaaccaaacctaagatacccctatttggtaacatacccgttctggtatttatactatcaaatcttgttaccagctaagcttcacccttgacagtgctcaacaaactcccacaacatcacaaccctcggcttggtggtccactttgtggtccttttctagccctctaaacttaaatactttgtttatagggccaccaaaaatacactccctaccatttaaaatctttttaaaaggaaagtggtggcatctccaatttgttacagatgtaacaatgagctagaaaatatctttcatatcttattttttttctctagtgtcagatagctttggaaatgtgcgattttttacttgcatctcaaattttctaaacacattaaatattttgatttgattataatgcacctttccaatattttaactaaacaagaactggagttttttgtttgcatgtgttggcttatttggcataacaagaacaagttctttcacaatggcttcatggggcatcatcataatcttttttatgaggctagatcttttattgacaataataaccaagcaaggatgaaagatttgaagaacaactcaaaggcattggattactctcttacactagatatttggacgcctcctccctctggccttgctaatttcacaattgatgctactattgataggcgatccaacaaatcaggctttgttggagttcatcgaaacagtcaaggggccaccatagcagccattgatgcgcgttttacaagagttagggaagctcacattcaagaagtaaaggctctaatcatctctctttaatagttcaacaaagaagaattcccaataaatttcatagagaaagattgaaaacttaagttgatgcaattacaaatccttcaaatatcaatacagtttttggagatcttatcttccagctgaagtcacttctatccctctttccaaatgctcagcttagtcacattcgtaggacaacaaaaattgctgcccacaacttagctaagaaggctcttaggcttgaagaagatacttggtggattggtgataggcttgttgctgctcttcgattctctaagttttgacagcctctttactctaaaataaatgatacctcctaatagtgtaagccaccactaatatctaatatgtattgaattaataattagattttggctagtttggaaagccgtataagggtcgtattgtattaaataataaataatactatgtttggataaagcaatgtattgtattaattattacgacaaatttttttatacaatgtatgttgtattatctaatacataa

SEQ ID NO: 404636 - DNA, 796 bp, Cannabis indica
gggcactgcccagtggccgcggcgagaccctatgtggccgcgacgggatagagtgttcaccgcggcggatttattactgtcgcgacgaaatactcttggcagaaaagggggggggggggttcgtacactcactatctcgctgcggtgaagccatatgtggccgcgacaagaatgcccagacgtggataaataggccatctcaaaatttcaaccccaaaacacccattcttcaaccctaacttctccattctgatttatccatccccattaccttaaatctttaatctcatctcacaaaaaccatttttcttccattaatttcttaatcattcatccctaatcacttcaaaactctatttctctcatcaatccatcttttcctttaaaagccacactcaaatccctaattctcactcaatttcaaaaatccactattcatcaccttatacctcaagaacttacaatgtcttcatcaattgaggtagagtgaaggatgtcttcatcaatgtaagtaatttcttatgattatctatgaattttttttagataattttaaaaattttgagaatcttgtgaaaaattggtgtgtttggcttattgttgatgaaaaattgtttgtgattgaaagagtgagtaatttgtgattgggtattcacccagaaaagaggaaatttaaggggaagtgctgccgaattttttttttcttgagtgttaagagaattgagtgagaatgggacccaaaagatcaagagtgagtgagaaaggtgcctcttcatccaacccacctaggtcatcg

SEQ ID NO: 404637 - DNA, 500 bp, Cannabis indica
actaaaaagttataggatggagatcgagagagtgccacacaattttttaaatataaatttatcatatataacatgtacaacaatggcaataatgataataaagaaaaactattaccctaaaaaggaaattggcaaaagtaaatgagtcatacttgttatataaatgtaacttatttatattcattctataataatgacttgctccttcgtacgtagtaaaatgtataattggatgagttctttaaaccacttggaatgggaataggttttattattagggttacgattgaggaattttattgtatttattttaaataataacagactaagaataaatatttaaagtaaattttaattactttctttaatattactaaaattaagtaactaattttagtatcaaatatcaattcaaatattaatgaatttgttttatttttattttattattttattatatgtaaataatattttattattttattaaatataaataaaaa

SEQ ID NO: 404638 - DNA, 397 bp, Cannabis indica
tgaagtgttaaaacttcttgatgtaggtatcatttacccagtagccgacactaaatgggtcagtccagttcaggtacggcctaagaaatcaggtgttaccgttgtccaaaatgaaaaaggaacccttgttcccacaagaatagtgacgggttggcatatgtgcatcgattatcgaaaattgaatgctgcctcccgtaaagatcatttcccgctcccattcattgatcaaattcttgagcgcctagctggtcatcctttctattgctttctcgatggttattcaggttactattagattgagattgcataagaggaccaagaaaagaccactttcacttgtcctttcggaacatatgctttccggcgtatgccatttggactatgtaatgcaccagct

SEQ ID NO: 404639 - DNA, 671 bp, Cannabis indica
atatatgactttcatgatatctaagagagaggtattgtattttaattttaattataatattagtaatatattttaaattatctgtcatttaatttataatatagtttggcccccgttgaattttgactctggctccgccagtaataccttttacaatcagatcccatttaattttataataattttcagggagtattactagtcaattataaaataatatatctaaaaatattaaatatcacttatacctaatagcaatgctctattattactctactatttttgcccataacactacatttactactacttatgcactccttaaagccttatatcaaatagttgttctcccttttcgtgtttttgtacagcatgtatttaccaccattactcatctctaaatcattattagggtgctataaaaatagtgtatttctttttttaaaaaaaaatatattgataaaagtaaactttaaagatggtgtaaaatgtgtggtaaatttaattgatgttaaaaattatattaaatttagcacaaaaaataaaataagtcataatttagtctacaatatgttagaaattttatatatatagataaaatatataaatgtgtatataaaatggagaattaaataaacatatacacaacataatatccttatcagtcctca

SEQ ID NO: 404640 - DNA, 707 bp, Cannabis indica
ctacacttctagcttcgcattgaagagactttccaactctcagtctcgatttcaacatagtgttagaatttggaataagataaatgagattccatctcaaaaccaattggcaatgggaggagtatcccattcctcttatatattctattatctttccacacattagcaatgtggaattatctaacacataacgagtaagtataactatttactcatctctttccttgtttcttttccttttttcttattcgaggaacttaaccaagttggttttgatgtactttttttggttttaggtcatgttgaaatcatccaagagtttcttataagcactctccggattcaagtgagctaaggaaaaccaaaatatcatcctccatgttgcggcggctaatgggagggacaaagcagtgagttatattttaagaaatacgtactgagcttgaaatgcttattaaccagaaagattgcacttagctcccgatgccgctcatgcaaaagtggtcaccactctgacttgggattcaaaacttgacttaaacgtcttgaatcacatagtaacacgcccctagatgttgctttgaaccctcatagatggtgcacaacatcaacgcctcagccctccactacaaaaaactgctacttttagtgacaattttttagccacaatataatttttttgtaactaaatgtgacttttagccaca

SEQ ID NO: 404641 - DNA, 471 bp, Cannabis indica
aaaaaaaaaagagaaagaaaaatagtaataaaaaaatgacatgatttttatcaaccgaccgttcggttacgatttttattttacaaaaaccgtaaccaaccatttagaaattataaccgtacaaaatcgaccgtacgatttttggcagtttttagtggttttttggtttggcggttttggattggcagttttgggcagtttattgcagtttttggtggttttggcagtttgttggtttaaatatttttttatttcaaaaatcaaagcagaccgccatgtcaaaaataccaaaaccgaaatcgaccgccaaattcgatgataatgtgaaactaaaaattcggttacagtctggtcgatttgatggtcggtttctattttttggtttttatgaacacccctaactccaatcccatgccaacatttgttggaaattattttacaaggatcttcaatctactcacaagtatgttg

SEQ ID NO: 404642 - DNA, 825 bp, Cannabis indica
cgaaaagacaaactttaattctcatatgaaaaatccaattctcaatcccaataatcaatagaaacaacatcaaatttcaagttatcaaaatctataaaaataaataataaaaaaaaaaaacagatctcataaaacacaaactcaaacattaaaaacacatacaataaaattcaaacccagaatttaacacacatatcaggataaaaattaaaccattaatgaagatttatgctactattttttgaatttcgatatttattagcaataaattaaaaatattttaagtatttatgtcacaaattttttaatagtaaaataaaatttttaatataattttactaagtaattattattaattaaaatacacaatttttttttatatataatttaaaatattttatatatccgtcgcgaagcgctggatgtttactagtatatatatatactagttagatattacgtgcgaggcacgtatatttagttttatgctgtgttttctattttatttaaaaataatacaataaataattaaaaaaaacatattattaattattatttgaaattatttttaggtatattaaatagtagtattgtaaattgtgtgtcagtatattttataagtaaaacataattgtatctataaatttatgatatgtacattgttattaataataaaaagtacgttaatcttaatatatacatactcatatagtagttatccttgacgtgaaatttttgtatttttttttaggaagcatgggttctcccccttaagcaactcaattgatcatatactatctatatgataaataacaaagttaaaag

SEQ ID NO: 404643 - DNA, 739 bp, Cannabis indica
aaaataggaaaaggcacattagtacattagttgaaataaagtgaaaagaatctaactctaatgcccatatgtatatttggccctaagagtaagattcaacccaagtctttattccaagccctactcatctaaacctaaatctaagtgaagcctataataagaaagagaagagagctttgtctgatgattttgtaagctagaatatcctaaaaaagctcactttttcttctcttttattttcaaaaatttagaggctattttctcttggattttttcataaaattttgtgctccttggtgttgagaatatgcccatagatatcaaatcaatactcagcatagtgagaaagattatgtagttcaactgtcatcaaaaagaagaatctaggttcagatcttgatcatactctgccaatcaagggttaaaggagtcatattattttgttgtcatcactataaggatttattaatccctaatgttcttatttatcgtttttaggaatttcatatttaggatgttagattataaaattataatcaacatacataaaaatcgtcatcctggtaaaataagtttccaaaagttatagccccaaagtcaactagaccaagtcatcctaggatgacattataggctgttaggcaatccattatcacaaaagtacagtatttgaaagttgatattgtaggaaattattttaccaggatcttagatctactcacaagtatgttgttcaaca

SEQ ID NO: 404644 - DNA, 569 bp, Cannabis indica
aagaccaagaaaaaaacgaatggacccaaggtctttgagtttaaatttgccatgtaagtatgttttgaaatgagagatggcagtatcattaatactagcaacaattaatgccatccacatatataaggatggctaggaatatggtattagtttttttgatgaacatagaattgtcagataggaattgagaaaaactatctgatatgagagtgtgacttagtttactaaaccattgcttagaggcatgtttaaggccataagtgctcttgtttagtttgcacacagtgttgggaggagccttataacctggaggaattttcatgtacacctcttcatggagatctctatgaaggaagacattgttgatgtctaactggtgtacattccagttgtacattgcagcaagagctaaaaaaattttgagagtattgaacttagcaattggggcatatgtttgagagtaatcaatgccatgtctttgagtagcctttggctacaaggcgagccttgaagcgttgaacagccactacaagaaatgtcacttttaaaagttggtattgcgctgataa

SEQ ID NO: 404645 - DNA, 501 bp, Cannabis indica
agcaggttgtcaccaacatttcgagcaacagtgcttgctatttccagccaccatgaaccagaattttatcatcaagcttgaggtattccagtttgggacaatgctatggatgctgagattgaagcacttaaagccagtgacacatggattgttgtcagtttacctgatgatcaacatgctataagctgcaagtgggtttataaaatcaagctcaatgcagatggttcaattgaaaggtttaaggctcgacttgtagctaaaggatacaaccaacaagaagggattgattataatgaaacatttgcacctgtttcaaagttggattttgtgaagctcattcttgccttggctgctatacaaggctggttcttacatcaattagatgttaataatactttcctacatggggacttgcatgaagatgtgtttatgactctacctccagggtatagtcttaagggggagctaccacctattgttgtttgcaaattaaagaaatct

SEQ ID NO: 404646 - DNA, 471 bp, Cannabis indica
gacttctcttgatgaattactagacaaggtctgcccgcctaccacttggcccacaggtggaacctgtgaccggggattgggcggctgacaatttagtctgagaggtgttgatcgttggatcttcgtctgtctcgcccaaggggatgacggttagaggctgttgtccagtagcctaataggcttttcgtatcaacacagtggccttccgagtacggtcgtcaatgacagcttgttgagcccttaacgtttccatctccttatctctccattcaacgaacatgcgcctctactcttcaaacgcgagattcaccacagcacggagttcctcctgatcaagatacagggtgttggtatgaccctgcatgactttaatagcagcgtggaggttctagatttcagtgtcatctccaacggctgcattatgaatgcccttgttggctgctgaactggtattcccagtctcttgcacac

SEQ ID NO: 404647 - DNA, 529 bp, Cannabis indica
acccgattccaacaaagtgtagattcaggacaagagaccagtctatgaaggatagtctcatcttcactttgacaaatagggcatagggaggtcacatgcacatgcttggtgcgcaattgtaccattgttggcaagcagtgcataccagccctccacatcaagtttttgacttttggcgggatttttaatttccacatatgcttccaataacgcccccagctccttgtcattcccgttccatcttccttgggtatgttgaagaagattatatgcacttttaactgagtatacccctgaagactctttagaccaaacaagatgatcattggcgttgggtcaagtgaagtggtatctttaaaatgaggagtctatccctttcttcaaacaaatccgaaagtatttccgtgtcccaagaactaccatcaacagttaaaaggcttcctaccttagcttgctcaagagtcgggtgagacgagatgatgaaagggttgtcatcatgaggaagccaagattcattgaggacattgat

SEQ ID NO: 404648 - DNA, 800 bp, Cannabis indica
gggcgaattttggagcaacatcatctataatatgtttctttttaagcttatttatttttataattagttttcaaacaatttagtaaacaattataaaataaaaagtgctttattagttacaaagtgtgaattgttatatatctagttaaagagtattgttattgaataccactagtactatcacttaattgcacaataataatatgcttgtgccttctcctatttcaaatcataaagcatatctaattgaacttttacgtattctaatagtgctattaatacacaattaaattttagggcgcttttacaatgcactccctcagaagggatgcactgatgtaccctctacttatttctacattcataagaattttttagtctaattttcttcatattcgtgtacgttatagttatttaagatatcctacaaaattttataaaattcaaaacaatttacaatatataaaggagtgttcaaacagtctatttcatacgagtgtaaaataaaataatcacgtgtgcaacacactgtttgaaccttattttcgacgttttaaatttttttgaatttcttaaaattttacaaaaaatcttaaataactataatttacatgaccatagaaaaaatttgactaaaaattaattttcatacaatttttttttttgaataaaagcatatttcattaatagaataagttagatctcacggtcatttatataatatgtttaacgggatggtagatagcggaatatcaccaaataacttgtgggtaaacgcccacttagtcacattatgggaa

SEQ ID NO: 404649 - DNA, 679 bp, Cannabis indica
aggacaactgagaagacaacaacgaggcatactctattctcgctagcaattggcttagaggcaatgctgcctgtagaagtaaatatctcgactcacaggcgagagttttataatcaagaagaaaaccaagaacttttaaaattgtccttggatctacttgatgaaaaatgtactgagtcgcagattactaatgcaacataccaacaccgagtaacaagatacttcaacaaaagggtgaaaaagaggcttttcaacgttggggacttggtgctaaggaaagtatttgcaaataagagagatgcatctgccggagtattcaacccaaacttagagggtccttatgtgatggaagcgatagtaggaacttgggtttacaaaattggctcggctgaatggctcgctgataaagaactactagaacgtggaacatttacgaccctactaatagtaaattgatgctgtaactcatatttctgatgtaatattttgaactttacttattaataaagttaattatttttcaagtaattacaaagtgttactctttaaaattacttgaggggcttatgtgtatgattaactagaatttatcaggaaatacataatatattgcaaacccacaactttaaaaattttgaaattttttaaagttttttaattaaagaacctttctgacgag

SEQ ID NO: 404650 - DNA, 960 bp, Cannabis indica
gatgcaggaatgataaaacagcaaaaattgcataagtgaggcccattatccaaggcccatggccggccacacttatagggttttatcatttattttttcattattttaatgccaaataattctaacttaaacctaggtggttacctataaatagatagtgatggctctcattcacacttaattctgtcagatgaaaactgagcctcctattcttttctctataggccgaaccacttctctcttcttttcttctctaaatttcgaaatccttgagtgaatgagtgagtgcccacacacatcaagtggtatctcaatcatagtgtgtaagactgtggaaaatcaaccaacaagaaggagaatcagcatcaaaggaaggagagaaagagatccaggttcagatattgataatgctctgctacagaaaggaatcaagggctagatatctgaacggaaggagtcattatattccgctgcacccaatgtaaggtttctaaactttatatgtgtttatttcattgttttagaattcatattaggatgttaatgaaacatacttgttagtaaatctagatcctggtaaaatatatccaacagtatattacacaatttaattacttaatattttttttcttagggatcacaaaattactaactgtcacatcattaatcatagagtatataagacatgacaataaaaacaaccatagaagaagtcatgatgttcttgaaatttaatgatgatgttaactattgacatatgataaaactctttttggttgttaaatctaattaataattaattttacctagagaattctaagacctaatcaataaaaaaaaattcaaaaagttatcacttactatatttactttcttttttgtttgacaataagttgactttatctctagttgccgataattataagaacatcaaattaaaaaaaaaaaaaaaaaaacaaa

SEQ ID NO: 404651 - DNA, 785 bp, Cannabis indica
ctaaggtaatatttggaattcacgtgtccttcgccacaaacacgtataacagccacatttaatataacaaagattttatttttattatgtgtatgtttagttgtatttatttttttttttttgaaaagaaagattttttatgtaactacaatacgtaataagtcacatatcataaataattactgtattttattatttgaaaaaaacaataatagaaaaatattttttggaaatgtgcagtgagtttcaataagaataatagaaatatattatgtttagatatgtaaaaaataatagaaagatatttttttttgaatatttgcaaagagtttaaaaaaataacaatagaaagatattttattagttattgttatgaccatattttgagacataaatatggaaatgacacattaataataatctcgaatattagtagaggttattgaatctaaagattatatttcctcaagagaagcagtaataaacaaatatctgtctcgcactgtgccacaatgacagtgacgatataacatagaactgcgaggtgatgatattctgagatcacctcgaaagctaaccaggatagcttagaaaaataaaagaactgaagctatatcgttagaaatgggagataacgagttctttaatgagcttgcaatttattgatccacatactcgtgagtatgttcaaagactaacaaaaataagtcaagagcgactgatctcaaaactcctaaagacaagtaaaagaattgcagtaaaaggcagtagcaaggataaaccct

SEQ ID NO: 404652 - DNA, 712 bp, Cannabis indica
gggcaggttttcactactattttgatagcccctcaattagcttccgagatggttagtgcaggaattgagtttgtagttggaaagttgcacaatgtgacactctagtctaatttgctagaaagaatcaaaaagtcacaattaaaagatcacgagctagtcaagatttgagatgaggtgatggttggtcagcctaaagacttttcaatctcgaataatggaatattactgtataaagctcgagtttatgttcctagtattgatgagcttaagaaagagatccttaatgaagttcacacctcaccctattcactgcatccaaaaaccaccaaaatgtattaggatttaaaaccctatttctagttgtatgggaggaaaagagatgtggtagactacgtgtccaagtgcttaacctgctagcaaatcaaagttgaacgtcaaaggttggcagggttattgcaacttttagtccttcctgagtggaagtgggaggacattgcgatggattttgtaactgctttgcctagaaccacaggaatgtatgattcggtatgggtcttagtggatcagctcactttctaccagtgaaagctacatatgcagtggatcagtatgctgaactgtatgtaaaggagatggttcgtttccaaagtttacatcaaagttttgggtgagtcttcagaaagctatgggtaccaagctgaagtttagcaca

SEQ ID NO: 404653 - DNA, 555 bp, Cannabis indica
tatatgcgagttgaatgttttaatgactcacattgatttggcatgtattataacgaggacaagaatacttgaaataatactaaagctaaaatatgaatagatgatctagctattcatatgagcaatcaaaagaatacaaaatagtttcagaggtgaattattcaaaacattttttatgtttgctctaaaagataaatgtttagacatggcagattgtaaagtactcacatataacagggcagaattgaactgctcacagattaaaactacacgcagattataactgctcagcatatatatagtatattaatatttacttaaacatattaaaggaaaaaaaataggaacaatgggatacttcctagagtgtcaataagtggatcagaatataaatgtttaaattgtgaaataaaatgcaacaaacatacatattcaattcaaacataagctacgaggcattaaaagtaaagataaatgcgtaaaaagcaaagttggccatccaacaatgcaaaatttcttacaaaaataatggcactaggggcaaccattgtctcg

SEQ ID NO: 404654 - DNA, 674 bp, Cannabis indica
ttttttttttctcttctagataaagcttccattttcataccttttcctttttctcttttctctctcactgtctctttgtgaagatatatatatatgtgagatatatatggattgtttgttgatgcaaattgagattcgttttttgtaattatatattgtaaatattcgatctgcgacaagttttttattgaagatcagtaaacatttctggtgttgtgtgtgggaagaaggagggatcagattttggtttgtgattgctccaagaaggagcttgattaggaaagaggtcaaagtttggtgttgagaggttgtttgttttcatttttgagaaattaagagaaaaaaagggttttgctctgggaaatgttgtatttgaagcagcccaactgcattgtatatgtatggggattgagtttgggttcattaggcgaataaatttttacttgaatagtttttgtataattctatttggcttagataattgcatgctctgctgatattttccctgagccggaggctcgggggatctgaaccatccatggcttcctccaatgatgagccctccattcattcagaagagcgtctacctccccctgaccatgcctatatgcagaaattcaggctctatgaaactcgatcggtataatcctattcataactttttatttttattt

SEQ ID NO: 404655 - DNA, 390 bp, Cannabis indica
tagctaatatacatttcatcattataaatcgattaaaccataacattcaacagtaggtaatataatcagtcatatgcatataaataaatatgatcacatatttgctttgcctaatcaggcaagcccgtgtcataatgcaatatcatatatgatatcattgcaccacctaatcaggtgagctacaataacttggcactagtatatcgcttcgtctaatcagacgagcccgtacctatgcccggtacttattatatgtcactgatgaccgtcccaatacgtcgccaggaagaaacctaataattgttttgatctatgccataactaagtattttcatatcactgatgcccgtacctacgactcgatacatcgccagaaatatcgcatcacct

SEQ ID NO: 404656 - DNA, 522 bp, Cannabis indica
gaccaaccggactgtgacacgtgaactgaagaagcaagacattgagataattcgactaagtctccttaatcaaaaggatcaccatttaacatgcctcccagagaaggcatgtaagtttcatatactcccggagagcaagactacaatgaggcatctccgggaggtatcaaatcctatctgaacagtcacctcgcatttaatgctgcatgggagaaagcatattgaaactgccataagtattaaagtctgacggcgtaaccccccttctacagctactacgctatgattaatgagctagtgacgggctactttatgagaaatcacatcactcaagaaaggataatggattacatccattaaaccgctaaaaagcctagggattagaccatgcatttcctatgatgtattcattgggaatgtgtgcctttactaaatattacagaaagacatgtacctcaattctagggatcaccccgcaaaaacactatatataccccccaaactcattaaggcaggggtcga

SEQ ID NO: 404657 - DNA, 625 bp, Cannabis indica
tgcttcaggatcactcttcccttcaaaagagggactttcatctttatatttcccaaataattatctacctggttcctagcttctctatcccgaccatacctcctatggttacctactggtatcccatcaaactcttcatcagaaattatcccttcccaatctaatttattatcatccctttggtgaaccctattcctttgttgtctccgttgggttccctcttcgtggttggattgcctaagactacgggacaatacgactccgtgtgggtcatagtggacaggtttacaaagttagcacactttttacttgttcagacgaatttctcaattgatcaatatgttgaactgtatgttagagaaatagttcgtctccatggtgtcccgaattccattgtttctgatagggatctgaagttcatgtcaagattctgggagagcccacatcgagccatgggtactcaattgaaattcagcacatcatttcatcctcagatgtatggacagtccgagaggaccattcaaattttagaagacatgctacgggcatttgtgttagattttgaaggatcatgggtaaagtaccttcccttgatcgagttctcgtacaataacagctatcaggc

SEQ ID NO: 404658 - DNA, 645 bp, Cannabis indica
taaaaaaaaaaattgataaaattctctcacacatgattctaaaattcttgcttattttaaaatttatgaatgcatttctttttttttttttaagaaaaaactaaatttatgaagcattaattgataatctcttttattttaaaaggcccaattttaatttttcgcctaaggctcccatatcgcttgggtcggccctgttccagctagttcgttaaagttaaatgtggatgctgctattagtggtgaaaatggtactattggtttccgggccttggttcttgattcagatggctttccgttggaaagttttgctaaatctttgactggttttttctcccctaaagaagctgaagcattggctatttgttatgctttaaaatggtgtttggaattagacttttttgtttttttttttgtggagaatgatgctgaaatcattgtcaattcagttaactcttctttagaatgtgtctcccaattaggttgtattgttagatctattattaggggtgttcattggatcacatccaatggatttggacccatccaatctaattcaattatttattggatattggatttttccatccgatccaatccaattgaattgagtcatccgatccgatccgatccaatggatgtatt

SEQ ID NO: 404659 - DNA, 556 bp, Cannabis indica
tatatatatatatatagcttagtgctatagcttagctaggtcccttatctctgtagataattgaaagaagaagaatcatataatagtttgttgaaatataattaagtagtaaaatataataataaagatataaatacgtcacacatatatatattataacaactagaataagtggacaaaatattccaatacactaatcttaattatggtttgttgttattattaattgaatagattagtttggacgctaattaataatattaagtttattaatcttatttttgtgatctatatatggattatatatataataattaataattaaaaaaaaatgattatatttcatgatccactgttatatatatatcttatattagatagatgttacgtgtcaaattaataacgtatcttaattttattttagtttttaattttatttaatataataattttaaaattaataatattcaatgtaataataatcattgaaatttgaaagcataatattaatttaaataaaaacaaaaattgctattatactttgtaatagtaatta

SEQ ID NO: 404660 - DNA, 529 bp, Cannabis indica
aaaactccttctaactcttgattttgggttgtacttgcttgaattcaagcttggggtttgtggcttttgtgattgagattgaaaagagttatttttgcattttaaaaaggaaaaattctgggtttttcctctaccctagctgaaccccctctccctcttttcttcatattttttattttgctaagtgttggaaaattcatcttgaaagcttggattcttggtgggttttatgcttagctttgtttggagctgaggtagttcttaaccccttttatttgttgatttttcttgctgaaatttattgttcaaaatcatgaaaatagtgtatgatattcttggtttgcatgtggggagaatcaatattaatcttgagaaatttaggtgtgaattgcttggttttgtaatagattatgttggttggattctagatgagcttttagggtaattttcatgtttaaattcaactttttgtttgatgtgttgtttctagaaaaataagtttgatgcttgcttgaaagttgcttgaagg

SEQ ID NO: 404661 - DNA, 552 bp, Cannabis indica
aaagttcaggggcacaatacgataaatatcaaagtttgggaggcacatggtcgatagatggacaattgacacgttagtcaaattgaatgaaattagagagaactccttaaatccaacaatctcaataattcaatagaaattttttaacaacctaaaaaattaaggtgtgatttaatacatgttaaagtttggaggcaaaaatcctaattagcctttataaaattttctcaaggttagctgcataaacaacccaacaactcctctcaaactctctcgtactctctctcatctctttctccgccagcccctgccacctccccgaccaccagcatccagcatccagcatcccttctcgcgttctcaacgatgacaacctctcttgcactctctttctcattctcgatggcaacgacgtcattctcgacaccaaaggtgggtagcgcctctcacactctaataaatctttcattctcgaaggcatgggagaactctcttctcgacaacgtacgacatagttgatgagagccatgttgatcatgttcgatgcatatt

SEQ ID NO: 404662 - DNA, 600 bp, Cannabis indica
gagaaacaactgttagaattctgcaaactaactttacaacaaccaaatgaatatattaataaaaataaccatgttattactttttttaaagagttttgtgttgaattgtcgatatgaaacacccgcaaatatcataaaaactattgtattgttatcagtttgtaattattgatatgtctagtttcaaagcatttgtaaattgttaatgcaaccacaatgcaacaacagagaaacgtaaaaactagaacaatatttctatgtacgtggctctagataaattcaaattttctttgttattcgtaatttggtatgaataaatccaccattaaaaatttgaaaaacaacgttagtgcaatgagaaatacattagctagtgttagtttatacttgatttggatattgatcatgaactctaaatctatttcaaagagatctaaattttatgaatctaaaaattgatattaggaggattagttttcttcgatttaatcgtaattcagggttaaattttagtttcgaactagtttttctgtccgatcttacataaatccaaaattgtatgtgtttggatttcttacggtctttttctcaggtgaagtc

SEQ ID NO: 404663 - DNA, 655 bp, Cannabis indica
aataaataatatatatttgaagatgataatataataagtataataaataattattgttccatttctaattctacttccaaaataccaaataacatcaagcttgttttcccctccttctatactctccctctttataattgtaagtggctatgtaattttgccaacaaccacttgggaacaatagttttaaatcttaagagatcccgtttcttaaaaaaatattgtctaaagagacacgtgtgtgtgcctgatgcctcgtatgaaatggaggattaaaataaaggagttttttctattttgggttaatattacttcaaataaacatttatacaactacaagcaaaatacacatttatgttgtttattaatttcaaatatactattttcaaagtttcttatttacaaaaatacggtagaaaaactctctcagatgcgcaaggagaagtgtgacacacatgtggctatgtgggcgagtgagactcacacgcgatcgagtgagagacaaagcattcaaagttgcttgacgctcacaaactgtagcgtcagaatgcagcaatggctgccacatggcgaattcagacaaagtggattttaacatgtagggcttcttttctcaacgcaaaacagctaaacaacaacacaaaaacaactagaa

SEQ ID NO: 404664 - DNA, 1285 bp, Cannabis indica
tttctaagtgcaaacctcatgagcgatgcatgagcatatgtgtgataagtaatgcgaagcctctgcccaaatttcaattcaactcttgcaatagtgagttcagtgagaattagatggcgatccataaacattatagcattagtcacatcttctagcagttgcaaagccttagaaatatctttttgagaaaaagaaaaccaatgtccttgaacatacactttacgaaagaattcagaattctcatcaagaaaatcatcaaacaagttagcataaaattctttgacaattccatcaatatatccttcaaaacaagtaagagtattttcccaatgatgatatggcataaactgtacaataccatagacacgatgagcatgcaaataataattcctctaactttcaaactttcgggtagcataaagattccaatcacgctgattttcatggtaataaaatctagaattaacagcttgagagggagaaatattaccaggagatgaattcttcataggttacttgcctttggcagtagcagtggctttggctgtagacgaagcacgaggaggtgctggagcagatttggtcaatggaggctcaggttcgagatcaatttcctcactatcagaggagacaccaaaatcttttggaagctcttttttagaaggaatagacacggatttggtctcggaatcattagaggggacctccatgggttcttcttcttcagaacttgaaaaagccgaagggggattcaatttcagcttcttggcaggaagaattggtctgtcatggcttcgtttagtgcaaagttccttctcgacagacacttgctgggcacgggtgcgagaggatgggcctgttggagtggatgcagcaacacccttacctattgcagcatgaggcaatgcagtagcacgaggaggagaacccttcgacgatgaagacgatgaagtgcagaatttcatgggtctcatagatttcctagccacttgtttcagaatctgtttaggcttaggcttcacagtcagagattcacgctgaggaagcgatgaatctcttgggtttgataaagttgcaacagcaggaggcaatttcggaaccacatgagcagtacttgaggaggcaggttcggattccaccatcttgcttagatgccctaggttcttagtcttagccatgaattcttaaaaagaggaagaagaaagaaaatacaaaagaacaagacactactaaaaaattagcttttcccaacggtttataagtgtcatttatactatttcccatc

SEQ ID NO: 404665 - DNA, 572 bp, Cannabis indica
attgtaattagatattattctttgttgtggatgtgattcatcatgtctagtgtatcctataaataaaattaattaataattctagtgttattacaaattttgattttatgggttggcttaaaattcatataaaacgatttatatatattatattcaaggtattacaaatttcatatatctttaaattaattcaatatgttttatttattctttaaaaaaaaaattacaatattttttttttttttttgtttaaatcttttttaagcaggagtatatatagacaaatttatataatagataaaaaatttgaaaaatttacaaaaatacattattatggaaaaaagtttcgtttttactttgtaaacttttttatttacaaaaatgcatcttcaataaaaagaataaatcgttttttttttgttgttgttttatttatagttgtattataattgtcatgagattatttgtctagttgttttttattgttttatagtttatttatagttgtcgtgagattgatttcttgttttttagtttttttttttttttttgagcaaagtatatttttgtaa

SEQ ID NO: 404666 - DNA, 1055 bp, Cannabis indica
tcaccagaacccgttatttcatcgttagttgttgtttcctctggtctacctaatcctttaccaaatccaatgttggcaatgttagcttcagcaatcaccaactccgacttgaatgagcacacaaaaaagtttgtgattgaatgcatgaaagacattcttcatttgttatcttctcctttgacaacaacatacatttcaaaacatcgtgctaacgtgggtatgcaacttggcatgttgagtaccctttgcaggcattataaatgtggcttagtagaggttgtatggttcaccgactctgttaatgatttgctcaaagctcaaggaaagtctctcacttctgctcaagttgttgagaatgcccttggtcttgatgaatctcttattagggaccttcttcgtcgtgatgaggataattcggcagctatagatcgtttgtccatatctgtcattaataagacaaagaattttgaagattttaaggtagaggaagcagagattattgcagcagaactagccatacaacaacgacgagctaagttcgaaaccaaaaaagcatcatttgaggtagatctttctagtctcaatgattccttgaaggagcaacaacatctcgctgaggagataagtcagttaaaggagcaagctcgtgtagaaaaattccatgaagctgaaagagcaaaagcgacactcaagattcaagaagaagaaatccagagaagactcgatgctttaactttgtttctccatatggactaaagatcttatgattttgattttaaaactttttttagttttagctttagtttttgatagttttatttttttttcttttgtttattagccttgaggactaatagtattttgtcatttagaccttttagaattttgactccttttttaggaggaataaataatatatatatatagatatttcttttttattttgtggctgcatccaattttgtttagattgcctacgtacccttttaagggatcaaaccgttcgtagttctttacaatttttttttaggagataaaattttttattttgtgtg

SEQ ID NO: 404667 - DNA, 1130 bp, Cannabis indica
gagcgtgtggaagtagaatcagactgccttgtgctatcaatctatccgtagctctttcaccagttgtttctttatttggtaagattattactaatgacaaaagttgttggatagaatcgaaagatttgttttgtttactttaagtttagttaaacggtctgcaaacaacggagctacacttagtttagcaagtattcacgtttgttctattgctgatcgtagtttgagtgtgagcaatatgcctcccgtcggtagttttatttctgtattgatgaacgtattggattatttaatgtaagtttattctttcgtttgtaaaaaaaaaaaaaaaaactataaaagtggtgagagattaagtacaaaatattgaccaatcaaatgttttaatcttgttaatgattaattacaaacaactgtctacttaacaatgggtttcttcttgttgtaatggtttccaaattccaccatctaatattaaacacttttaagaagcattaatcatgcttttctttcttttgttattgtttgttgattgaaatgatgccgatattatcgtttaaagattgcccaaatcgctaataaggcccaccaagttgtgcttataaaggaaatttaaccaaaaaaaaattaattataaaatattaaaaaaaaattcattatagaataaaaaataattaattaatcttattagagagacatgatcctatcaaatattagtaactccataactttctaatcatcttttgtttgtttttgtgaaccattactttttggaaggatccaaaaaggattataataaataatattaataatttcaaataataataattaggggtgttcattggatcacatccaatgtttttaggcctatccagatccgatccaatcatatattggatgttagattttaccatccgatccgatccaattaatttcatcatccaatcgatccaacatccattgaatgttggattggatcggttctatccattggatgtatttcatatatatttatttatttaatttgagtttatccaatattttaaacctaatattttttggatcggattggatccatccaatattttagatccagtatgtattggatcagactggatccatccaatcca

SEQ ID NO: 404668 - DNA, 1118 bp, Cannabis indica
gaccaacatatcatggctgcctccaagcgatccgcttttactccaacgagtccaaacccctcctcaaactagcttgtaaacgtcattgcagcagcatctacgactagcactcgagattcattccaacaattttgaacaaaaacacatcgaactagaacatggagagcaatttctggtgctgctaaatagaacggacaaacgaaaataattggcacataaaagatacttttagatagggtgaatataaaatataattttcaaattatatatttatttttttattccatataattttgattttaaagcataaatagttttcttttatatagaaataatatatttttataattttttttcttttgaatagaattacaaaaatacttttaattttttgtacgattgaattaaattttaacaatatttatataaaaattgagtactaaagaaaaaagaaaaattaccaaattttatttataatatattattactaaatacggttaaaataaaaaaaaatgatatcttattacctcaaatttcaacattattaatcaattaattttaaataataaaaaataaaattttcatcctgaactttgacccttatataattttgctttcctaaataattttttattttattttattttcgtaaaaaatgtccctcaaattttgaaaataattgtaagaattctccttcagttgtattttgctcatttttttgagataatttcttgatgtaggacggatttatggttaatttactgcaatttgagaagagattttttctattatagaccaaaaatagatgaaatttacatttatggccctaaaaaaggaaataaacaaaagtggaaactaaaaagttggtaattacaaaaataccggctgagaaaacggaaaccaccattctcaaccatttttcttccaaacagccgatccttcttcgtgacccagccgtccaaccccaacaacccaatctcaaccatttttcttccaaaaccagcaaaatcaaaatctaaaaaaatgtagaactcctaggaaaccagctgaatcccgaaaatccaaaatcaaaaacgaaaaggaaaaaaaaaaaccaggaaacctccattgatgtacaa

SEQ ID NO: 404669 - DNA, 829 bp, Cannabis indica
tattttcgttttttttttttttttttatagtaaattttcatgaacaacagaggatttaagaggttatttcatttgatttctctttaataaatatagttttagtctcatcacccccaagttaagataagatgtctagtaatacctgtaaacaacaacaataatttccaaatcatatgtctagtataagtgtgtaacttggtccaaaccatattacaaactaaccaaacttcactataatttccttactggtcagatacctttacaaagaaaaaataaaatgaaaaatagtttctaatcaaatttgtggaaaatattttcttttcttgcatgattaacaagtatgaaaagaagatctctataccagcttctaagagcaataccctttagcctattttaagttcctatttgagattaagataattctgaagctgcaaaaatgttaccaaagaaagaaagagcaatgaattataaaatattatagtatcattgaataaagacaaaatacaaaaacaattttctattgcagttagattaatattgtatcccacattaataagctgcatagaataaatagtggtctataggctcgtacttctgtttccttgatttctaaggagaggaaaccaaccctggtggatgaaccatgaccgttcgatcagggcgtgattaatagctagatcttctttagaagattacggctgtagaggatcgttctcagctagttcttctaagccggggtggttgatcggttgtctgacaggttccaatctttttacttattttttttagttaattttcattaacaactgaggatttaagaggctcttct

SEQ ID NO: 404670 - DNA, 750 bp, Cannabis indica
tatttttcaaattgtttattttgctatacataatttattaaattatatgattagaaatataatattaaaaatatctaaattttaaattaagatattatattatcttattagatagttaattaatttatatttttaaaataaactacaaatttgaaaattagttttatatttgaatttcagttagaatttaggatatttaggacattagttaaaatttaaatatttctttaaatttttttctaacaacctaaatgtcaaatctagttgagagatattttaaaatagaaatatctttacctactttccagttatctgttacatgtttgttatgtttgttgatttatttatttaaattttatttacaaacctattatttatttgatctaaattgctatgattaacttgttgacaaatctaatgatttgattttaatcatagtccaattatcaatagatcttataaataatttgaaacaagtaaatttggtaatttctttcatatgtgtaaacctagaaacatggtagggcccatccaaatcgtttgacctgtgtgtgagcctatatgtttgcttttgggcttagatgcatatagaaagcccatttaagtttaattaattaaatggactaggttgctagaataaaaataacataacatagtttcatttagcacaatttgtattgggcttattcaatgaataatatttatttatttaattgttaaattcctctcctttgggcctggtgtgagagt

SEQ ID NO: 404671 - DNA, 976 bp, Cannabis indica
ggggctaagttcgggttcgaattcagggtccaggttcggcttagggtctggggttcgggccagggtcgaggtttgggtttaaggtcgagtctgagtccaaggccggggtcggggttcaggttcaggcctaagttcgggtctcgattaagtccatggccgaatttgaggtttgggtttaggttcaagtccgggcctgggtctgagtcaaggtttaggtctagggtctgggtctggggtctggggtctggggtctggggttcgagtccgggttagggctggggctggggtttgggctcgggtgtcaagggctaagttgggatgagagtctaaaatattgattaaagaaaatattgtttaaaaaattgaaagtgattttttttttcattttcaagatttttaaacttttgattcttaattaaaaaattaaaagtaaaaaaagttttattaaatatgttattaaaaaatatttttacttttttaattataaaaaataaaattttgatttaaaaaatattaccaaacgtatttttattaagtgtttgactcacttttttttcattttaagagagatttaaaattattttatttgtctatattataattatactaagagttaagggattgagcaaataatagcattggattccaaacaaatgcatcattttgtactgtaaaagtttttacttgggttttgtaatggttcttttttcaataactcaagtatataaatttaactatgatttatttggacatgcacatgctaattcattaccaccgcacctagagaaaaagatgttacatacaacactatataagcactacaaggttttaagtttataagtggtataaatctaatatttatttaaagtggcataagtacacaatatttataaaactgtaattttctctaatctcgtgagtacatactttgttattgttttaaatataacacatacgtcgtattaggtcgtattgt

SEQ ID NO: 404672 - DNA, 706 bp, Cannabis indica
gcggcggggtcccgccgctaatgatattattagcgaataccattagcggcgggaaccaattccgtcgctaatggtattaatagcggccacttattagggcggaccattagcgggggacttccgccgctaataccctatagcggccgatttgggggtattagcggcggagtggttcgccgctaatatagtaaaatgttgtagtgagggagtccatctcctccataacagtatcttaaggagctttcttgcctatatgtttttgagtgaacaccatggtcaaggtgttgtggtggctatcaagctttcttaagctcttcataaagtaccaaaacatttatcgagatttttggaaactaaataaaatagagctttagaaataaataaaatagtaaataatatacacgtgatttttacgtggttcgggcgttaataatgcctagtccatgattcagttgtattggccatttgggtaagtatttgaataatacaatatatgtttaaagtataaaccctagctcttgttgcgatatttagcacacgcaagtgtacgtatcgtttcaagtagtagactcactaggagtgaggtcgatcccacagggagtgtagttaagtactttgaaattaaacttttacttctatttgattaaataaaagatagaaaaaaaacagtgaagtataagaaaaatagttggaagcaacaattcga

SEQ ID NO: 404673 - DNA, 669 bp, Cannabis indica
tttttattaatattatcaataatattatattatcataatattattttaatattttattaaaacttatcagtttgtacagtaaatactgataagtttatgtatatatattatatatgtttatatcacatgaaaaacagtacgaaatcttcttccttctccttcaatgaaactttccctttttttaatcattttctttgattttcaacctgaaaagctctaatagtagcgggatagcaaatccttgaaaagggaaagcttaaggtatggtttaattttgttttaagctaaaaacgattggttttatatagggatttcgtgaattggaatagttatggagcttctgacttcgtagaattgttctttggtacctatgggactagtatcgatgtttacttgttgaatttgaggtgattttcagttagaaatcgagttttgaattttttaaggcttagtccaaacgttaatgacagttttcatttaggggctcgattttaatttctgttacgcaaggatggtaatatttatggtatatatgcgccctgtgaagttgggagtgatttggataagttttggtagtgtttcggtgagtacaaaaattggaattttcgagttttcatagtttttagaaattcctaggagatcagaaatcgattttttatcataactttt

SEQ ID NO: 404674 - DNA, 1548 bp, Cannabis indica
agtccgagtgcaggtctcagtccatgttcgaaactggtccttgtctcaggtcttggcctggtctgggtttgtttaactgttcggttctgaggtcccgcgtttaagtatcgggtcccgatctcggtccaagtctaagttctagtcctagtccaattttaggtctcaatcctagtttgggtctaagtccgagtcctgatctatgtctgggtctgagtccttagtttgagtttgagttttggtacgagtccgggtctgggtcgaagtttaagtctcggttattgtcttggcccagttttcagtcagtgtctgtgtccgggtcttggtctgggtctgggtctgggtttatgttcgagttctagtacgggaatgggttctggtccaggtctcgggtcacgggtcctaggtcctacgtccaggtgcaagcttaggtccgtgttcgggcctgggtcctggtattgatcccagtctaggtccgggttgtgttcgattccgtgtcttgatccggttttggatcaaggtccagttcctgttccagggtccttattctggttcttgttcctatttccggtctcagggtctaagtttgagtttgggtctgggttttggtttgggttcttgtacgggtcttgcatctggtccaggtcccgagtcacaggtcctgggtcgcaggtcttggcgcaagtcttggtccgggttcgcgtcttgagctagttttgggtcctggtccaattcctgttccaaggtccttattctggttcttgttccgatttcgggtctcgggtccgagttcggttttaggtttgggttcgggtcctggtcacagtcctagtcttgttcaagggtcctggttttgcagttcttgttcaggttccagttccgtctcccgggtctggctcagggtccgcgtttgggtcttggtccgggttcgggctcgggtcgtggtttgagtccctgatctagtcccggtcacttgtcctgatctagttccggttaaggtcttgggtcccaagtccgagtttgggttcgcgaccgagactggggtgcggttctaggtcccggccccaattttgtgtcccgagtctggttccatgttttggtctgagtttgggtctaggttcgacagtgagtctaggtatgagttgggatctaggtttgggtctcgattcgggtctaggtcttggttggagtgtggcacgtggtccggttacaattctgggtctaggtttaagtccggttacggttctaggtctaagtaaaagttctggttacggttccagtcccgttcccgggtcccggcctacttccgtttttggttcaaatttttggtcacagggtacggattagggtccaagttttggtttgggactggctttggtccgggtcttggttcaggtcctggtcttgttatagttcgggtctcgggtcttgggcagggtcctaagtttacgattgggtccgagttcggggttgtgtcccaatagtcaagtccttgtttctgggtccagggttgggtcccgtctctcgagtttggggtcgagttttggttct

SEQ ID NO: 404675 - DNA, 581 bp, Cannabis indica
aggtttttacagaatcgtaacagctaagatgtgtatcatgtacttgatctaagctacagaaattagcttcaatggctgagattcttatgatactgatgatgataaaagcttgattacaaataactcaacatgggagactcaagatcaaacacacttgatctctgctacaaccttccatctcactctactatttctctttccaacaagatcgatacacaaaaataacataggccttaccttttatagagttaggtagttccttttttggacaataactcaaagactaacttaacagaattctctaaggcctatgttcatctcagaaactaacaacttaagtggctgaactaacataacaattccaccttagaacaatcactaaagcttaatgaaaagaaataaaaaattatcctcttagtcttagagcaagtgaggctcatcgaaatttgtcaatgttgagtaaatttaggcaatgcctaagtttttgaagactaacactcttggtgagcatgtctactgggttttcttttcaatcttcttggcttgaacttcatctttagacataatttccattgataaaa

SEQ ID NO: 404676 - DNA, 329 bp, Cannabis indica
ttttatttgtggcatttatgtgataaatagaaattgtgatttatatgatttgtatgtgtctgtatgaaatgacatatatacccatttattgtgtttatgcttatttgagtgccttgagggtaattttgtcatttcaccacctaatccattttcatcaaaaaggaaatatgattttattaaaattagaaaaataatttttaggttttaactgttggaaattatttttactctaatcactaaggaagttcgaaatatgaaggaagaagagagagagagagagagagagtggcggccaaaggtagagagagaggctctaggtttttctgaat

SEQ ID NO: 404677 - DNA, 839 bp, Cannabis indica
ctgaagaagcttttgcgaaaccacgtgagaatgcaacaaatgaagttaaggaaaagtttgagcgttggcagaatgctaactataaagctcgataccttatgctgtctagcatggttgataccttgaagacaaggtttgccaacactcccatggctgtagaaatcatgacagttaactgaactgtttgggatggcgtcagatcaagatctttttgaggcgacgaaaaactttatcaatgcacagatgaaacctcatcagaacgtgtgtgatcacctactccaaatggctagagctattatagatcaggaaactcaagtgagtttgatcttaaatagtttgacttgagcttttctgctctttatttcagattatgtcatgaacaagttgacttttgacttccacgagttaatcaacaacctttagacatttgaaaatttgattggaggactgcagaaaggaggaaacaaagctcgtagttctagtaatgcaactaatggtagggcaaagcttaaggtaaatattgtctctacttcaaaacccaaaaagaagaagaaatggaagaatagcaagaagcctcttaaagctattcacacaactaataagaatataaaggctgctaatcgaaaggaaaaggaaaaaggaaagttcttctattgcgatgaaaatggccactgaaaaccctagtgtcctaagtttttggcaaagaaacaaggtgtttttggaattattttatcaggatctagatttactaacaagtatggttcattaacatcctaatatgaatttctaaaacaatgaaataaacacataaaaattatcagaaaccttacagtggttgc

SEQ ID NO: 404678 - DNA, 580 bp, Cannabis indica
tgtggttgcgatttgaatttttcttaaattacgtggtgcggtgcggtttgctgttttatattgttgctatgcagtccaaactgcactacaccgcatattataaaaatactgatttttatatttatttaggtccaatatgtaactgcccaacctaaagcctactaattattgtattgttgaaacttgaagctttttttcatatttattttgaagccttatactattttcgacaggtgctgctaaaggtttgttgtatttgtgatagtttaattatttgattatagttcaaactgcaaaaactgcaccgcactgcactattttttgcagtacaatttttgcggttttttaattttacagtgcgggtgcagtttgaaaaattaaaaaaactgtaaatacaaattaatttaaaaaaataataaaaaactgcactatccgcaccgcaaataaccttagagcatctccaaggagctcatcaaaatttggtgtttgcactatcattaaaatttggtgttaaaaaattatttctactccaaccacaactaacaaaaattacactaaaaaaatattacttattattata

SEQ ID NO: 404679 - DNA, 1229 bp, Cannabis indica
gtgtgacaccagatgagttggagcactcggttactggtttaaagccagatgaggttgagcactcggtaactggtgtgaaaccagatggataagatgactcttgtgtaggtttagttgtaggtgcctgttgttggataggtgtaaatgctggaagcacaatatcagcaaacaattggtgtatttcagatggagatgttgatgaaaccaagggaaaaatggtttcatggaagacaacatctcgtgaaatataaatttgtttggtttcaatatccagtagagtataggctttcatgccatgagggtaaccaatgaagatagaggccctactcctaggtgtgaatttgtgtcttttggaagaaagggtggagccataggctaggcacccaaaacttcgtaggtggtcatatttaggagttgtaccatgaagaatttggtatgatgttaaacctttgaataatttggagggtgttctattcattaggtatgtagccgtttggactaggtaagaccaataaaccaagggtaagttggattggaatcctagtgctcgggctatgttgagtatatgttgatgttttcgttccacaactgaattttgttgtggtctttccacacaagagtggtaattaataatgccctttgaggcaaaaaaagattgtaagttcaattcttttgcattgtctgagcgaattgctttaatagacaatgagaattgagtacaaaccatattgaaaaaattgggaattatattttgaacatccgatttgttcttaagcatgtagatccaagtgaaccttgacttgtcatcaactatagtgaggaaatatttataaccttctatagtagttatatgaaagggaccccaaatgtccatgtgaaccaagtcgaatatgtctttggaaaaatgattattagaaataaatggcaatcgtttttgctttgctaaatggcaaatgtgacaatgtaaagaggaattaggatgtgaaatgttatgttctttattgaaaaaacttgaaatacacatcgatggatgtccaaggcgattatgccattggtttacattgtttttattgaaagaaaatgaaacagtagtagcagtagtggcagtagtggcagtagtagcagtagtagctgctgtagtaggaatttcttggtgaagcaagaacaatttgccatatttttcagctgtcccaatcaccacattcaaagtaggatcctgaataacacaa

SEQ ID NO: 404680 - DNA, 590 bp, Cannabis indica
gttttgagttaggctagacttttccttaaatatcactttttcaacaaaaaaatttacaaaatcatacaattatacaatatattattatatatacacattacataaactaacacactaataatttaacacacactcacaaattcacaattaaaaaaaaaaagacatatataatatctatacataaaaaattaaaaaaaaaaaatgctaaccgggattcgggcaggtttcaagttttgggttttcaaaaatattaaactcgaactcggcccggtacagaaccaggttacacccaaattcagtctactaaaattaaaacccgttttttaggttttaggtcgggtgagtttcgggtataaatatgcccttcaaaataataactattttacactcgtataaaataaaagaatctcgtgtacaataaactgtcttaaatttattttcagcgtattaaatttgtccaaatctctcaaaattttacagaatgtcttaaataactacaatgtaaacgactataaaagaaagagcaatttgcgacgaaacccccttatgttttgatttttatacacttaacccccttatctttatttttg

SEQ ID NO: 404681 - DNA, 634 bp, Cannabis indica
ttaaaattatttaattaaactatatttacttaatatttagttaaattaatactgatattaatgtataagaggattctaagtactaccggtgtcttttagtatttcttaataaaaaattgctaaaaggcagcaagcactagtaccaccctcgatgtaatattgttattagtgtaattaagtatcaggtctcgtataacttaacaaaataacttttaagaaatatcactaattaatcgtaagacgtcacttatagaaaatgttgagtactagtactcaatagcaatgctcttataaatatataagttttttttttaatttttataaaccctcttaactatgaatccacttgcacttaaccttttaaacttaaattttaaaggtaaaattctccaaattatttaactgttagcaaatttaaggaggcgtttggttgggaggaatgaaaatataggaataggaatgggaatgggataggaataggaatggaatggaataaaatttaaaatgcataaaaaaattgattaaaaaatcattaattttttttcttgttacattggaatggtcattcctttctttttaaaatagaatagtcattccaccaaacggtggaaagagcattccattggaatgccat

SEQ ID NO: 404682 - DNA, 506 bp, Cannabis indica
caccgagccacaaacctgaagaacgggatgtgtgcgtggttgggtgctcataccaaacaaagggcaatgctgcctttgcacctgtacttcaggaagatggcaaattactttcgcctctgtccgattgagtttacttcaaagggcattaagtatctgtctaccctgttcgtcctctacaccatccaaaagtggggcgtgccttcttcgcacaagattagttagttttttgacctgaagtctacccctaagaaaggcaggttggggtacttctacttctctcagccagacttcaagtttttgaccggcacaatggaaaaggtcgtgagcaaaattgggaatttcgttgacgagtatttcatggtggaaggcatgggcaccacttatactcggtttcagcagatccctatatattactgtccacccctcatgctagctcttagggacatagctcaaaagattgttcaactgtcgaatgatgctcagaatatcaccttgttcaccttaga

SEQ ID NO: 404683 - DNA, 508 bp, Cannabis indica
aaaccttttaatctttccctatttagtaatgtgagatttttgaagaagcctctagacttgtatgtcatttttggttcttttggataaaccatgactcataatgagcttgtggtatcattgataaacaagcaccaactagaaactgaaatgaaatattgatattaggatgtgattgtgaaaatagagtacacactcagtacacaatacacaatcaggtattactattgatctcggaagaatgggcgatacataaagtattagaaagatatctgcatgtctaataaggccctaaagataagtgataagcagcgatttggacgtgaattctgccatcaaccattgattctgactgctcatcatcagaagcaatgagctctgtaatagaagttggtgaactggtggttgccgatggctgaaggcaacgtacgataattttggaaaagaagtagaaaaaccgaattgagttcttactgatggcaatcaattacttggtcaaactagtgttgct

SEQ ID NO: 404684 - DNA, 667 bp, Cannabis indica
tattttttttcttttaaaattttaggcatttatgaaaatttctaaaaagtttgcccttgaataatatttgtgacacaaaataattcaaaataggtatgaaaactaacctcaaaaggataaaagagttgagtagtgaagccttagacatgattgttaaaccaagattatattatagctttgagaaagatttaagtctacaaaaatacgtgcttagcttttgaagtgattggaagttcaatatgtatcatcctctatatatataagatataatgatatatagaatattaaattaggatattcctattaaaattataaatatacacactataaatatttatataaagacaatttaaatttaaattacgttattcctattcaaattataaatatacacactataaatataaatataaagacaatttaaatttaaattaggttattcctattcaaattagatgagttaaaatagttcaatttttaaattatagagaaaaatttacaaaattgagcttccaacaagtgaggtaaaccttagctattttacatattttttagctcaattaatagtgctaagctaaatgtagagataactattcattgagctaaacatattttaatattattttctttaacttttttatatatgtgtaatattatatgaattatt

SEQ ID NO: 404685 - DNA, 590 bp, Cannabis indica
aaaaaaataaaatttgaccaacttgccaaaacatgtatagtttaggaacctgcggtacaaataagtcttatattatttaataattacattaggggtgtgcgttaattgatttgttcagcttacgctacattttattcagtccaatttaaggattggattacaaaaatttaaatacaatttgcccaattaaaaaaaaatttaacccgctcaataaattggtcggtttggtccactacaagaaatgtcatttttgccaacatatttttgtgctggcaaaagttggtattacgttggtaaaatagaatttacttgtgatgtgttggcaaaagggaattgacaaatcaatgttggtattagaatttttgtcagcataaaataaaaagcgctggcaaaaatgacttttctaaaagttaaattttagccatacaaatgtactctggtaaaattttgacctctttgccagcgcagtttgcgaaatgcgctggtaaaagttacttttacgagcatagtagtgaactgtgctggtaaaagtaacatttcttgtagtggtcgggttaacccgtccaaactgagcactaatgtttattttt

SEQ ID NO: 404686 - DNA, 724 bp, Cannabis indica
gtatgtccaaccgttactactcaatcaaaatcttaagaccccatagtacataattcgtaattatgtctttctactccttctacgagatctcctaagctgatctactagcctaacttagtaacaagttaagtattcatttctgatagatattcaattagagcatttcttatttccacccacttacttgtcttaataccttgtaaatttctacttattaacacatcacttcctcttgataatctctggaacgactactgattctgcatcctaatatgaatctttctagcgtactttatcctcagtcatacgcttctcgaggtgactccccgaaagatttcctatcttgagattaccccaatttaagtatgcttaactccaaagtaagctcatggtgggttatcagaaagtagatgctttattatcgttcctaattttatttcttgctttcattctttcattaataaaatacaattgccatcactcccttcattcacctcttgcaattcctcctcatttttttgttcacttaaacttgaggaattcccatcatattgtcaacttgaatcttgttcgtttctacttattttaacttgcatcaatttctcttgagttgacagaactataaaatttcccaatcacttagagttaactaccattataaagtgaattaatgtaacctatacggtagatgttggaattatgttaccaggatcttagatctact

SEQ ID NO: 404687 - DNA, 578 bp, Cannabis indica
atatatgtgtgagtactatttacaagtactccctccaccgattcatcgtacaattatttgacattcaaattaaaaaaagtttaattttattgtcatgatctagtatgttatagttaattaaaatattttgtaaaattttaagaaatttgaactcttttacattatagaaaacagtgttcaaactatttattttccacacgtgtaactggctctttgaattctatttttgacgtgttattttttgaatttcttaaaattttgtaaaatatcttaaataactataatgtacatgactataaaaaaatagactaaaaaattctcatgcatactgaaacaaatatgggtattcattcaatccaatccgcactattttactcatatgtagtgcattcgatccgcactaaatgcgagtttcatattttggatccaatccaatccgtacaatagctcaatacaattcaatccgcaaaagtgtggattagatcggttattttggatttattacttttcaatatttaattatttaatatttatgaaaaatatttttttccacccaactagcaacaaaataaaataaa

SEQ ID NO: 404688 - DNA, 777 bp, Cannabis indica
  modified_base (648)..(648): a, c, t, g, unknown or other
ttaacaatgtcttagatgttcctccatctactcctgaacgtactaacaaggaattgattatcaagtctcctgagaaatcccatgttgatccaaggtttaaaaataagaagtcacgagcgaaaaacatgatgccttcgtccttaactaagtctaggaagagaatgtccagcggcagtggtttgactatgagagacttggtcggagacaatgagtaacatttgaatactttttaattggaagaatgctcgggtatttttttctcaacctgtttattatggtactgtttgcattagatgtttatgccttgatatgccttttagaatatccattgttaagcaattatataatttgtagatgtaactaccttgtgggtcttgtatatgtaagattttgaccaaatgtaaccaaatattgtgttacaatatatgatatgcatgtttagttatgatcttagatattatctgtataagttagaaataatttttcttattgaaataaatatttattgtgtgattcttaactcaacttaagatgttaattatggtactgtttgccattagatgcttatgccttggtatgcctttcagaatatgtattgttaagtcaaattatataattttgtatatgtaactccttgtgggtcttgtntatgtaagctttaaccaatgtcaccaatactgtgttacaatgtaatgatagtgcatggtttagttatgatctttagatattatctgtataaagtttgaaaaatatttttttcttatttgaaaattaaaa

SEQ ID NO: 404689 - DNA, 745 bp, Cannabis indica
acctccaccacctccaagggactagaggaaagagcaagagagaagaaccccttgtagtgaaatcaccaaacactaggcaccagtagcagccatccaagtcctccttgtagtatagcaccatctgattatgaagtttgtacaaaatttaaacctattgtgtggacaagggaagacatagaggaaaatattatttatacaacttctcttactggtacacattcaggggaaatacatgttggcaagttgtatacaaataagactaaattgaaaaatgtagtgggaaggtttgcattgaaaatgaattttgagttcatggtgaagaagtctgggaccgatgttttttatgcaacttgcaaggattcaaattgcaaatggagagtgagggggaggtagggggcacgttatgacatgtttgaggtcactgtattccacaatgaacacacatgtagcctggattctagacatgttgataaccgtcaagcagcaccgcaggttgttggccaccttattaagaacaagtttaaatcagatggaactaagtacaaggcaaaagacatacaaatggatatgtttcaggactatgggatcaatatgagttatgagaaggcttggaggtgccgagagaaggcatgcgaggggtacaccagctgaagcttatagtgagttacctggttacttttacatgctggaacaaaagaatccgggtactattacagacattgtcatagaggacaacaagttcaag

SEQ ID NO: 404690 - DNA, 708 bp, Cannabis indica
taaaaataaaaatataaaatatataataaacaaatataaaattttttaaaacaaaataaaaaaaaataaagatttaaatatttattattttattatgatctatttactttaaatattttttattttttgtaaaatttctctatatttttataaatttacggtttggattgctccggaagtttgtttctatgtgggttgctatgtagattttagttgcgatttaggttgctctgttagttgctatgggatttctatgtagaatttcgtaaaaatataaagaaaaaaattattttgaagtgtaaaaataaaaaaatataaaaaaataaataaaaaaacccaaataaataagtaaatatatttgtaatcaacatacttttttctaaaaattgagttgtatcaattttagcttttagttgtaagttttctataatttttttagggaaattttcatggtatactaatttttgccaattttttacaaaaatactgttaggcggtattttttactttatactgtatttttttataagtttcatactgcagtatactatgttaagttttcactagtgttctactggtattttatagttgttctactgttgttttgagttgttttgttttgtattctactagtgttttataaaaacacagtatttttaaaatcatttctatgtgacagtatttttgtaaaagttaacccaaatttaa

SEQ ID NO: 404691 - DNA, 554 bp, Cannabis indica
atgctatgaagtttgccccacaagctgatagagagagagatagtttggccaagggttattctcgctacaagaagaattacgaagcggtcgttgctgtgaagacgactgctcttaccaaaattagcgctttggaggtcgacgttaagatttttaagagcaaggccgacaatcttgagtcggagaagaggagctgggaccttactcggttgacccttgagtcagaaaaggggactctaagcggcaaggtagcctccctggaaactagtgtgtcagcggtgaatttggagaaggccactttgttgcaagaacgtgatgcttctcgttctgaggctgaggcagtgaaggataaactttcttccttgagtagaaagttgtccgaagtcgagaaggcatcggatgaggcccgaaaggctctggttgctgagaaggaatccttggccaaggagtttaaaatcctgacgggccaagtcaaaaaggcattccttagcgggagttattgttgggttttatgccctaaataaaactcatttcacataatcaaatttacttattaa

SEQ ID NO: 404692 - DNA, 691 bp, Cannabis indica
tctcaaccaaacttcaagtggttaacgggcaaggatgatacggccatcagcaagattgggcgttttgttgatgagtacttcatggtggatggcacaggcatcactcacactcggttccagtagattccgacctatcactgccctcccctcactgtttctcttagggatagagctcaaaaacttgcccagcttccgaggtaagccggaatattatccaattgacctttgaggataactttgtgaggtacgggctctatcccaaggactttactcctaagcctgtgatggggaagaagaggaaatctagtgttggccggaccaaacgagctcatcaggagaatgaactcattcaacttaagcgcaaagctaagttgaagggagatgcaagggccaagcactatgctgagaagcccttgaatcctgaagatgaggctgaggaagagcaggtgactccattgaaaaggaagaagaaactcctggcctcgcccagccctgttggacatgcaattcgcataagggagaccatttcacctgttcggccatcccctcccgtattcagaaaagggaaagctgttatgtttgaaataagatcgatatcaggtgatgatagacttctgagtcttgttcgagcagtcaccttgcatattacgttgtcttgtttttgagcttcttgattttcatgccttatgtt

SEQ ID NO: 404693 - DNA, 605 bp, Cannabis indica
gatattctacgacgttaaattgctaatcaatgaatatctattagggatgaatctcattaaaacaaaaactaatgtagaatcaacaatgaagatcgaatgtccttatatttaagactcgttattttttttaaaaaaaagttagtattttattaattatttattttaatctatatagttaataataaaaataaattaacttaagttagtctaaaaataaatgaaaaaaataaattttactaactttaatttaatttttaaggttaaattttgaaaattcaatatatatatataaaatattatatataatttcgaaattaaataaaatataatattataaatacctgaaaaatatctaagttgttttaaaataagtaaatttttaacataaataattttcaaaaatttaattaaataaaaaattaagtatcttgaactaatcaaattaatttgaaaaatatcccaatttaagttgatataaaattaattgaaattaattttcaacttaaatatttttttcaaaaaacatcagaataactaattttctagaaaaatctacttaattattaatttcaaaaatattctaatttaagttggtctaagattaa

SEQ ID NO: 404694 - DNA, 547 bp, Cannabis indica
ggtttcttgtgtacagatcttcctctgcttaggtttaattcaccatgagaaccattgtgcttctctgttttcatttcaagatccttagacttcaaggcagatatgacttcctccaaagtaatctctgtccttccatattttattcgcattcttaacttctctataggattctggtagagaattaagaattataattgcctggttttcatcactaagggcttcatttcaccacagttggctagttcaatgtgtagtctcaagaattcatctaggttctcttcaagagtcttcgagtgtgacatcttgaatcgaaagatcctctccttcaaatagatcttattggttagggatttcttctgaaattgttcctctaactttttccagattttagcaggggtttcttcattgtcaacctgtctgataattgcatcagatagattgaaaatgatgattccagttgctatctcaagcaacttttcttgctgaactttagtagttccatcaggccgttcaatgggatcatttagcactctaagcagcttctgtt

SEQ ID NO: 404695 - DNA, 546 bp, Cannabis indica
ctatgtaatgaatatgagatgagagactcatatgggttccatgtggttcatatggattttgtattgatgaggatatattctttttcttttgtgttgttgatcaacggtcacaataactataaccgataaatgttaaaaggcacaatagtttttttcattctcttataactagcttaatatagttattagtataataaagtattggatcttaaataatttaatatcataatttttataaaatatcactaataaattataaagtgacacgtctagaagtctaagcaccactattatctaataacaacgctctaactaacgttatgatcataaagtacaaacaaaaattcctaaaaaatataagcatacaataattattgtcaatatatatattttttttaaaaaaaaatcttaaattagaaaatgttgaccccatttttagtgaagttgcaaagcattataaatggcgctaattagactatctctaactaacaacaaagaacacgggtcgatccaatagctacgagtatgacccaacaatgaagaaag

SEQ ID NO: 404696 - DNA, 543 bp, Cannabis indica
gtacttgacctgtgataatttcaggatgagttacctcctaagaagttttcccaggaagtgtgagagtaaggacaaagcacgctggaaatattcgtgttagtttctagggccagtcatcagtccataaagcagttagagtgacgtactgtgtataagagccatcattctgtgggtgtaagggtccaatagaagcctaaagcggggaacttacaaatggtatcagagccttgacgcagccgaaagtgtggtcgacgaggacgtcagacctcgtaaggaaggtgattgtgacagtcagtagtctcgtgattcgtaagggaaaataccgagtaagttgtgcaatttcacatcgcctagaaggtagagatgtacatcaaaccgctcaaaccgcccgcaaccgcaaaaaaaatacggtttgaaattcttacgcggtgcggttacggtttgaatttttcccaaaccgcgcggtgcggtgcggtttgcgattttgaattattaaaccacgattcaaactccaccacaccgcatgttttaaaatttcaattt

SEQ ID NO: 404697 - DNA, 816 bp, Cannabis indica
taccatttgtcttattaggagtacaaactgacacctgatcacccctcctccactacccatttgacgtgttgatcttcatggtacaaacagaatttttcccccttaattttgggaccacttgtatctcaaagccattaaagctcaagaataaaagcctcatttaaatatttgtaagggaggttggaaaatcaccatttgtatgaaagttctagtaatacaacagtattttctccattggtggctgagtattcttaatttttcttaagccttctttgtatttgattttctaactaaagttcagtttgtgagttctcaccatcgaatagttgttattagattttttttttttttagtttagaatcttacttgttacataaattttagtatttttagtttttagaattttgaaataataggtagatcaataaatgcatatttatatatataagtaaaacctaatatatttttgaaccaaataaattatattctaatttagaagttataactaaatagaggtactagaaaaaataataactaaaacaccaaaaagtatcaaatgtaacaacaacaacaataaaaaatctttaatactatatcataataaaattatttttgagtaaatataatatttatatacatgtattattaggggtgttcatctaattcaatccgcactattttgctcataatgcatctgatccgcattaagtgtgtatttcatattttgaattcaatccaattcgcacaatgtagaaaatagtgattcgaattgtgtttatttcatagaatagtacatatttatatacaaagctagga

SEQ ID NO: 404698 - DNA, 637 bp, Cannabis indica
aaatgtaactattgaataatcacgcatattatttcatataataatattaatgataaagtttttttttgattttttaataaaaaatattaactaaatattatttcttgcatcatgtttagcaattgtgcattggagtacaatgctaaaagttgatgcaaatctatcacaaagtcatttttgtatcgaatataacacactttttacatctcccactagagatggtcttacataaatattttggaccccgatcctacaattggaccctgcctctttaaacgctgaccctgacccctgacccagaccttgacctaaggcatggctctgacctcgacccgaacacgaaccccacccccatccagaacctcgaccccttgccgaactcaaaccctaacttcgaagcacgaactcaaaccccgaaacagacctttgcctgaactcaaaccttggctcagccccgaacctcggcgaccaacacccaacttggcgtagactcgatcgccaccatagggccctagacctagtgtttgaccttgttggggttttatgtaggtatgcatattttctccatggggatggggctctgcatggacctgcccctaatgggatgggaattccctatctaaatggggaatggggc

SEQ ID NO: 404699 - DNA, 1244 bp, Cannabis indica
ttctctaaatcaaccagcccctcttcaatcttctctctaatccagtagagtcttatatccatgtgtttgctcttttcatgataaactggatttttacaagatgaatggatgactgactatccaaatacacagttactcctcctttggtttgtttcaacttataaagtattccccgaagccacaacgcttctttaaaagctttcgtaatcgccataaattctacttccatagtggaaagagcaaccacagactgtaactgagccttctagcatatatagttccagtttgtcaagaacatatacgaagtggttgattttctggtatctctatttgatgggtagtctgcgtccacgaaccctttcaactccaattctcctttttctttctcataggttataccataatcccatgttcccttcagatatctcaataaccatttaagggctttccaatgttccatgcccaaatttaacatgaacctacttaggatgcttaaagggtgagttatgtccgctctcggctcaccatcacatacaataagcatccaagaaccactgcatagggtacatctttcatctcttctttctctttcgtattgttaggacattattcttttgacaaaatgaactgttaccgtaaaggaacggatgtactctttgcatcttccatgttgaaaatctgaataatcttcttgatgtacttggactgcttcaaactaatagtcccttccttccagttccgtgagacttcgataccaagtatcttttgaactggcccaagctctttcatcttgaattctctcttgagcatggctttaatacttttgatcattgatttatctttgctcatgatgagcatatcatccacctagagcaataagaacacggttgtatattgctccatattcttaaaataaaggcagtgatcgtatggagatcgtttgaacttgatttgatgcatgtatgtatcaaagcctttattgcattgtcttggggactgttttaaaacatacatagatctgttaagcttacacactaattcaactccttttccttccacctgaaagctgggtggttgcttcatatagatctcttcatccaacaatccatttagaaaagcagtcttaacatcaagttgttcaacttcaaactccaaatgtgctgccagggacaatatcagccttatcatcttgtactttaccacaggtgagaagatttcagtatagtctataccttccacttgag

SEQ ID NO: 404700 - DNA, 853 bp, Cannabis indica
ttttttttttttttttgttgacataaccctaaaaattatgaatgataataaaagttataaattgaatggtgatttttcttattttttaaaagacatttgtcatagagtactaatggtgtaccaatgtctagcaccacttaaatagtgttttgcaattgattagtgatattttataaaagttaatattaaattatattgaactcaatatttaattgtactaataataatatgatattgaaaatcaaaatagttattatttttttttaaaaaaataaaaaataaaagttaaagactgatttttagttagtttttttattataaacctggtcatgtgtctcacataggagtgtgcataaattgatcaaatccaatgagaaccgaccgatccaattacaaccgaccgtcaaacattggatatctaattgtgattggatcggattagatgttatttttaaatatccaattggatcaaatcggatggtggatggggtgtctaaaaatccaatacatccaatatccaatcgaactaattagtattttcatttaatttatatgagtattaaattttatattattatacgtcaaatctatatgtatatatgaaaatgaacattaaaattgtaaaaattagatggtataccctttttaatttggtgtctctcatttttaccttcggtccaaatttctttaatttataccttcttttttcattctttcttccaattatatccctccattttcacacttctctaaattagcattaacttttcccaatctgatgcttttaacaaaaaaataaatctagacttcgtagtcatctccctccatggatctgtactttctaattctctct

SEQ ID NO: 404701 - DNA, 571 bp, Cannabis indica
cctactctgccttagcccagggcagggcctgtcaataagtgatttatcgtgtcccttatctattttacaaattatgtgatttagggcctgtaattcgtcgagcaactgttccactcaggttggctggcacacctgaattcagaacaagataggattagtataatgatatgcatatgtgtttacatgtttaacatacatgtttattacacctgttagattatatcgatagcggtatcaatatacgtagagttatattagatactaatagttgtatgtttggcttagatattaattgacgctatcacattagtatggctagagtatgactagcgtactgagtataggctgatattatggttgatagtattgtcgtacgaactttctagactcggtaccgtgtcgaacacgggatagggttatggttgggtgtatgggcgcctgactataatctgggttattgctatgttattgattatgcttttcttaccgagtctgttgactcacaaatattgtttgcatgtgtaggtaagggcaaagctaaggttgagcagcagtgagagcgagcagataa

SEQ ID NO: 404702 - DNA, 678 bp, Cannabis indica
tcagggtcggccctgtagatacaagttcgggtatggtaagtgcccctctttctaagttttttggactcttacacccacaaaattatggctcgctcttatacaggagtacgtttctttagctactttcttgaatgatgatcggtcctgtaaaccaacacgtagtttttctggcttactttaggaggaagttaggtcacttcttacaagtacgtttttctcttaagttagtttggagttctcaagtgagtgggaacttaaaaaaataaaaaaaaaaaaaaaaaaaaagacattttgttatcattagtagtacctatgaatctatttaagtctttttcaattatgtaatctcttatttaaatagtcttaaaatctatcatatttaatatttttcaaataatgtgagattgcataacttatttagtcttttactttatattacaacataaatataaataaatgtaaccacacaaatatttcattcttccaatataaattcaattaatcaataaaataatgaattttactcatatatgtaataaaaaaaatacattgaaatgaatacataagttttatttttgacattcttttatatattgttgtataaaaaaactaaattataatttatccaatcactaaaactaaaattgttctagatatatattttttaattttatttat

SEQ ID NO: 404703 - DNA, 889 bp, Cannabis indica
catttgactgaaagtttgatttctctacttcctctgcccagctaacagttttcggggagctacaagacgtttttctcatcttcacattccttcatttcaattgcaatctccaggttctcacaagaatcatggaattcttcattcacgttacaatcagtgacctcttcttggaataaagggagatcctcttcagctccaatacccactgtgatggcactagctagttttcagatgatcctcttcttctcgccatgggagaagcaggggaaccaccacacacacctatcgtattagttgttatgttaaactttaatttatagtaaaatattatatagtttgggtatccataaaagtcattataccacatatagttttgcataaaaatatttcatgaagtaccattcaatataatactatacaatacaatacggtgtaatacgacataccaaacgaaaccctaaaaaattcttttaagttattaagaaaaaagaaagccttgagaattcaatgtcctttccttcacccacttcgcacgacttcgatgtcttttgcttcattcactacagtcttgggactagaaggggtggaaacttttcaagtcttatgtatcccaggccttgcttctagcctctgggtgagttttcttttttaacattttttattaggggtgttcatccaatctaatccgtattattttgctcatagtgcatccgatccgcactaagtgtagatttcatattttggatctaatacgatccacacaatagctgaaatccaattcaatccaatccacaaaagtgtggattggatcgattattttgcattggttactttttaatattaaattatttaatatttatgaaaaaaaatatttttttttcacataatt

SEQ ID NO: 404704 - DNA, 575 bp, Cannabis indica
ccccatgactccacactccctctttcccctttgctcgcacaccttactaccccctatggcttgcatgcgacccccttgtgggctcgcacgcaagccttcgtaccacactccaacactttctcactcacccatgggcatgacgcctatccacacatgtatagtctctccttctttcacccgcgctcttgtcattggatcactaagggactaaacatcgaatagcacgggtactccactgcgggtcgaatggatgctccaccacttgcacaaaggttccacgactcacccaaatgcctccagcttatccaacgatcgatgggctcccacaacatcccatgggctcgtacaatagccatggggtcgtacaatagctatgggcttgcataccaagttgtcacaattcaacagtcttagtattttggccataactctctcgatatatattggaattggaagattcaagatgcgttggaaagatgagaatgaaacatttgaatcttatgttcatggcaagatccaattctaaacatatcactacaaaaatcttccaataattgtaacttagtaagttgatc

SEQ ID NO: 404705 - DNA, 513 bp, Cannabis indica
cttctactgtgtcttcaacctcaagactagttgacttgtcttctgcactcccatcaagtaatttaccactcctcaatgagatggaattacattgttctttcggattgacaactgaatcactagggaaactactatttttttttgtaaagcactcacaacattggccagttgtcccacttgcacctctatgttcttcatggaagtagtaatattagacaagtgagtctccatgttatccaaccttgtttaattcttgttaaatctcttgttggtttctatcatgaatgtacctagaatgtcatctaaggacttcttctcttcttgttggtgtgcattaaacccaggaagtggttgcaagacatctttagtgttaccataagaaagattctaatggtttctcaaccttggatggtagtagttagcattggatttccccagtagttgttattataagtgtaaaccccaagttcttgtctaacctatcttttcatatttagattgattttatcttga

SEQ ID NO: 404706 - DNA, 541 bp, Cannabis indica
taatagaagccccctgcggcattttcctcgctggaatagccttaaccaaataaagatactcgatttctattggtgtggggcattcccagttcagaattttatacaaaaccttcaaactaagagataggattgagctggaatggggaaaccccaaggtgatttatgtaatccttgaagtagtcttaaagagggagtatggcccctgaactaatatgctccaagctccaggcgcccatgccagttgagccaccggtactagtctcaccactggcccctggggtacctcttgaaaagcgcgcaagggggaaacaactgaactcaccctctcccgctgaactaacttggcatgatcgcccaagtttgattccacgggtcttcagtatatcacctgtgtagcctgagatcgatcgcaccttcgattctatcaactcagcttcaaaggtgactctggggtcctggggagtctttgatgtacgtggcttgggaggcattattgttggaaattattttaccaggatcttagaactactcacaagtatgt

SEQ ID NO: 404707 - DNA, 520 bp, Cannabis indica
atgatctaaatgcatcaattaaaaaacgagtcaagtcgaagtgtcaagtgcagaacaaaaaagatggtaatgtgctttaagaatttcttgctagatataaaaaaaattaagaataaagaaactcacaattaagctgtgaaatgcattaacaatcaaacttattgtggggcgaaataactggtataattaatataatttaattaatcttaaatttgaagtgcatgtttgaggttttattttcttaattcaatgtaatttattttgggatttttacatggtatactgtatttttgcattttattacttttatactgctatacggtagaaattacaaaaatactgtacatttatactatcttttatactgccatactgccacttgtcactttgcatgtctttctctattttttttattaattaattttttaaaaaaattgttgatgtgatgctcatggtcaaatcatggcagctcatattttttaaaaaaagtgataaataaaaaaaattatatattatattt

SEQ ID NO: 404708 - DNA, 520 bp, Cannabis indica
ttaagtgatggcagataatcttagggtcgatccctctcatatccccatgactccaagaaaattgatcatggttcgccttcaaatatcttattaattgctatttgagttgctcatccaggttcttccaaatctacacacatttggtggggtttcctgggtcgagaataacctcctccaattcttcaattgatttaagtaggtttctttcatcttaaactcgaggatcaagatcttcatttttcttctcgtgttctcctgccaagatcgtcatcagttgatgatcgaccttcctatgttgtagctctatgcgacaacaatcgcgagccagcatctggtcgccacgcaccaccccacaccatctaaggtttggaactttaaagacaagtgctttatcgagctgattgccactagtcctatcagtgttgggcgacccaacaatatgttgtaagccgagggtaggtcgaccaccaagaagtttttcataacagtagcagttaaaggtgtaacgtccccgcttcaa

SEQ ID NO: 404709 - DNA, 791 bp, Cannabis indica
aggtcaaaagatgagttctctctctttgtaatgatattcattatcaattagtgggaaggttatttatgattaattatacatatatattgattatatatatgttaataagctcactatagcttctacatgtacgtactatattactaaagtgctatgtatatattcttccattcttgtggttagagacacttaattgaatactagtatatatataaagaatgagtttgttgataatgaaagtaaatgatgaatcattcagaagatgtagttattgccatgaagaattcagctgaactcaagtcttaccttaacgtgataaaaagaatgaaaattgatataataattaagcaactacttcgagcataagttaagatactataaaccaattaagtatatttaagggaatgacacaaaataaagtgcaacaatttttaattgtatattctaattaatcgcaaccggcatgggatgcattgaaggtctattttaatagatttattttttttaataaattttaatagtttaatcaattaacttaacactgataagataaaaatactaagtttttttcataagcagtcaacactattagtagctagtttgggacaattgtgttgaaagaaaaaacagttataactgtcctataaagaaattaacgtaactgcaattaaactactgagaaaaattgtacagtatatttagtaaattatagattttaaagcagcctgaattgttaaaattctaataatagttatattatattttaattaattatattaataatatatata

SEQ ID NO: 404710 - DNA, 766 bp, Cannabis indica
taaattacacattatttattttttttatctttaattgtgttgttgagattaattatactattgtgtagatagtatgttgtgtcgtatatgtacgtagaacatgaattgtaattttaaagaaacttttatgtaaacaagcaatttagagtatacctatctgatgtagtatgtttctttgatatgatttcattaaaagtttaaaaagattttctattataaatcatttgttatgatggtatataaatataattattgaatatcttttgttgggggctaagaaaatgaggtatgtgtgagtaaatagtctatattatttaattggtagagtattgttaccatatatataaggggtgcttcacaattagttagcaatatatactctataaaatttattatattaaactatataaaactcaatatttaatatcaattgtcatattatatatttaaaagcatttctaatggagtactaaataagtggtgtattgtaattttttagcacttcataataaaaagcttctccaatggtgtgctataaattgtgccaaatttaacacatgctaaaaattgggccaaatttgacacaaaatatagctttgtgtcaaatttagcacacaataaatactacttttttaattacacttttgtcattaattattaatgaaatactttaatacatatattttatttacaatattgccattaattagtaattttttaaggtggcatttggtaacatttttttaattagttttctgtttttaaa

SEQ ID NO: 404711 - DNA, 581 bp, Cannabis indica
actggattggactgaaagggattggactagactagattatgttgaaagtaatcttgtgtttggtttaagaatagactggactactttatttgtttccttttagaaaataaaaacttaaattaaaataaaacatataagaataaacaaataaaaaataaatgattcacagcaaaaataattaaattataaaattaaataaaaaataatatatcctatataatcaaatatatatcataaatatataataaaatagtttagcatatttttttatttaataaataattaaaatagtaaaataaaaatatttgaataacataaaattatttatgttaaacactaatttaattactaacttaatgtaaatatttgttttttaaaatatttttataaattttctagtcatttaaaataatatataattttattgtcatattgtttcttattgtttaattaacaatattttaaattttgaaaacttatgtataataatttaaaattatacatttttactaattttaataaataagtttttgataaaaaaaaattataaataaatgtgtgataattctttcatttaaatt

SEQ ID NO: 404712 - DNA, 1055 bp, Cannabis indica
gtagcccacacacatcaagcaatacctcaaatcatagtgaggaagatcgtgaagaaagatcatcagcaaggagtttcagcatcaaagattcagagaaagagatccaggttcagatattgataatgctctgctacagaaaggaatcaaaggggctagatatctgaacggaaggagtcattaattccgctgcaaccaatgtaaggtttcttaaactttatatgtgtttaatttatcgttttagaaagttcatatttaggatgttaataaacatacttgtgagtagatctaagatcctggtaaaataatttccaacaccgtcacctatagtgcaaaattgttgccaataatatatgcgacttttaataaacagtcggctataatacttagtatttccgaaagttttgcacagtcggataaaaaattgtactaaaaaattggaagaaaaaaaaatatatatattttagttagttacaacatatatttgtacataaaagtgatattataattaacatactacaaaaaattattactttaagtgacaaccttttagtcacaacataaattttttgtgactaaatgtgacttctaatcacaataaaaaattacttgtgactaaaattacttgtgactaaaacatagtatttagttataagttgtcattaatttagttttgtttacaataaatattgtgactaaaaacacatttaatcacaacaaatcgtaatttttgtgactaatatctttagtcacgaattttttggtcacttaaaattttttataatttatacaattacaagttttgttataataattaaactactttcactactataaaattggattcttattgacttcgtagtttatgatgcaataaacataatacaagctttgttataatggtctcaaaaatcgtcccctattcatccatttagaaattgggtagaataaatgaccatccaaaaccgtggaaatttctgtttcctgactctgcaaaaaaagtcatttatatatattggacattaaaattgtgtcttatagatagatatatatatata

SEQ ID NO: 404713 - DNA, 588 bp, Cannabis indica
tgatattttattacattactgtgcgtagtatcccgatgagtcgacaaatggtaaataattagggtttaaaattatattatgggttaattagataataagtgagattatgatcctactaatctagttcaacataaattttaaaatttgctataagtggataaataagcgtaatttataaattaccgagatttatatggtatatgtgaatgtaatatgagttactggtgtaataaaaatattttcaggtttggcgaccttggagactcgatcagaggccagaaatgtcataacaggtttaattgatagaattgatggaaatattatgataagttgataatatagatattggagtaattaggagtatgtgggatttaacttagtgaccctaaaaatattaaattttttagtgaactaaaaaacgataagataattataaataataaattttttattattattatattattaatattatattattaatattatattattaatatattattattgataataataatatgggtgactattcaatggttacatttttattgtacccatatggttacatttttctttaacctgtaa

SEQ ID NO: 404714 - DNA, 967 bp, Cannabis indica
ctagcgaagggcattctccaatcttcgtttccagccatagaatgatggctcgtacaaagaaaactacatgtctggctgacgcatctaatcctcaagtggctcagcacgccactttgcccaacgctgaataggattcggccgcccatatggaggacgatcatgcaggggacgctgaggtccaagagatcgaggagcttgacgatgttcgtcctggcagttccttcgacgcggaggaagaggttgaacccctgaaccacagggattacaacgaggttggggagccagtcgatgctgacggagacatcctggttgagggcgtggacttcgtcactaaggagctcgctgcagcagttcctcatagaaggcagggtgccttgggcgccaggtgggtaagtccaccgtccaagattacagaggcgcaccttcgaattcttgaccggggcagatacctgggtgagttggactgctacattcccgcccacagcaatcgtgccacaaactctgacgaggggatgtgcgcccgatcgtgtgcccatggtcagcaaggagcattgatgcccttgcataagtacttcaaagatgtagcagactttttcggtctctgcccgaaccaattcactcctaagggcattaagtatttatctgccgtcttcgtcctctatgcttcccagaagtagggtattccttctcctgacgaagtggcctggttctttgatttgaagtctacccccaagcaaggcaggtcggggcacttctatttctctcaactaggcttcaagtggttgacgggcacggatgacagggccatcagcaagatagggcgctttgctgatgagtacttcatggtgaagggcgcgagcattacccggacttagtttcagtagattttgacatattactatcctcccctcacacttgctcttagggatagggctcaaaaacttgcccgactgctgggggaagaccg

SEQ ID NO: 404715 - DNA, 798 bp, Cannabis indica
ttcaatgctatgaaactcagagtttagaaaggaaaaagagaatttcaattttttttttgaatattacaagaaaataagagaatatatttttaagaaaaagcttatgtgtaaaaaatgaaaatttatactagtctaattaggagttttgtctcattaattttgacatttaccaatttgtaccctcgaattttttcagactaaaaatttcagccgaactcttgagattgttggattcaacaatttcgatcctcatcctagtcctagctctctcgtcctcacccttgttctctcacccctcctagttctcgccactcttgctcctatttccctactttctcaccttcttccttttctgtcctaaccaccatagtcaccttgtctctacctttcccttgccagaaccacgaccaccctgaccaccatctacttctccacctctattcgctagaaactccattatcagacgccaaacacatttctcctctcttctttccccaccatcatcaacaaacccagaatatgacttgggcctaaaaaactctctgcccaccttcactctcatcttatcatcatcctcaacttctcttcacttgaaccatagcctcatcaccatcttcgcatgaacctagttgtaggggctgccaggataggctgcatgcagcagtcatgatttccaatcttctaaaattcatatcttcttcgtttttcatcagaattaagttctgtaaaaacgaaaattgcttaatttttcacaaggaatccaaataaaatattttcaaaaatagaaaaaatattttt

SEQ ID NO: 404716 - DNA, 516 bp, Cannabis indica
tgtaaaagataatttttaaaattatcacattattcctcgatcctgctctttgcgtcggggaacgagccaacgctaattggtattttttagcttcggttatactctaaagcatacaaattccccttattttttgcctcggtcaactattttggtgagacgtgttagccgacgtaaatagtacattttgtagtaaattgtgagttttatttagggcataaaattccaacttgttttagctcttcgtcaaaatctgttcgaatcaagcctctctctaatccaagaatacaaagaagcaaagtcagtggatacaaagtgttggattttgtaccctaaataaaacccattttaaaataattacatttactaattaataaagatcagaaattgtattttatattgcatggttcacatgatttatttcataattatatttaatgtataaattctattaagtccaaaacgtatgtatttgttcatgattatagtgttattagcacagtggaatataatcatgat

SEQ ID NO: 404717 - DNA, 846 bp, Cannabis indica
ttgattcacgtattaacaagaaatcattttgcatgagaggacataaccttaaggatgacatccataacacatagcgaggcatcaacctcgcaatatgtggagaggtgttgacaaggcgggctcgctataggaacacttagtgtataatatacattatactaactaagtgtaacaacttgaaggacatggataacgattagagagacttccatctcgctataggaaggcatattcctagtaccttcactaattagctccaaacatcttttaatgagctccactgccccgttgtgtcaattctctcagaaagaagctgacattcaaatgatgttggctactgaaattcatcttggcaccaagaactacaatttatagatggggaattatgtcttcaacctcaaaaagacgtgggaaaagctccagctcgctgccagggttattgttaaaccaagtttttcaagtaccaagcgagaagccccggtgagatacactttgtagcgtatctaaatccacatcagcgttgacccattacaaacggtttaaatcatggctgcatgattctcaaataataactgcattcatttacatggagcgtaattaaggcccacaattttgggaaaatattgttttgggattcaaatttgaatgtaattaactgtaaacctatgttactataactaggggcagactatacagaaaaagcaacgaaaaatccttgagagaaaagagaatacattgtttgagaagaagcctagttctgtattagaaaagtcttaataagattgactcatggactatgcagagttaactgcaaaaccacgtaaaaaacttggtgttacttttact

SEQ ID NO: 404718 - DNA, 1024 bp, Cannabis indica
ttttagctcatatatttttttttctactgatatatatatttatttattttatttaaatcaataagtattttgttttttcttaaaagaaaacaagaaatatataaaatattgatggctgcgaatgtgacacaacaagaaaatgagatttaattgaaaccatccaaggagtttgggagaaggtcggtggaggcgtcgcttatgcatgccccatgcctcatggcatggcccaagtcgcattccatataattatatggtttctacttggccatgtccatacattctatattattattattattattatttgtagtggggacataacataatgataaagaataacatataactactaaggttttcttccaatcactgatcgctctgttatatatattggaagaagattggattgaggatactagttgtttgtgttatatatttgttatttaacaaatatagaatgaagattaaaatgtggcatattatatattaatatgagattaatatatattatgtgttggaggttatattatatcattatagtataataatacacataaattgtaacaaatgaggagttacaaatctaaaatagattgtaacctaaggatcaaaaattgataaatatgtaattatgtgagttgttacatatgggagttatgtaattaatgggataagtttctagctgttagaaactgttacaatactcaattgtatcatttaaatgagtattgggacgttggaaaatgatttaactcggagaggagttatattttgagttctcaggaaacagttgtttaatagttgtttgtatgttgttttatggttgttttcgaacatctagaaccaggattttttgaaaacgttcataaacgcagacaaattaattgagcatgtttccagctctcttgtccaacatttttatcccatcaaacacaaattaatgtgttggtaacagccatgtgatgaaggaatttgattttcaaaagtgatcaaaatgttagataaattaacaattaacccaaga

SEQ ID NO: 404719 - DNA, 931 bp, Cannabis indica
cggcccagtagccgcggctagaagtgttgtggtcgcggccataaggtgaaggatagagagcctatttttcgaggctatctcgctgcagctaaaaggagtgtcgctgcggctatagtagctggacagagaggacaatttttgaggcgatctcgccgcagcgagaaggaccaccgccgtggccatatcttctgggcagaaacacatttttagacccttatctcgtcgcggtgaggtatactccaaacatcacataatttcaaaaacacttcttttctcaaccctaaaccaatacctcctaaaaaatcctccccataaccacctttcttcatctgatctcatcctaacccctttttcttcaaatctaaccacaatctttcatcccaaatcattctaaatcaatattcctctcattaaacactcttttcctttcaaaattaaccccaaatccctaaaacctcacccaaatttaaaaaatcactattcagcatcttctacctcaaaaacttcaaggtttccttcaatggaggtagagtaaagggagatttcattgaggtaacaatttctttgactctgtaagcaattattattgaataattttggattgttagaggatcttgaaattttattgtgatttgtgggatttttctcattacattgattggaaaagttgtttgtgattaagaactaatatatttgtgattgggttgtttctcggaaagtgagttttgaaggggaagtgctgccgaaatttccataaatttttgagtgttagaatttttggtgagatgggtcctaaaagagctagagtaagtgagagagggggagcttcatcatccaacccgcctaggggtcactccaatgttgatagagcaagatttgtgaatatggaggcacaagagcaatttctgcaactgaaagatagacccttcat

SEQ ID NO: 404720 - DNA, 756 bp, Cannabis indica
tcctaaatataaaaactgtaaaacgataattaaacgtgaaaaatttcaagaaaccttacactgattgcagcggaaataatatgactcatcccgttcagtattccaacccttataactttctgttgcagagtaataacaagtaataaacttgtattctcatttgaatagacaaacaccttttccacacaatctttcgacactggtctaaagtacaaccttgatttaatagtgggaaaaaaactcattcaactatagggttgaattcaatattgagaagaaaagagagtggatacgaaattttcatagaaaggaagctactttgatttctagagttgtagtgtttcacttaggtgatgtttggtttggtggaatgtaatagtaatggtaatggtaatagtaatgtaatggaataagaatagtaatgggaattgattaagatgtttggtttgttattgaaatgaatattggaataaatgataaattgacaaaattatcgcctactttaatttttatatttatataaaaaaatagtatagagtcattttagctttactttattaagtcatatgtaatcaggggcggagttagagctaaatagttggggggcaaatatcaaacaacgcaatatacaacaaatttaaattttagtaactaaaatgccttttaagggtatgtgtggacaattttattattttttaaattttataaatattttatacaatatattaaaaaataataaattaagtaattgaatta

SEQ ID NO: 404721 - DNA, 638 bp, Cannabis indica
cggtttgaatagatatttttgtgtatgttcattaactctgttatcatttgtaagtctttgtaaatttggatctttctttctatatcctaaaaaaattagaaagctccatagaatattgtttagagcttttgttttatgtccacaattaaaagaagtgggatggcaagggaagaacccatcaaaagtatgaactgtatatctatggttatttagatattactagagtttttctaataaattctatcagatgtaattagtaacattgactaatgtgtattgttagcatgagcattattttatttccgagtaatttgcggcaaaatccccccaactcaatttacttgcaaaaaaccatccaatctcataatttggtgggaaaaccctccaaagtactgtttcgtttacatttttaagttgtcgtctgtccagcctcattaagtcttaattttacacacgtggcaatgacaggtcactaaaaaattatcttatgtggccatattttacaaaataaaataaaaactttaagagtaatttgcggcaaaaatccccaactatcaattacttgcaaaactatccaaaaaactttaaagttagatggttttttgcaagtaaattgatagttgggggagttttgtcgc

SEQ ID NO: 404722 - DNA, 678 bp, Cannabis indica
tttgtaaaggagagacaaagagtatgatgtacatgctacaagcctttaaacttttctcaacaacatctggcctatacccgaatgctaataaaactgctctttattatagtaacatggaggctgaagacattgaccagattatcagagcctcgggtttcccatgaggggtgttgccctttatatacttaggaatcccaatcaatgtaaagaaaatttctagggcggagtgtgagatccttgtagagaaaatgacagcaagaatacgtacttggagcacaagaaacttgtcatttgcagctaaaactgtgttgataaactctgtcttcatagccatccaagcttattggagccaaatttgcatcttaccaaagaaagtatataggaggattgtagcaatatgcagatcttttttgtggaaagacctagcaaactatgaaggaggtggctcaattgaatggagcaaagtttgcacccccaaatcagtatgggggtttagggataaaaaagattgaggaatggaacaacgctgccatgtccaagtatgtttgggcaattgcaaatagacaagaaagtctatggatgaaatgggttcatagtgtgtaccttagaaaagatgaatggtggagtcacacggcttcaattcatgcaagttggcattggaaaaagcttgtggctctg

SEQ ID NO: 404723 - DNA, 346 bp, Cannabis indica
tttttttaacttcacgctttctctctctcccctgtcacttctttcttcttcatcatatacagatcaccaccattgccaccataacccaccaccatggtacgaacccacaacccaccaccaccgtacgaaaccatgaactcgtctaatactcaaatcacgcactcgcaacccaccaccatcgtacaaactgataaaccgctctctctctctctctccccgacgacctactagtcgttctcatggaaggtgatcacaaaatcaagatctcatcaaacgagaagacgaaatcgcagctcctttgaaggtgtcgtatcttcctcgtttgttgttgcagatcctcacgatg

SEQ ID NO: 404724 - DNA, 557 bp, Cannabis indica
gtattattatagaaattatatatattaatacaaattgtaataataagtgaaaaaatttatgattaaaaaatatcatcattattaataatatttaaccctacatgttcccggctaaagagatactgaccaaatgtatttttagtgacaacaaaatttcatcataattctatatatggaaaagtctcctcccaaaattattctcacccatagatatacttttatgtgtaggtaaaaatctcatcactaacaaatcttaacacctagaggtaaaaactaaatatcatgcatatctctaatatttctaattgtttataaatattaaatgatactattgatcaatacgtcgaattttcactgttactgaacgtaaaatatataaatattaaaattcacatacattatatatgacacacctacaatctaatataatctgtaattgaaaaatattaaaattcacatacattatattaggattttcttctaatttattgtaaacggtttggttagtctattattgttaattttatttggaaaatttgattttctatacttagaaa

SEQ ID NO: 404725 - DNA, 532 bp, Cannabis indica
tttctcaagatactgtttttcactgccacaaacatccataccaaaatgaagaacaaggcctacaaaacatgtaaataatgtatcttaactcagttgtgcctataaatagctagcattagtctttctgttaatgaaaagagaaagacttcaaccatcctctaatggggataatatagtaaaacaaaatcaataaattttcttattatgattgtatgaagtaattgattgagtacatgacagtagatgtagaaaaaatttaaaagggttttgttattctttattttccataagaattataatagttttttcactgtttgtagtctttttacttcttaaaataggaacatagtaataatggcaatatttgtttgattgaaaaagtttctcttttattgaaagtgttctagatattttataactagtagtaactttactgatatgactatcttccattgcagctctaaataatcaaactgagacccttgatgatcttaaaagaaatgagttgtttgtaagagatagcattcctctt

SEQ ID NO: 404726 - DNA, 591 bp, Cannabis indica
cagcaggcaatgctgaaatggtaaaagagtgctacaagaaaatctttctatattcttcagcttcttgagccctctcctcaggacttctgtccttcctttcgatatctaaatccatattttgcttcagtttcttatcattgtcatcaatctacattgttaaagtgaaatacatattaattaaattaaaaggactagtggaagaactttctatttatattcttacttacagcatcatatatatcatcattcctctcatagtcaccaactttccgtggaacaatatggatgtgaacatgggctacactttgtcctgcttgaggtccatcctataaaaagtagtgtacattatacattgttataaatacagtttgctccactggtaagagcgatttatttgacatttagaaaaagagcattgttattgggcactagtagcgatattaaaaggtactagtaggcactattgatgtcttttagcatttctcttagagaaattataagactaattatgatttttgccccctaaactttgacatgtaccaaatcatgcccccggaactattgagattgttaaatttaaggatttttgtc

SEQ ID NO: 404727 - DNA, 543 bp, Cannabis indica
ttagtcaacctccacgcctgaaatcacatgtcgaattattttcaaaatatattgttttcacgtttctattatgggaaagtaacgtgcaaaaaatagtatttttttttaaaaaaaaaagaaaaaaagaaaaaaacctaattaaaagaaaaacaaaatcagtaaaaaaagtctaattttaagtactttatataaatttactttatatttttcattcactgtaaattgataaagataatagtaataaattagttggaggttgtgttagatatttaaaattatatatttgtatggaatactttttaatgggtaataaacaaatttaactataaatattaattttaaaaatattaaaccattagattttggtccgataacgaataataaaagagaaatttaaatttctatgcttaatttagctacttaattaaagaaaatatcaaaaaatatctctttttacactatatcaaaaatatgtttacatgaaaaaaaatatttaagtcaaattcaactttttttatcacttttttgtcgaaaaactttttt

SEQ ID NO: 404728 - DNA, 671 bp, Cannabis indica
aagaatcaaagaaagagatccaggttcagatattgataatgctctgctacagaaaggaatcaagggctagatatctgaacggaaggagtcatattattccgctgcacccaatgtaaggtttcctaatttttatatgtgtttatttcatcattttagaaagttcatatttagggtgttaatcaacatacttgtgagtagatctaagatcctggtaaaataatttccaatagtggattcactatagttgactagaaccgatcttggtcaaagtgactcgttagttacaaatcatcactattgggtatcaattgtcgttgcaagtccatttccataatgattgggggcattttaggaagacatgtgcaattctttatgcatctctggttgtctcgtcgtgattactagtagattcactatagttgactataaccgatctggtcaaagttacttgttagttaaaataatcactatcggttatcaatcgtcattgcaagtccatttccataatgactaggggtattttaggaaggcatgtgtgatctgtaattcatcctcgatcatcccgacgagactactagtggattcactatagttgactagaaccgatcttggtcaaagttactcgttggttacaaatcatcactatcgggtatcaatcgtcattgaaagtt

SEQ ID NO: 404729 - DNA, 609 bp, Cannabis indica
taacacttaatattccaagccttgctcaaaggctataccaggaagaatatctcagcttggtgtcttatgaagatagatctcagtaaggcttatgatactgtagactggaaatttgtggctgacctattaaaggggctttgctttccctttagatttatcaactagatcttggtatgcctcagaggtacttcttactccttgatgctcaatggtcgtgttcatggctctttcaagggcaaaaagggtcttagacaaggtgaccctatatctcccttactttttgttctgacgatggaataccttactaggcttcttttacaagactccaaaatgaaaggttttgggtttcacccattatgtatgtccttgaaccttgtcaatctttgcttcgcggatgatcttattatcttttgcaaagatacccagccttctcttggtatagttcgaaaagcttttgaggacttttgttgttctactggtttagcagccaacctgtctaagtcttctatttactttggcagtgttgacatgcagaatatgaagcagatgcttgcttcctctaagttgactgaaggttattttttgttgaagtaccttggagtcaacttg

SEQ ID NO: 404730 - DNA, 640 bp, Cannabis indica
tatactacaattgtattggcacatatattgatttctctcatttcaatatgttgtgcttcaatagaaataataaaaccaaaaaatacaactctatgacaagagatacaaaaagacaatcacattgataatttctatttcagataattttgtaaccatatttatgttactttttagtgtatgattgaactatatttatcacatatgtattaaccatatattaatatagagatatgattttatctcgtgatgtacttttacggaatgtattccgtggtacattagatgggtctcaggttacattaaatgagtgtcagggtacgtttctacttttcaaccctaattatccctagatcaatctcagccgtcagaccaaataactccctcatctgacggctgccgtacatcacggattacaatccacgaaagtacaataacaggataaaatcatatccctattaatatatacatttatattacacgtgtgttgtaaatagttatcagtttcctatcatgtttcttaaatggctaattagtaatttttctctctgaactttgacatgtactaaatcatgctccctgaatttttttcagccgttaaaaattctccctgaactattaagattgttaaatttaaggactt

SEQ ID NO: 404731 - DNA, 718 bp, Cannabis indica
gtatctttcttcctgaaaacctgctacatcacaaacttatttaagctggtctttgatagctactagcttcttccaataccaactagcattgatagaagcagagtagctccaccaatcctgatctttgagataagcactatggacccatattagccaaagactctcttgcttgtttgaaatggcccatatgtacttacatatggcagccttattccactcctcaagctttttaattcccaaaccccctgctcttttaggctggcaaatgttctcccatgcaacagctccagcaccatggaacatagcttgtcctttccacaaaaaggctctacagatagcttctatagctttgatcactttttttttttggcgacaccatcatttgtctacagtatgcttggatagctattaagaccgagttgattaaagtaattcgatctgcaaaggaaaggtttcttgagcttcaactcttgatcctagcagtcattctttcagccagtaactcacacactttgccagatattttctttgggcaaataggaatcccaggtaagtgaaaggcatatcctgcctcgagaaaccagatacttctatcagcttcttcacattgtcttcatgcatgttactgcaataaattgcagttttacttacattagaatgaagtctagtagtgagagaaaacaattttagggcctgtagcatataagtgacactcttt

SEQ ID NO: 404732 - DNA, 604 bp, Cannabis indica
tcacttgtagttaatattacattcaagcagggtcagccctgagttgaaatgggttataggcaaaaaaagaattttgggtccttactataaagataaatggtatttttaaaaattattaaaacaatatgtatattttttaaaatgaattttttttatttgggcccctaaaataagtgggccttaggcgtgggcctagcccgcctatgtttagggccggccctgtattcaagggtattattattgtcatatctcacctatataacatgatgttaggcttgaccccactatgtttgttgtttatataaatgaattaactactcacttttatcaataagtgaatcttcacaatttttttttattaaaagaaatatgtcaaataaaatctattaattaataataaaaaaatagagaaaattatatctaattctcacacaaaataaaaatactatataaaaagtaattgataaatctaaaaatatatgattcaaaactactactactactaataataataataataatatcgtgtgatagtatatgtaaggtgtttttttttaaaaaaaaatattaaaataatataaaataaaactttaatgaagtattt

SEQ ID NO: 404733 - DNA, 609 bp, Cannabis indica
tatgcctcgtgcacacttccgtcactcgaagaactcccgtcgagtcatgcttacaagcatctatgagtgcatccatgcatcgaggctctctagccaagatactcgcactgtttataagttcccactatgttaaggcaaatcccaacaccgacgctgaccttgtcactcgtgaccaaggtagcatgtgtggcaagatgccaacaccaagttaacgtgccaacgctcctatcatgccccattcgatactgtcaaaatagtctctctctctcgtcgccacaagacttccatacgtccatggactaatcctcaaggtgtcatgcctccacgcatgttggcaggccatcgagacaagctgccaaactagttgcatacattagacctttgtccctttccagcatagtgcatccgtcccatgcgcgtatgccaaccagcccatgaatgactacccgtgtcatctcatgttgagacttgtggccaaggcgcaccacaacgtctctaggaggtttgggccacgtcccatgcaagtggcataccggcaagccaatggaaacatacccggtaacctctggcagcttcttaaatgcactaccgggtcggcccgataatgtc

SEQ ID NO: 404734 - DNA, 754 bp, Cannabis indica
acaattttaataattgcttattgcgaatattttacatttggagtctttctagaatttttataaatgattgtaatctctcaaccatataatcaaatttggcctccaatatgaaaaaaatatattatcaaataaacttacacaaatctaagactcatatatgcatcactatatataatctttttctaaaggaaaaaaaatatatcacaaaacactaaattttgattctattatatcaaatatattgattattatcacaaatccataactgagaaagaataagaaacagaggagaaatttgaatttgttattcaatgctcaagaagtgaatacagatacaatcttgctacttatagtagcagatgttagttacatctgttataactaactctcaattcctacaatgaatctaacaacttaacactcttcctcaagatggacaatatatgttcttcaatcccatcttgcctttggtgtaattgaactgattagggaacaaaggtttggttaatatatcagctaattgctccttggaagccacatgaactgtcttgataactccatcttggacctaattctctcttaccaagtgacaatctatctctatatgctttgttctctcatggaaaacagggtttgctgtaatgtgttgagctgacttattatcacaaaacaacagtgctggtccctcatgatcgacattaagctcctttaagatcgatagcaaccaaactacttcacatgtcgtattcgccat

SEQ ID NO: 404735 - DNA, 803 bp, Cannabis indica
aatggcattcaaattaaagaacaaattggatgcttttttcttgatcgatcacagaataaacagctttgatctatagtagaatcaaatgtggcaatcctagatcttgtgcgaagcctccccaatactgctagccaagtaataaatgtggtgttttggaatacacagccttccccaaatttcattgctccagtatattttttcatgtgaaagaaaatgttagaaattatatgtaaagtatgaaacatatataattatgtatgaaaatgcgaaatttacgaacataaagccaagaaaattatgatttaaaactatttgtatggagtaaccaaaagttttcaattacagtgataagaagggaaatttcgataataagtctattcaatggacttaacaaaacttctccttttatatatataaaaaaaacttctcaatactagtatcataggtttgaaattatctaaacctgtggtttgtggtatgcttggtaatttacttgctctagtacaagcaacatactttagtaagatgctggagcattttttaatggctaactctaaaggaagccttttggcttctagacatagagtgtatctaaggaataattttaactattccagaaaagataacaatcatgaaaaaaattctttaagcatcaatagtgagaggtctcatatatactctggtatcctatttataagtagtttaaaaaaggaattaatcatttcaaaattcaaatttgaatttcccccaaaaagtgtacgttacgcactcattgtagggagtgtatgttgggttttatgccc

SEQ ID NO: 404736 - DNA, 1015 bp, Cannabis indica
ctatgtggtccaaagacatctgaatacatcatccaagtagttatctagcacgtgcgctctttggggagaatgatcttgtagaaaccaattataaattatacatgtggcactaaagtgtcaactggcggtaacaaccatgtcatcattttatttgccacgtatgacaaaacttgacaatatgaccaatttataatattgtgaatagttcaaagaccatttttaacgagttaaaaactttaggggccacgataatgcatagttatagttgggggacaaaaatcttaaatagcctataatatatgaaaaatgctaaggggcaccttaaggtctcaagctccacaaaagatggcataccactattggtgcaaattaataccagatcccacacattttaatttaataaataaaatagaaaatcgctaaaacacgccacatcggtaaggtgcccaatgctcataatatatcgggttgattttgtttaaataattttattttattaacatttatttagcattactattaggggtgttcatcaaactgctcacaccgcacaaaccactcataccgcaccacaccacatgaaaaatacggtttgaaatcttttgtcgtgcagttttggtttgcatttttaccaaattgcgttgtacactgcggtttgcggttttgaacttaataagtacagttcaagttgcaccacactatatattacaaagttaccaattttcacaatataatttttattttttatttttcatatgaaaacaattgtatgtaatatatgtgtatattatattaatttttagagataaatcaatgtagtaacttgatgattagtatatatatttatgatgtttaaatttcaataagatttttttttgtaatgttaaaattttattagattgatttttaatttttttattataatatttgataacgatgatagtgtgtgttaggctatttttagcctacattttgggtcactttttatagttgttttccttctttgttattcttt

SEQ ID NO: 404737 - DNA, 539 bp, Cannabis indica
gccccaggagctgatggatattctagtttcttctttcaagataactgggatattgtggggcctgtggtctgtgatgcagtaatatcctttttggaaacatggaagattttaaaagagatcaactctacaatactcactttggtgcctaaggtcaagtgtccaaacacagtgaaagatttcagacccattgcttccggcaatgtcatttataaggtggtcactaaactcatatgatctagacttaagcatatcctccttgatcttgttgcacacaatcaaggaggctttgttaaaggtcgatatataggtgacaatattatgatttgccaagatctactcagacattatggaaggaaagccaacaagcctagttgtatgattaagttggatctacaaaaggcttatgacagaatagagtggggctttattgaggaaattttaatagcctttaaatttcctccccagttcattcaccttgtgatgaattgtgttaaaaccccaaaattttctgcatggattctttgcatcaaaaagaggtt

SEQ ID NO: 404738 - DNA, 635 bp, Cannabis indica
caatggcaatcagtcttcttcctctccacgatcccagcaattagtttttttttttagttggaagcaatgagttcgtgacctccttaatgtgaagcttcatcttcaacacaatcactaatttgaaccatatatgtatataacacttgcagaaaataaccagtaaggacatgtatatatatatacttcttctgcaaactagtgaatacagagggatcgtcgtcaactctgtttgccattgtgctctctgcgatccaacgcgaccaagcttctcgtcgtctgccagtgacctttccgctccgttcatcttcgtcaaagttcgttcgtcgtcttcgatcaatgatccattgacgtccctgatcaaagatccgcctccgatctttcagcggcgccgtgtgaatcgattcccacggtgaaccaccattaacacccagcacaatctctcgtagcaccattttacgatccacaaacattccactagcatcaccttcttctatgtacacgcaagacgatcatattgcctgatcaagaggtggcaagattttcagatccccaatctccattcgagcagagagcttttcctttacctccggcgaactgcgattcaaccttggcagtgcatcgcagccatctcggat

SEQ ID NO: 404739 - DNA, 720 bp, Cannabis indica
tcttgactcttgagactcttgagacactaagatactaactaaccattagatttatttgaagaaaaaaaaaactaacatagatttaactttatattttacttgagaaatactaaagggcaccaatggtgtatgtgtcagtattactattggtccaattaagtattggatcccatatagtttaatataataacttttaaagaatatcgctaactaatcgcaacgcgacatgtcgagatgctaagcactactagtacctaatagcaatgctctttacttattactcaaatcccctaataacactccaaatctaatactaaattagcatttctcataattaattatttttcattttactatttttttcaattttattttcttcccaacaatatgaacaatttttctcgttcccactatctttcaatttttttttttcaaataaatgtactatcttttttactctttgttcaattatcaattgtttatttcaaatgttgtagaatattgtttttaaggaaattaacatttcaaaatgttgtagaaattaacattgtagacattgacttggtttacctactaaactaacattcttatcccctcaaaaaagaatgattataaatactcattcattgtattttatttataaatactaaatgtataaatatgtaggagctagataccaaagaaggtagattacagattgtgaataaaaaacaaggtagc

SEQ ID NO: 404740 - DNA, 512 bp, Cannabis indica
ggaccctaaccgagacaaaaaccaggacctaaaccacacccaagatcaaaatcaagacctgaaccaagactcggacccaaactccatccgaacccgtaccccatgacatgaaactacagacaaaaatggaagtagatcgggacccaggaacaggacaaggaccagaacctcgacccagaccgaaaactgtaaccaaaccaggacccggattcggacacaaacccaccctgggattgggtcccaaacttgaatccaaacccgaatcgggactttggacccaaacccacacctgaactcaaacccgaacttggaacaggactcgggacccagattagtgatcgagaccaagaactacaccctagtctcggtcccgacccaagaccgagacctagactaagacctaggacatgaaccgaaaccagacaagtgttgggttttatgccctaaataaaactcatttcaatataatcaaatttacttattaatatagatcagaaataacatttaatgtt

SEQ ID NO: 404741 - DNA, 354 bp, Cannabis indica
gtggtatggtgtagaatattgaaaccttttcttagtaacaaaaatctaaaaatagttttaataaacctgagccaaacaacattaaaattttaaaataacaaaaaaatattttctattctaacttttaaaaatacaattctgaaaactgaaaaactaaaaacacaaccaaataacctcttattttctcatgtttggtaaggaaataaatattgtaggaaaaaaacttttcttatttttattctctcttatatggtttgttgatgattttatatgggaaaaaaattattgataaaatttatattgacataatttttaatttaattttattttttaaaaaaataataacttttctaa

SEQ ID NO: 404742 - DNA, 742 bp, Cannabis indica
tctcagcttgaatagcttctacaaattggatgaattgtattaaggattagaatttaaaatagaatattttgttaaaattaaacaataaaaaaaacaacactgtcaaattgagaattacttcccacctatccatctctctctctcaaaaaaaaatatttaatatcttagggcttgttaggtacgccgtatacgagttgtattgtattaaataataaataacactatatttggataaagcaatgtattgtattaattattacgaccaaaaagtttaatacaatgtatgttgtattatttaatacataacaaatggtctgtattagcttgtattataatatttacaaaggattcgaggtcaacaccaatctccgatccagacttgggacccaggctcggacccgaaccccagacttggaccccgaccctagacgtggactcggacccagaccttgaccttgacccggacctggacctggacctgaacctgaacccggaatccgacccggacccggacccggacctgtgatcctgatcccggaccctgacccggaccacgacccctacccgaacccagacccaaacccgaaatctgacccagacccgaacccagacctggacacggaccccgactcggacctggactcgggacccggatccggaatccgacccgaactcgaacccagacctagacccgaaccctgacacgaactcaaacctcgacccaggacccagacccgggacc

SEQ ID NO: 404743 - DNA, 1166 bp, Cannabis indica
tttttttcctttggtttttctatacatcaattttggcttgtgcatggtcagatgggattctcatatatttttttttaatactttttgtctaagcaaaagcataaacttatgttatggctatggagccataataatatatgaatgctcctattgatccaagtgatgaccatgctaattcttttttatcttcaaaaaaaatctacaaatttattactaatttaatttaatgatcataatattttatttacacatatatttttatagttgcgactataaaattagaaatgttataatctcatatatattttacataaatggtctaaccacaaaccttttcaaattttacataatttttttgataattgttaaacgataatatcgatcgcatatatatttttcaatactatatagtactaatatataaataattactaagttatactaaccacttgaaaaatatcaccgaatatcgagcacgtaataatatgttgtatttaactaatacgcattgagtttattcaaaaaaaaactatcaattagtgttgagtttgcacatgtatatacccaatgaaaaagataattacattacatatgtatatataatgaaataataatgatgttgaatgttatcactgtcactatcatttcacttctactgtcaattctttttcttcgtaaccctacaccatttaaaaggttgactattatgaagttttgtatagaaaaattttagctacaagatttttttcccttattgtttggtgatcaaatataataatatagttctaaagtatttgaaaatatctatatagaatctgaattagatgatttttgaaattaacaggattattctcaaacaaaatgttgcaacttcacatgttcctatattactccaatgatagcattctttaagaatgttaaaaatttacacattatctaaaaatataatattttattttatttttcttccacatcatttttagcactcttatttttaaaacactcaaatatatagcactctttaaaaatgttataattatgatcacgtacatattattattatttaatatatattttaatttttagttacaataactttttagcttcaattattttttttaaaaaaattgaatagcaccaattctacaacatagcatccatgcaaa

SEQ ID NO: 404744 - DNA, 784 bp, Cannabis indica
caagtgaaacaacaattaaaagggtttagctgccaaaaactctttagaatactacttaacacaatttaccattgaactgcacgattcattaattggataattaacattaattaatggctaaacttcttgtaataatcacttaattaatgtaacatcctcgtttcaaatttttattaggtattgtcttcactgccacgttttttgggaaaatgcttaattttggagttcttaaaggataaattactagaaacaaagtgtactttgttgatatagagaggtagtagtcatcaatattccatttaatgtagtctcatacctacataattataattatcctagctatttagcctagctatttagttcgagtcttcattaattaagtacttgtaaagaactcaaattttatccctctcgagtagagaatatgattttaattacaatgcatgcatgccaagttccaaccatttttgtccataacataaattaattaaaagtaattgagagtggtgagcatagagatatatatgttagtgaaaatgacaacactacatatatattattagaaaaataattaatgccatatttatcgatcgataattaatcatgaaaaatggtccactttaaatatatatatatatatatatatataaataaaattaagcattaatgactcgtttggtactccgtataagaatcgtattgtattaataaataataaataacattatatttggataaaacaatgtattgtattaattattacgaccaaattttttaatacaat

SEQ ID NO: 404745 - DNA, 718 bp, Cannabis indica
ttttttttagtttaacttgtttccagacctatttaattccacttactcacgacttaataacaactccccggggataattattaagtgtggatgggaactttgccaaattttctttaagcaaaaattgcttatgttgaaataacaagatttgttttatttttttttcaagtatttttttaagcaaagtatataaaattacactaactaaatacaataataaagaaaataacaataataatgatagatagttatattaaagttaggaggcacaaaatgccatcaactaactataataataatagtagtagtagtagtaataataataataagattttaggaggcacaagatgccatcaactaaaatgataaacaaaaataaaagctaggaggcactaatgccatcactagaggagggataataggaggcaaaaatgcactcaactatcaagtatgtaggaggcacaaaatgcactcaactactaaaagaaaaaaaaaaggttaggaggcaaaaatgcactcaactaacaaataggtaggaggcacaaaatgccatcaactaccaataaatatgtatatatatagtataatatataataatatatatataacaatatatatgtataactttcccttatttttcgatttttttattattttattttcagatgaagaataataaaaaaaaaataactagtagaagaatattacttaccttgta

SEQ ID NO: 404746 - DNA, 505 bp, Cannabis indica
gatataattaattaataatggcatagtgggttggcatcgtgtggtgttaagcttctcttatattatttaaagtgtcacacaaaatatatatatatatatatatatataatgatacaatatgatcattattacttatctacaaaaaaaaaaaataatgatcattattatactttactatatgaattcatatgcagacaaaaataaattatacatacggcccaaaacaaaaattaaatttatttaaagtgtcatgtcacacactctaaaatctctctaattttttttttctttcctttattcttgcataaatctataaattaatattttattattattttaataaattatttttttcttttctctttaatttactcttttttaatattctattacaatataaatctataaattaataattttccattattttaataattttttataaaaaacacactacatattatcacatgtttttattatgggtaaataccattttgaaccctct

SEQ ID NO: 404747 - DNA, 655 bp, Cannabis indica
aacattcttgccacatctcgaattgaggacttccagtcctatacatgcccatcgttattgttaataattaatttgagctcaactactattaaagtaagagatcaattggtaatgagctttggacgtggcttgtgaagaatttgatgaggcttcatttacttggtgagaaaaagatatggagatacaagcttgggccaatttatttgggccattcctcttcattccattatttaccaatttttgctcaaatctgaaatataacataaaaatcaaagtaaattaaatatttccaatcaaaacaaatttaacattaaaatttaagaaatatttaatttatattaattttatgtgcataattaagaactaaaaatataaaaatttgaaccttaatcacaaccccaactagcttattgctagtctctagcaattcaagcaaaaataatgtcaacatgatatctttataagtcaaaaattctaaaaatggcacaaatattcaaccaaaatcttagtaacaagccaataacaactataaaattaccttgtataaatctagagttgtgagtgtgtgcaccaaacttaaaccttcttaccgcaaatcgtagcacataaatgtttttgaaaaatataccaagtggaagtctcaactccattagcc

SEQ ID NO: 404748 - DNA, 962 bp, Cannabis indica
tttgctagtatatgtatatatatagcaacaaaaatcgtatcttaattttttcaaaatagtacttataattattcaaatctatgtatatcaaccaaaatatcaaaatgtgtttaaattagaattcaaaatataaatttataattatagatatattgaataaatattttaatataatattattatgtcaattaattaaggtaaaatatattaaaaaatttaaatgattattaatgaaaagtatactatattaattaattaattaattaattcaaaatagttatatatagtttgatattaattaatttattttttttaataaaatcggtatctttataaattaaacaaatcgttaataacaatagaacgtgctttagaggaacaatcctccatctaaagcacacgacctggagagaaacaagaatctctggctaagcagtgagccaacttgtttgcagatcgtttgacaaaacacaaatcaactttgtctaaagataaaagcaacgcacaaacatcatgcactaaaagaccaaaagaagatgacatagagattttactttgaataacttatatacataccaagttgtctgactccaaaatgacttgtccccaattgtgccgatcaatctaacttaaagcttctttcatgccaaccatctcagcaacttcaggttgaaccctccccaaatgaccccgattgaaagcctccatgacattgccatggcagtcgcaagctacacaaccccacccaaacctgccttcttgctcaaataaggcgccatcaacattaaccttgatctttcctaaagaaggtgcactccaatgctcaaccaaacggcctttgtcgaacaacaaagacaaagaaatgccctttcttttttgagcatctttgaactgatcaagtagcattcttgctgatgtaaccacatttgcagcagtccaacttttttgctgccaaacaaagt

SEQ ID NO: 404749 - DNA, 585 bp, Cannabis indica
taaaataatgatattatttttttatctgataatttaaaatatgtgaaatactattttaaatattatcaaatatcaaatgttattcactaaatgtcagtcaaataattcatttatttattatttaaataataataataaatagaatttcaagacataaatctatcacaataaaaaagtgataaaattctaaaactatacaaaatggtatcaaattccaaatgagctcatcaaaattaatcttgaaatattaaaaaggtcattcacctcacaaaatttaaaagatgtcattaacctcacaaaaatctcaaaatggtaattttacctaaaaaaaatttcaaagtgcactaaacttcaaaaccatgacaaattaaatggcattccaaaaagagaggtcattccctcataaaaaaaaaaaaaatcggaactacgtttgacttgatgcctataaaaagatacgtaggcaacttagatactaagactaagtgcagtcgctgatacagcaaaatagtattaaatataaatctcaaaattccatgaaagatcatacgtacacctaggaatttttttaaattttcaaatagcaaa

SEQ ID NO: 404750 - DNA, 636 bp, Cannabis indica
gtcttcttttactttatttcttactttattatattactagttaacaagctgctatttcgtgtggtatgtaataattaattttaaaaattcataactaaaatattattttttgttattaggacaccaaaatactttttattatacataaaaataataaaattataacttaataccaaaaatattaaaagtacatataaatagcaaaaatagtcattatctaataattttttcatatatatatcatcggtatgaaatcaagttaagtttcgcttctgatagaaaatttggtccttattttctcaatgcgttttttcgcatgaatctccatatgtattttttttatagaagaccttcaaattaaataaaaatctatttaaacaatatttaacaaagaattgttcatatatatgtataacatatgaaaaatagtgttcaagaatacttactcttaatataaaattgatttgtgttgttgattgatcgagtaatgttgattgatatttggtatgatcctctctatttatatacatagcactttgcatgattagtagttgtaaagaatatgtatgcgtgatattgatttagttaactatataagtgaagaagtagtaaggtttgagtgtatatttaatttag

SEQ ID NO: 404751 - DNA, 600 bp, Cannabis indica
tttatcctgtgcattctacaacaaagttggccaaggcttggcctttgatagctgttcggggttggaagttgatttcgtactgtcccaattccaccgcccacttgagtaaccgtcgagaggcatctggcttttgcaatatttgtcgtagtggttggtgggtatacacccgaacaggatgagcttgaaagtaaggcctcggctttcttgttgctagaatgaggcagtaagcgagcttttctatcgacggatatcggccttcagcttcaataagtcttttactaatgtaatagactgagtgatgcacgctgttctcttttctaatcagcacggcacttacggcatgctccgtaattgctaggtatatccccagctcctcaccgtctacaggtttagaaagtacgggaggttttgcgagttgtgcctttaaatcttaaaaagctcttgcacattcttctgtccactcgaactttttgtttcctcgcaggatgttgaagaatggaacacatttttccgttgattttgacacgaatctgctaagtgcggcaattcgacaatttaggctttgcacctcttttgtttttgttggtgagttcatatcca

SEQ ID NO: 404752 - DNA, 880 bp, Cannabis indica
attgaggctattaatttgatctactctgatctttagcttaaggtgaaaattgcaggaattaaaaatcgtactttagatggtggttatcccacctgagtactttgtaattttatcagaacctttgggcatggtccgcccagaaggccattcacttgagagtaaatgttcttttgtttagtacttgatatggtcattcgacctggtacttctattggtagtattttcttaaatgttcccctttccaacaccttggtaccagaaatgagttgcattttttcataatacttacccaatttgtatgctcctgattcgagaactttgaccacctgatattgtcctctccagttaggtccgagcacacctgtcgtactgtctttggtgtttagaaatactctccttaggaccatatctccctcaaagaatttccaaagctttcacttgtttgttgaaataccgagctactttttgttgatgggccattagctttatgtttgttgtggttcgcttctcttcaattcatcaagtgattctgcaaggagtacgtgatttgcttcttggctataagtcaatcttctgtggaatggtggttcatgttctacgggcatcatcgcttcatatccatatgccatggcaaatggagtctgtccggttgccgttttctcggttgttcgatacgaccatagaacttcaggatgctgctcaagccaatttcctttagcatcctcaagtcttttctttagtgtatccttcaatgtcttattgactgcttcaacttgaccatttacttggggatgcgccactgtggagaaacttttgatgataccattgttcgcacataaatcagtaaaggactggatgtcaagctgtttgccatttgtcc

SEQ ID NO: 404753 - DNA, 513 bp, Cannabis indica
cttcatatattaatttttaatttgggagaactatttcatattttaaatatctttatatacattagtattaatcatataataaaaaaacaattttaaaatgcaaaagtttatgtcatattgccaacggcattggaaaatcaattgcaagttaagtgaaaactacattttcattgagttttccttgccagccaaactaaagcccaccactttcatttagccagcattaaaatattaaaaacgtaaccaaacacggtaaactttcaaatttacattcccacttctcctaataccgcataccaaacaaccagtgacgaagccagaaatttagttgagtgagggcttgaataaatattaagtcaaaactaataaaaataatgataaatgtatctttcaaattttcatcttcaacaaaataaaataatactgttgacaaaaataaaataaaatattgtcaatggtattatttattttttaataaagtattatttttttattatttgtattggactactt

SEQ ID NO: 404754 - DNA, 577 bp, Cannabis indica
tgtaaagcattacaaacacactaagttactttttccttcattcattttttattattttttttttaaaaaaaatactcaaagtttgatcagtattcatttaagcaaaagaactaatattttctaaagtaaagaatgtaacaaatcattacaaccttatgtagtatggtgaccatagtaacttgttcctttttatgaataaatataacgagcaacatccttaagtaaaactaaatgaatcattctcttgttttgttggcttgtgtggcttctccataggtgggtttctgcacgtttttctattatgacctgatttgccacatcgtccacacttcataaccactcttggctctccccgtgctcttatccttctcctccttggtctaccgggaggaatttttccttttggaggtaggacaagtatgtccaattcttctggtagactccattcatcctcatgtggcaaaggataaactgtttctgcataagttgctttcattgtttcagttttgtagtaagcagaacaaaactcataacaatttagccttttttttttacaatgacagcaagtgcatgtgaa

SEQ ID NO: 404755 - DNA, 506 bp, Cannabis indica
tatgtattttatatgtacaataacataataaatttcattatttacgtattttatattgatctttgttgactacatttttagccaactgcacgaagtcgtaataaatgagacttacactaaaattactgtaataaatgtggttaatgacaccgaaacttacaataaatgtaaataaaagataccagaatttaaagagattcgataccggatgtcggtaatagcctactccttttgtgttttattgatctaggttacaaaagtcaagaacaggctcttaattgcaaacaatgataagtgtttatttttctaagtgttcaagattgtggatcccccctcctaggtcatgttagaccccttatataagggagggggtcggtgcttctcgctttaggagacgcgaccaacgcggagctacctcaatcgtctccttaattttcggaggtagttgaagtctgatttttatgataatatctcactatttttgtgggttgacaactgtctttgag

SEQ ID NO: 404756 - DNA, 537 bp, Cannabis indica
tattttatatatatataatatatatatatatagatgtcataatatgacttatgacaaaattacttattttttttcacttatttttttaaaccaatttctaaagggttttaatttttaatttttgaagcataaatattaatattattataattttatatttgtgagtaatttgaatttttgaaagagtacttttataacttttatttttgaaatttttttcttatttgaaaaaaattataaatagataaagtatttataattaatacaaaaataacatagtgttacttaatacaaatttaatttaatatatactttatattttgttgactatagtataattaaattgttaatatatatgtaattactgcaaattaatataaaaataagaaactgataatttttatatttttaaataataaaatatattaagaaatacctgaaatcgtaaatattattatttcatagaaaactattaaataaacataataaaataatatttattgttggaggaaaataaataacactaaaaactgcaaa

SEQ ID NO: 404757 - DNA, 600 bp, Cannabis indica
atatgttgttagggaaactattatagagaggtaggcgagttgttgtcatgagatggtgacttttggttgtcttgttgaggatttcaaaaagatggctgtaactattactttgtttctccgagatgccacatcatcaaaactcttcaaggtatgtgcaggtgtgttctctagaggtcgttgcattatgagaccttaggcattctcttgccacttctccatcccaatgaatgaggagtatcagtatttaatctccacagatataaacccctttcaaaggcattggttaaagtaagcttgggttagatgtatggagtatgcatcggaagggaccgtaatatctatttaattcaatatcacctagttgatcttagatcaaatgatctcaatcctgagatggttatgttctagttcagttgcattatttatgttcttcaatctattcgttaaagtcgaccaataaatcttctcgtgacatatagattaaaggcatggtagttcaattgagtgggagcgctaatcatagatacggaatctatagcttctatctggatgtagaactgaaacgatgatttcgttcgagcttgacttaatagagataaa

SEQ ID NO: 404758 - DNA, 740 bp, Cannabis indica
ccaatcaaatctaatccacaaaaatacagatgggatcggttattttggatggattactttttaatattaaattatttaatattatgaagaaaatatattttttatcacataactagtaacaaaataataataaaaaaattattattttatgtctccaacaaaaaattaaaataaataaaataataaattcaaataaagaaaaaaatgtatatatagaaaatatttaatgtttaattgtatatataatctttttttatatatatataaatatgtgtagattggattagattggatcagttacttttacaagtcaatcaacattcaatctgcacaaagtgtagattttaaattttctaatccgatccaatatctgcacaagtgcggatatccacactttgcgaattggattggattggatcgattatcttatgaacactttttatactattattatttttaataaaaaaattttaatatatactttttttttttatttattatcacattctaaaaaatacatatataagcaaatatattttttacattaaagtaaaaatgaaacaaaaatgttcatattttttaataattacattattatggatattgtattgttattttgattgatttacaatcacaacaatttttttaagaaatataacaacgtatttaagatgtaatacaaatttatctatttaaaatatctttatatattaaaagtgcctatctaacagcatttcttg

SEQ ID NO: 404759 - DNA, 618 bp, Cannabis indica
ctgaatacaatagtttttgtgccccgttttcgtcatttggaagttttctgtcgagtaagtaattgataataggagtcgtccatgtaggagagctgtctatcatctcgacgtctttcgtttcacatatgcttgcctcacttagtacctccactggaaccaagttcaattcatccaagtcgttctgagaggccagttttgctaagacatcggtcttaaagttctgttcactcggaatttattcgatcttaaagtaatcgaatctttccaagttccaccaaactttctctaaatacttcgccatttttaagcctttggcctattattccccgaggacctggtttacaatcagctgtgaatcactatggaaaatgaggtttttgactttcaatgcttaaactatctttaggccagcaatcaaggcttcatactcgacctcgttatttgatgcgtcaaactgaaactacagagcattgtgaaacttacagccctctggtgatattaatattacccctacacccgaaccctactcgttggatgcaccatccacatataacttccaggtttgcgcatctcgttgaacaagtaaaatttcttctagagttataccttctatcaaga

SEQ ID NO: 404760 - DNA, 756 bp, Cannabis indica
caaaaaagggactgaatctgttgaggagggtgcaaatttgatccaacaaactcagaaagttgatgaagattgaacaataataagtcatgctacttatggtttcatgggtttatagaaccgaagagtgtcttagagagtggagatgaattctttcctagaacagttccccctgttagtttagttcagccactcaagtctacaacatgtttatttctttagttgtatggcttactgcttttattttaattttatttcactttgttactacggttttcctccgccataagtgaggctccctaattaatttggtaggagatcaagcaccttcttgacctttgtctctttttcaaaaaaagaaaaatgctacttatgatttcatattgaaattatttgtttcttaaaaaagattacttaataggaaggattaatgattggttagatgatgatttgcagagttcttggggatggatgttaagccattctgaacctgtctacaaggtaatttgtaagtaacatgttttcaatgcataatcataaaaactcatgcattactttattttgagtcttattgctgacattttaatacaaccccgtttgtagagaactaaagaatatcaatatcatttcattgaaggacttaaaactagccaattttcaatggcttatacctgtatgggctatgaagttatactcatttccttttaacagggatgtgagcttcaacaagttaaatggacaaattccagactctctttt

SEQ ID NO: 404761 - DNA, 639 bp, Cannabis indica
tttgactccattgcctccttgtaggtcctaggttcattttcacataatccagacactataagggcctagtgaatgatatctgcatatccaaacctcttgagagtcttataagttcttttagttttatccctggtcagctgatattgtagaatgtttggatcctcatccccttccaataccagctcctctttaccagtatcctcttcaccatcttcctccacttctaattcagcttcagtagctatttctggtcacctttcttggttgcctcgtgtcaagttcttctcaggttccacctcaaactagatattattaggtttctcaggtccaatacttgaacttgattctagtgtcgctttatcctcttcaaaacacaacattcctactaatgaaaaaacttttgataattaccactttctacactccacagttttataaccttttacactttctggatagctaagaaaaaaacactgtggcccttagttatagtttatcttatttgatatgggcataggaaaatctaaaagttttcagcctttcataatttagtcagggtgacttgttcttgccttaattggtgtcttgaaaacaattgcaggtgagagacatatgttgatcagatggaaatttgttaca

SEQ ID NO: 404762 - DNA, 553 bp, Cannabis indica
agagagagagagaagggaaaagagggtaattctattttggcatttttcctttgtttttctttaatttttctttaaatgaaaactaggattaactatattattctaggctgaaaataacagctaggtgtcagcacttaaggaagccaccaaaccattcattaaaaaaattactaaaatgcccctaatttctaacttatgcattttgaagactaggggtaaaatggtcaaaatctgtaaccctgctcaaactattctatttcctccaacatacatcccactaagaaatatgattctagacctacccatgtgatcaaactagccatccattgcattttccgttgtcaccgagtaaaaattataaaaattgcaaaattcacatataacacaaataatacacctagagtttaataaaatctctaaaattaagaaattataactctaatgcccatttctaacaatgggacccacaaaacaaattaaattcacaaataattataaaaataccaataattagtactaattgtctttgctaatccaaattactaaagcggtc

SEQ ID NO: 404763 - DNA, 1477 bp, Cannabis indica
aacggttaactgttttcccaaactgcttaccataatctgggagtccatcctagaaaacagttcacctataatgaccgcttaactttaatttggaaattaacagataattaggatttaattatgaaacttgcatattagttattttttattattttacggagatttatttgaattcacaatgcattttatatgtcatatatagaatttcatatttttgcatgttttgtgccagacaacattggaacgcgacatttggctattagaatcacatcttactatttttagtatagtggggcaatatagttagacatagagaatgtcaggaagcgtcgagatttgagaagtgaccaaattatccctaggtgatttaatgactttttggttaattggagggcaaaatgataattttgcccaattgtatttttgtcttttaatgtatatttattggagattatatgttgagcttctcatttaattaaatagataaaaagaagtttagtttctttcatttttattaattagaagaaaatcacataaaacactctctcttttgaacccaaaagaatccaggtagattttatgtttttgttgcttaattctgaggtttctaacaagtttctagtgatccaatccaaggtataacttccttagactgtcctttgtgttaattttatgtttttagttgagtttcaagcatgttttttttaagtacatggttctgtagtttctgttgttgtttgtgaatgtattatgaagttagattatggatattaatgttgaattaagactgttgaattaagcttgtttgggtggctgttgtaaggttggagcaagctttgagtttaagaactcaagcttggctctttaatggtgaattttgaatatgagcttgtttagttgttttattgcttggaatatgtttattcgggtatattaagaaagtctggaaggtttggtttgatttgggtacgaattggtcaagtttcaaaattttttgggttacgtggtgtaaaactgattaatcgaatcagcagttgggttcccaaactttttgtgttgtcgattcgtgttagttttagagctttggttggttaattccataacagtttaggatattgccatgttaacgttcagtaggaaaacttttggtttacaacctaagtccccggatgtcatttagcatgtcacttacgcgtgttacgaatgatgtgattaggggcctgtaattgaccgagcagtttttccacttaagttggccgacacacctgaattcggaaacaaggtaaggttagtataatgtcatgcatatgtgtttacatgttaagcgtacatgttatttatgcatgtacattgatagcactatcagtatacatagagttatcccgtatactgatagatgtatgtatggctcaaatactgattgatgctatcacatcaatatggctagtgtatgactagcatattgagtataggctga

SEQ ID NO: 404764 - DNA, 543 bp, Cannabis indica
ttgtccaatgtattctaggaaaccaaaaaaaattctatttgtaatctaaaattaaatgtcaaagacataaatttataccaattatttcttgagtaattattctatcttggaccaacactactaatctaaatgtaagtttaagttgcctaaagtaaacatataaaagtgggggatttctaagatcgatgatttatattattttgggatagaatgtcgggaatatagtcatttgcgccattcaatttcatagaaaaaaaaaatagaatgacatcataagcagatgatttataaataattcatcaaatgatataatatttaagcaaattctaaataaataagctaagaggaaaaactaaagcatcatttcatattgtacatccatagatgacaacttagactagtatttacaatatgaaacaatgaagaataaaataagaataactttgactctcgactaaatgggacatcatttgattcttattttaatagaaattatgctttagtttttcctcttagctgcatttacaaatacttatctttcga

SEQ ID NO: 404765 - DNA, 759 bp, Cannabis indica
aacttgtccgatgttcaatcctaccaaacacatcatttatccaattaccaaaaccttgatttataaagtacatttaataaatgagaatcataaaatctaataaaagtattaaaatctaacaaaatcataaaaatgtgattttttattttctctaaaatcaagttgttgataaatttgcttgacaccctcaagccaaacataaaagctatcaaaaaataacaagaaagcattaaagtatgacatctcatccataaacacttttgcttttttgggtcatgtaaaaatgtgtatattatatatctctcttaaaattgtgttaggattaatatgactaatgtcaaataacaactaggtgtgtgattttttttatttgttttatttttacaagtgtcaaaattgtttgtaacaacttaggttttcttctcatggggctatcaacccctcaattgtgtaagaaagagacttagcccaatcagctttgtagagcaaagtttgcagagtatccataacattgtagccaggatcaagtttacattgccaaccctacaccaacaaaatcgaaaacacattatgtgaattttcaaagccgaaagaacactgaacacataatggcagcaccactagtagcgtttggttggaatgaatgaaaatataagaatgagaataagaataagaatggaatcaaatttaaaatatatttctttttatctggtcattccttctatttcaaaattgaatagccattccaccaaaatgatg

SEQ ID NO: 404766 - DNA, 358 bp, Cannabis indica
aaataatataattttacacaaccattaacatgacaatattaaatataacattacattaaataatattatacaatattacaacacaatacaacttatgtaatactatacaataaaatacagtgtaccaaacaagccctaaatattttatgacacaattggccctacttaaaataattgtaaatggattacaaataattaacatattacttcgtgtgtatcgttcttgttataaataattagtatttgtagtggtcttggtatggtagtgcgtgattatttgggcatcgttcttgcttttactgtttggtgcctagaacagtggcagacccatgattgaatttatggtggacttagttat

SEQ ID NO: 404767 - DNA, 530 bp, Cannabis indica
tgacataactataatgaagcgaatacatcgattgataggatgaatatctccaagtaaaatgactatgtttaagaaagaaaggcctctgcccctattcggaccaagccttcgtcttctccgtctctcaacaagcatgttggctgtccagatctcgtcttcttcctcttcaaactttcagagtagcgatgagtctcaaaaatctttttcccacccgtctccgtgtcgtggtggttcaacattaatggcgattgacagccatccatcagccttctctcagctgggatcggaatcgtcaaccttgctgacgatttgggagaaagcgtgccaatccattaatgtctcccttacaggtttgatcccctctctgaacaaatctcattatgatccctattttctcttaatcatgactgcctattccagttcttttaggggttatagtcttaattgctctttctaccaacctagtcagtggatggatttggtaatcccccgctcgatccggctttaaatacatgtcttttattctccct

SEQ ID NO: 404768 - DNA, 533 bp, Cannabis indica
aaaatacacgttgttcagtaaaaaataaaaaataactctataaataaataaacagcaaaaaataattagaaaaaaaaattcatgaaaactgtaatataactataaaaataaattataaaatgattaaaaaaaataattgaacttttataaacctaataagtgcgctccgaggccgcaccaccacctccggccatccacggtccaaatctctctctccttcgcttctagccgcggtaactccgtcagcgtccaagggcctccaatcgtaatattacagtggggttttatctttcgcttcagcccagccgcctagacgatctgccgatgacggtgcctccccatttgcagacgacggcggtgtaagctcttccccgtttgtagacgctggcggtgcacatcaacgacgacgatctccctctcgcaaacgtcaacgacgttggtgtgaaggttcctgcgatttcagccattgttccttgtcgttgattaaagagagtaaaagattggttcaagctgtttccgtgagttacagtcaa

SEQ ID NO: 404769 - DNA, 1148 bp, Cannabis indica
ttctagtagttatagaagctccagattctatatctataattaacgctcccactcaattgtactaccatgctcccaagatataagtattggattgaactaatttgtcagctttaacgaacaagtcaaagaacacaaataatagatttaagccagaacctaaccatctcaagattaagatctattgacctaagatcaactaagtgatattgacttagaaagatataatggtaagtttatgatatcttatccaatgtcaatatcggtcaagtctgatgtacactccatacatatgatactagcttactttgccaatgtcctgaaaaggacaaaacacttatccaaaggtgtaagtaaactttattgctgattatcatgttagtgtaaatccagtgtactaacaaatcatgagatttaaactttaaaacgtataatcatgattatattctattgaatagaccatactataatcatgaataactatatgttctagatttaatagaatttatacattaaatatataattatgaaagaaatcatgtgaaccatgcaacataaaataaattctgatattttatatattagtaaatttgattatattgagatgagttttatttaggatataaaatcccaacaaactcccacttgcactaatataaaactaaaagtgtgtttcagttaatttcaacaccttgatgtccagatcaagtgtagtatgtagtatttgacaagctgtattcaatacaaaatttctccaccattacatctccttagtcacaaaaactttgatatcgtaagatttctttccatatatctactcctctctggttattagattctttattgtttggcaactatatctgtgttagtcaagaagtaacactagtagttaattcatgacgagaataacgttaaaagctgtatagaactttccattagttgaataattatatagtagccttttgggccactttaacattaagtctcactggtagagttatagactctgaattgtacacttctccaaaaatcactgctccactccagagtagtcaccatttgtcaagtagactttctagcattaacgcaagtctagaaacttaatttggtgtagcctaagagtattaaaatactaccattatcgactaaca

SEQ ID NO: 404770 - DNA, 948 bp, Cannabis indica
ggggactagactagcctaggaaataggaaaacactcaactaaggcactgaaatgggcaacaattgagaaaatgaggtgttcagggaatctgccaaaaccatgtaaatcggttttactggacctagcaaaccgattaaccggtttgcaccaggtttccccaaacaacctcgaacttgctcaaaaatcaaccaattgccaccaaactttcaagagtacttaaacagggtaaaaacaacatattccaaccaataaaaccaagaaaaagtcattgaatcaaaacatgccgttaaagacctaagcttgagtttcaaagctcaaacttgggaaatttccacacaatactctcaaatcaacaactagaacccaaaatcaacttaaaatgaacataaaaactgaaccataacctaatcataccctaatagcccctataactcaaaatcacaaattcaaaccaaaaccaaaacctgaaaaactaagaacaattgacctagggattacctcaacttgaattcttcttcaattccttgttgaaaactccaaagatcagcagcaaacccccttgtttttggctggttcaaagagagagagaagggaaagataattgttcttgagttttggctttttcttgatttttctcaaaatgaaataaggtttaaaaaaatacaccctggctgaaaataaaataaataggtgtcactccccgaggcagccaccaaatcaaccattagacaaattactaaaaatgccctttgttttataactttaacattttcaagatcaggggtaaaatagtcaaaatccataactctgctcaaccccggtactctaattgctccagcatacatcccacaaagtaataaggttctagacctacacatttgatcaaactagccatccatcgtatttttcgttgtcaccaagtaaaaattataaaaattgcataattca

SEQ ID NO: 404771 - DNA, 1218 bp, Cannabis indica
agttggaagccattagaagagacattaagaatgaggatgatgatgagcaataactttggatctgtattttcaacaactccttctttctcacctctctccaaattagaaagcctaactctaagagacattgatgatctagaatgtcttccagactccttcaagagccttacttctcttatttccttggaaattggtggttgtcctaaattgaaggatttgtgtcctggtattctacatctctcatcacttcaaactttgtggatttcagaatgcgaggggttaggggacatgctgattagtgatgattatgactttatgtggcgatccctaaatggaacactccaatcattagaactaaggaagttgacaaatatagtgtctgttcttcctaagggtatccaacatcttacaagtctaaaatatcttatagtttacgattgtgatagtctgacaacaatcccagagcggatccacaacctcaaatcactttggagtcttacgttatatggctgccccaatgtgacatcattccctgaacgaattcgaagcctcaccactttgaaccatctgtttatttcacattgccccatgttattgaagagatgcaaaaggaataccggtgaagattgggataagatttctcatattcgacacttacacctaattccagatcccaacaaagaaaaagaagaaaatgaggtagaaacgtcaatgtctaatgtttgctttaattttcaaataaaattaaaatcagtgcttatgatgtttatcttgatattgcagaatacaaagggatgcaacctcttgaacaaatttaggctacgcaatacaagaaatcaaggatagtctatagattagatatatcatatgtgtgtaggtaattatcttcactatgcatgcaattacttccttctgatatgatttatataaaaaaatcctttcttgttttttttttaaaaaaacacaaaaaattgtcatggactgaagctatatatcattattataattattattattattattattattattgaaagcaactatatatcattgttaatgtatacaatctagaaatttttccattaattgcttgaaggattagcaattatttagagatagatggagtcatcatttccttatatgtggaatttgcctaatctaaaaggatggtggaaagagattgaagttgatcattcttgttttgatgcaaatgcaaat

SEQ ID NO: 404772 - DNA, 704 bp, Cannabis indica
ccaacagattctgcacgcagcatcgttccctccgcccactacccccttcactccgcgcgcgcaggggtatgcattgcatacccctgtgcccaattttattttgtgatatcttttgattcaaaattcatttttcattgaaataaaattcaaatttttgtagaattttatgtagaatatgaattttcaattaaaaatttaattatcagaataaaactatttttattaattttttaattaattaaaattagttttagatattagtagcctttgaatttgaaaatttgatttttttcacaaactagccttacggtaattttgaaatttttgattattttttttattttatttattttaattataagattagatattacttattttattattaaatttgaaatgatcttattttgatattaaaatattaataaaatttagaaataatctagttaaagtttcaaatttgctaaccatatcagatttcaagatttgttatttttaaaatattttattaaattaaattataagattagaaaaatgtttgttttaacattttatcttattatatatttattttaatggcaaaataacatgaaatttagaaaagtttgttaattttgtttgaatagaaattttagggtttgctaaccataaaattttcaaacttaggatattttgttttatttaattattaaataaaattgata

SEQ ID NO: 404773 - DNA, 682 bp, Cannabis indica
ctgcacagttttaacaccagatgtaattgcggttatatttgcaagttcagtcttagaaaatcaagaaaaaaaaaactactaaaacaacaacaaaaacaaatgtaaaataatgaagcagatataaccacttaagaaaaacataaaagaaccacacacctaaattacactctatacccactttttattttttattttaatttttacctttattttactacactttaatttatatctagttttataggtgatcatatccccattatgtgcattaaaattctaattttaataagttatgtaaggttatatttgatactttgattataaaagagagtatttattaattaaaattattttagagttatatttggttaatgcatactaaaaaatagttttcaacttatccctcaaaactcttttaccagtgagctcgtcaaatgtatttataggagaactaaaataaaaaaacataaaaatatccaaagcgaatgaagaagaaatgtatttattacctccatcttccacacccacggacataatcaccacagcaacacgagaacacccagaaaataactattaattctagcgagatagagcaagaacaatgaaattgacgtcaaataaataaatcatgacaaacaaccgtaaaacaatacttaaacaaataaaaaaaataaaaaaaaaa

SEQ ID NO: 404774 - DNA, 990 bp, Cannabis indica
tttttatatcaacttttattattttgctccaatatataattataaatctagatataaaatttaatatatcatttaatgctcacttaataatttattaaaagtagaaattacacaatatatggaaagattattaattttttttaaaaaaatatttttttattttttttatatttatatgggcttttatgccatatttttgtaagaaaaaaaaaatagaaatatatttgtaaacaatttgttagaaaagttgttgcagccggaaaaatcactgaaaaagttagtgttaccagaaaaatcactgttaccaaaagattcaccgtcaccggaaaagtcactgtcgccgaaaaaagttactaaaaaagtcaacaaaagtcgatgtcttaaatataaacaaaaatagaaccaattctatacaacataatgaataaaaaataaataactcaaaataactcaaatcagttataattgaaatataatcgattttgtaacataatgataaataaaaacaaataactcaaactaattataattaaaatagaaccggttctataacaatgttataatgaataaaaacaaataacacgaaataactcaaacaattaaaatagaacggttacataacataatgaatgagtatttttggggtaaatgtgatatgaatgtaattatttggtgggttggagcatgttgaatgaatatttttgtttgagttattttatttaactggtttttgtgtatgaatttttatcttagttgttttacggaacttttttttttttgtcttaaatttttaactagttggtaaatataactaatttctttatattatatttgagttattatttgtgtttatttattttgttatggaattgattcttttcatatgtatacctcaacattttttggaattgatctccatttttttttaaaaaaaattatgataggttttatgaggtattttattgtggagctagttttgtttttaattta

SEQ ID NO: 404775 - DNA, 574 bp, Cannabis indica
gtcaagtactcaattatagtgtgaaaaattgtgaagaacccaacacctgaaggagatctaggctcagatctttttattactctgtgatagaaaggaacaaggattaaagatctgagtggaaggaaccatattattctgctgcaaacaatataaggttctctaaacttttgttaggttatttttagtactaattttagattaattttagtatagttttaatttaggtagttttaatcgtatttggagcaattttacgcttgttatcttttatttttgtagatttaaaatagatgaagatttgaaaaatatcaacgaaaaagatgagaataaaagataaaagatcacacaaaatatcaatgtgaaaaatcggaatcctgcctagaaaaaaaagattatacgggtgaaaaacgtgggcaatgaagcatacgggccgcggcctaggaatgggcatgccgtggctcgcctattcaaaaatcaattaccaatgcatgaaaaccacacacgggccgcgacccagcaaagtgggtgccgcggcccgcccctatgatgatacaaaaattctatttttttctca

SEQ ID NO: 404776 - DNA, 677 bp, Cannabis indica
tggtaaaataaattccaacgaaacagcctttgcttcccttcgagatttattcattggctgcttgtttgcttgagaggtacgaattacttccttttactcaatggtcggattcaaggttcctttaaaggagaaaaagatcttcgccaagtagaccccttatctcctctgctgtttgtgttgataatggaatacatgtcgaggcttttatctcaggtttcgaacaaaaaagggtttggcttccaccccctttgtaagaatcttagattaaccaacctctattttgctgatgatgtcattatcttctgtaaagggaacatgaagtctgtggagtaagttaatgatgcttttcgggaatttcgccaagcgtttggtctttcagcaaataagaagaaatccgatgtttattttggaggggttaaggaaaccgaaatcaatatcttggctctaactcaaatggaagagggaacgtttcccctcaaatatttgggtgtaaagctaagaccaactaaatggaagccttttgattgtggtgtgattttagataagctcagcttgaagttaaaaggttgggcaagtaggaacctctcctttgctggccgtgctcagttaattcaatctgtgcttcttggcattcgtactttttggatgagccttttcatcttaccccaaaaaatagt

SEQ ID NO: 404777 - DNA, 891 bp, Cannabis indica
tcacccaaagattaattttcaactgatgaggaccaggagtgggtggaaatacctagaacaataatttgagaagtgaaaataatcacttcagacaattggatccactaaactctagcaattggtgtgatctaccctatgtcaatgtagaagctccaccagccaggtagagaagtgtgggtggccaggccctacccagcttaaggctggtcgaccatgtacaagcatcagacccagggttggtcggccttgagtatacccactctgatggtatggtcggccaggctctggcaaatccgaggctacaactctgtatagactgcttaaatttaatttggaaattagcaaataattagggtttaatgatgaaaattgcatattagttttgaatttattaatttttcggagatttatttgaattcaaaatgcattttatatgtcatatatggaatttcataattttgcatattttgtgcccggcaacattggaacgcagtgttgggctattagaatcacatcttagtatattttagtatagcggggcaatatagttagacattaggaatgtcaggaatagtcaatattttagaattgacaaaatacccctaagtggttttttatgctttttagtgtgggaagggcaaaatggtcattttgcctaagttaatgttttttcctttagtggacattagtagaattattatgctaaatattagatgttattagtttaataaaaccattttattaatctcatttttacaaaataccaaaattaatataaaaagaaattctttctctctttcaactctctcttttcgaaccccctagaaccagctagggttctgatttttgttcttcaattgctgtgatatctagcagctctaagtgaatcca

SEQ ID NO: 404778 - DNA, 720 bp, Cannabis indica
gtcagtagagactctaatattgtcgtaaatagggcacatataaggcctaaatttttgatcatcgggtcgatctagatagaaatatatagtattagttacttccaaatgtttcttttaataaattacaaaacagagtctgtcctaaacaaaactggaagaaaattacagttttacaaatattgggtacttacgctgactaaaaataaacattggatttatgccacttacaaacataaaactttaagtacttatgccgctatttaccctaaaaaaaattacttctagtgacaatttttttttttttttgaaaatcggtgtttatggataacataaattttaatcataacaaaaagttacttatgattaaaatatactatttagataagttgtcattaatttagttttagtcacaataaatattatgactaaaaatatatttagtcacaacaaattaattgtgatttttgtaactaataatagccacggatattttagtcacaacataaatatattaatttataattagtttcaagttttgttgtgaccaaaagtaatttttttacattgatacttttataatatactagatgagagttacgtggcgagccacgtaaatattagttttatataagttttagtggtttttgtttaagaatccagtaactgagcaacggcaacaacaatggtagatagatctatttaagtttttcatatttgtaa

SEQ ID NO: 404779 - DNA, 607 bp, Cannabis indica
gcggtagttctgtgcatataaacccattccacacctgtcacacaaaatgttaatcagatgaactcttctagtaaagaaaaagatgaacaaaattcttgtttaaactttcatcttaccatctgaaatagctgattcaacagcaaaatacaacatatcacttgcaatacatttggcgacacacaattatataaccatatctattttgggatagacggtttatgctgcagaagaaaggagctttcagcccattcctgagtgtcctgatttttcattatttttttttataaagaaatagcaattatatcattgctataaacaaacttacgattttaggggaattaaatttttaagagacttacgatttttttttgagagaagttaggcaaattggttttacttttatatgtatttatatatattttctttttttggggggaatttttttgggaaaattaggcttacgatatggttttgtttatatatatattatttatttttttaagggagtcaatgacagagttaaaatgagtcatcccaagataagtttgctagagatatgtgggtaagatgatttttttttttaatttaaaaagaaattattaatatt

SEQ ID NO: 404780 - DNA, 773 bp, Cannabis indica
attttaccagtagaccaaaattgaatgtggctcaatctcttcctagttatgcaatgaatgtgttcttgctacctgtggaaacttgcaatgagatggagcaattgatgtgtaagttttggtggcgatcgtcgaagaacaacaaaggaatccattggaaaaagtgggatagattgacggtacataagtctaaaggtggtatgggatttcgcaacttgcatgactttaacttgagtttgctttgtaaacaaggatggagattgtttagtcgtccggactcacttgtcagcaagatttttaaagctaggtactaccgtaatggtacctttttaaatgctgagttggggagcaatccaagtttcgtgtggcgaagtatttatgaaactcaagagatcgttcgaaaaggggcgagatgcagagttggtgatggttctcgaattaatatagtgttggatccgtggctgccgaatgaagataatccaagagtaacttcgaataatcctgctcttattgatcaaaatgttaaagcacttatggaaactgatacgttggcttgatgttgacttggtgcatgatatgtttaatgaaagggatgctaacttgattcttagtatttccttgtcttcaagtcgtttatgtgatgtttggtattggagttgggagagctcgggccatttctcagtaaaatcagtttataagttcttacaattgagcaaagagttgggtgcacaggatgataattccgtcttttggaatactctttggaagctaagtgt

SEQ ID NO: 404781 - DNA, 602 bp, Cannabis indica
ataaccgatgggtattcccctacactgaatctgtaggttattacacggggatgggatatggatgggggtataaataggtagcggggatggggacggggattgcattccccatacattaaccgcccaatttctgtctctgaccttgattgtttccttgcttgtaaagcacgaaccgagatttattatttgagtatatatgattactcaggttgtggttttatatggaaataataaaatgatttattataaaataaatactatatatctttatatggtatttcattgtaatagatatattttattttatttcttttatgatctgcattaatctcaccagctaggatccgtgatgtccaataagaattcgtgggatgtatttgctttaatggagtatagattgacaatgctgactaggtagatcaggattatgtttgcataaatctgggtttcgtttgcatatttttcatatctgttcaaacgaaattttgtcattttaataaatttttgtaaggaaactaatcaatgatttctctttgtatttagacatttgatcttggttttaggtgtcatttatccctataaatatcacctaaactagtagc

SEQ ID NO: 404782 - DNA, 647 bp, Cannabis indica
taagaatttgtatgattttatgtgaaaatattttaaaatgtatacatctataaaattatttttttttgtacattttttgtaattaattaaaataatgtatacatttatgtaaaatgcccttttatttactttaacttaaaataaataaaaaaattaaattataaatttttaccaatacattattgcactgaaaaaatcttattatgtgataactataagtaggttttgccaacgcaaaaataacttgtcaaaaatcaaatgtctatctattaaaatatatttttgtcggcatattaatgtgttgacaaaagtaatagacttttaccagcacggtaatgtgctggtaccgacgctaatttaccctttttgccagcgcaaaattacgctgacaaaagaagatttcgttttgacaacccaacttttaccagtgcacaacagtctcatttcttgtagtgttgatagaaaattaagtcatctcaatatgagcattttagacattttttatataatgtttaggatatcactatttgaaattttaactcataatctcctatgcatgctaggggtgtgcataaatcgatccaatccaatgagaactgaccgatccaattacaactgaccgccaaacattggatatccaattgtga

SEQ ID NO: 404783 - DNA, 554 bp, Cannabis indica
ttcttgactttcatgccttgtatcatctgatggctgttttctgaccaaactgtttttgttctatgcagacatgtctcggcagatgcttgatgctctaaggaagaggatgggctgaagctctagcgcctctactccggtcaagaagcttaagggcagtgaggggtcctcggagaagagaccttctggagaggttattgacctttccgaggagctgactgctgcaaacccttctacccccaaatctgccaagtccaaggagtctggaccaccaacgactgggtctgaactggtcaggagtgttcctgagcgggtgcaggcaccaactccacctttgcccgtgctgctagaggccaaaaagggcaaggagatgctggcccactatatgaaccggctggttcctgaggtcagtgagcaactggctggtgctgatagtgactcatctctggatgtgttggtgggtggagtcctgaaggagctcaccagggtaagtcttttttgatacttcccttttactttccacacttagctccatatgctgacttttttcctttgtg

SEQ ID NO: 404784 - DNA, 1208 bp, Cannabis indica
gtatcaaaacgagccccaggaggctccccaaggagcattcaatgcccaggttgacatatagcttggtgtgttaggttctgcttatatgattttggttctatcttgagcatttaactattatatttatttattgtaaacgagagctacgactactgataagtcaaattcacactttgatattttgccttattgacaaggttgaatattggcaaattagtcataaatcaaaagtttcgagtctacctgattttgtgaaaaagcgacatctttgagaactagtgaacaacttcaccaaaactaagaaattgactaagtgaagtcataataacacataggcatcaaaaaatacaagtcagtgatattttttcacccacccagcgtccaggttgacgtccgtatgtcaatttgggcactggctgccaacttgggcattgtgtcttgtacaactttcaataaaatggccataactctcttaatattgatccgattgatgtgattcaacttaaattttaaatctcttttaaagatatttcatgtcttatctcacactcatatcgcaattttgaagatttcaagtccaaattttatcataaagacaagtgcaattttttccacaaattacccgaaaatgatctaactgacgtgattcaagctccaaaaattgatgatttttgttaagagtagttttttcatattttttgtatttttttattattattttaattgacatccttccctataaaatgagagctcgactagctcattttcacaatctaccaagtctccataaggttagagcatatctctctactttctctccctagaaatttgagctctttcctaagcgaattctcttataactctcgtgagaaataaaaactcaaagtagacgtagctccattaccttcgtaccataaggagtgaagtactataaattttgtgtatctctctgtaatatttacttaactcattttttatcttgctaatctagcgagttgatattgactatttttcagcgtcaacaacattattctactatcattcttagaatttctattcactagtgtaggattataggttaaagtgataaattactttggaatattggcggtagaacttaggactgaacattttcagcgggtttgaccggaacccgagcaacccgcccgaacttgaactagtaaacctgtaattttttttaaaaaaaa

SEQ ID NO: 404785 - DNA, 1160 bp, Cannabis indica
ttctcagactataaatggtcagcaatcaaatccccggtcacaggttgcacctgtgggccaagtggtagtgggagaccttgtccagtaattcatcaggagaagtcatacccaataattccaaccaagttaatggtgtcggtcaactaattggcaaaccaaccaatcactgagacaaccaggcatttccgtatttgataggttggggatgacccatgatctcaaaaatgatctgaatgggaggagaggagtggacgatcagcttgacatgccgatcgtgtagctcggaactcgcgctcaaattcccactcagaaacatgctaatgtgactcagattggccaggaggccgaacaggttattctagccgtgcaggcacagtaggacgaactaaaaagtatgttccaaggcatggccagtcatatgaacaatgatctcaagttggatcgagcacgatgaacccctttctcccccaagatcaatatcatagagttgccccacaagtttaaaatgccaaccttaaagatgtatactggaaaggaagatcctttgtccaacctcaagtatttcgagatacaaatggatctgcaaggagtacaaggagatgtatgttgcagaattattcctgccaccctctcggaagccgcccagtaatggtatttcaagttggcacccggaaagttcaatttgtggaaagctttctcctcggagttccatgcacaatttgttgggttttatgccataaataaaactctaatttcaatgtaatctttatcttttaaatatcaataaagaaacagaagtattttcatcacttatttgtgtgtcatttggttcatgttatcatttacttgtttatttgatttataaattcacctaaacccatatcacatttataatcctgtttattgtgtcgtcagcacagtggaaaataatcaagattatgtgattaaatgtatattcctagatttatcaatacaaatggtttaactgatatgtgaatctacaacatagtatacttgcaccttggataagtgctatgttctttccaaggcattggttaaagtaaagcttgggttggatgcatggagtatgcatcagaagggaccgatatcgaactttaatttagatatattaaactcaccgtagtatctattcaattcaa

SEQ ID NO: 404786 - DNA, 705 bp, Cannabis indica
ctttcattgaactcactgattttcctaaccaggcgaccttgtaagtcatcccactgctcgcctccagatgttaagaggtcagtcgtgatccctgcttgaagagcagtaagttgaatactgtcattcaagtttctaactttagcagcggcaatactaaaacgatttaggtaaaccttaagtgactcgcctagttgctgctttacattactaagggaagatgcttcaggtcgtctgtctcttgctgcctgaaactgtttcttaaagtccttggatagctgttcccaagaaattattaaatgatgggtaaaattattgaactagctactcactgctccagtcagcgaggctgggataaaatataacataagttattcgagacattgctggctcgcattatggtattgaaattgttgaggtgagcgaaagggtccgaagtcccatcgtacggcgagacgtgagggtttttgaattcctagggaaattcagagttcataatgtctggatggaaaggctcgggtttttcattcgattcataaccaggtagtttcccatattccctatcttggtacctcctgaatttatcttccaactcattgattcgcaattggatgggatcctcttgttttctattagcattgagttattggcgtcaagcaagtacattctaatttaagctgtaatacccggaattaagaaatggattag

SEQ ID NO: 404787 - DNA, 1082 bp, Cannabis indica
cgggattgtatggaggcttgtgatatggtggacttaaaatattctggatctttctttacctggaataataaacaaaagcccgaggatagagttttttcgaagatagatagagccatgattaattcaaaatggagtgatgctttgcctgactcgaaagctgtgttccttcctgaattatcatttgatcacagccctatacttgtgtctatttatcgagagtggaactcgggtaagaagccttttcgatattacaacatgtggaaacttgctcctgactttaatgcacaagttagtcaaaattggcaaggaggcataattggaataaggatgttcaaaatggtagctaagctcaaacggttgaaaccggtgctcaagttgataaatcaagaaggtttctctgatattcaaaaggctgatatgattgcaaggaatgatctaatagcagcccaagctgaaatgaccaagaatccactctcacttcaattgatggcagccgagcaagaagccaataagaggtacaatgaagtgcacaaagctttttctatgttcatgtcacagaaagcaaagctaaattgggcttcctatggagatgagaactcggctttcttccatgcttctctgagatcaagaagaattcaaaacaagatcttctcgattgaagacgagcatggaacatggtttgattctccggatgatgtccaaaatgcttttctgagttattatgagaagcttttgggaactagtatgcagaatagaagaaaggtactgagatctgtagttaatctgggccccaagatcactgagttgcacaagactattcttctggcagagtacacgaaaaaagaagtaaaagaggctttgttttcaattcctggtatcaaggctccaggtccagatgggtatggtagttctttttatcaggaaaactgggacattgtgggttctgacttcacagaggctattctttcctttctcactactgggaaaattctgaaagaaatcaaccacaccactattactctcattcccaaaatagcttgtcccaaaaatgtggcggatttcagaccaatcgcatattgtaa

SEQ ID NO: 404788 - DNA, 733 bp, Cannabis indica
ttgaagagttttttgattatatataaataattgaagtaactttaattttttttttttttttgtatattagaaaatattaaatgtatatagtttgttcattagtagagaaatcttgaagtacttcatatgtatcaattattatagatatatgatcatttgatatgaaaataagatcatacaacaagaatataaaatatatatggccttggagagtactatcaatgtcgcaaataaaaatttatattatcattaatgtattatgttcatattacttaaaatttcaaacttaataattgtggatcgtatgtgcatgaggaggggacatattcatgttgtactatttttctcttagtttaagttttgtaccattgggttttcctgacaaactttttaacgagacaacttgcaaataattataaatatgaaatatatttattctatataaagtgtgtctatataactgaaattcttggtttatgagaaattcatgggtgactttttatttttatttaataaaacaataaaatattatttatatataataaaataataataaaacaaatcctattaatatttgaactgatatttagcatatttcaactctatatataatcacaactataactctagaaattaaaaatatatataaaataaattgaaccttaaaccgcatatacaattagtttgttgagagagatcagaaaaaaaacgaattatatatagaatttttttt

SEQ ID NO: 404789 - DNA, 1033 bp, Cannabis indica
actccattctgttgaggagtttttagagctgaaaatttatgacgtattcccattccattgcagaactcagagaatatggaattctcgaattctttcccatgatcactccttagcctaaatatttttccaactttggagtctttctcagtttgtagtctcagtattaaggccgaaaagaatccaaaggtctcaatttctctctaaggaactcaacccaggtaaaccgagaatagtcatccaccaagaccattacatatctttctccactgagactttcatttttcattggccccatcaagtccacatgcattaattccaacacacgtgaggttagaagtctgttgataggaggatgtgatgccttatgctgtttcccaagctgacatggtccacaaattctctccttggataccttcatgtcaggaattccccttactgcttgaagcttcaccagtctttgtaggtctctataattcaagtgcccagcctgtagtgccacaagtcaggtttatccaagaaagtctaactgcacacgatggtattgcatactgcatagcactgatctacatccatgtttcctgttaagacatcacaaccattagatgaaactaagcactgagttttagtaaaacttacagagaggttgttgtcacacaattgaccgatgctgatgagattggctttgagcccttttacatataggacatctgttaactgagccactccattcaggtttacatcacctttgccaaaaatttgccctttgttaccatcaccaaatgtcacggccccctccttttcctctttgtagttaactagcaattttttattcccagtcatgtggcaagaacatccactgtcaaaataccactgtcctttaacaaaggcagacagtgatagcttggccaccaatccaacatttgggcttgggttagactttgttgtccattctcgacgaggttgttgggttttatgccctacataaaactccatttcaatgtaatccattttattctacatcaataaagaaaca

SEQ ID NO: 404790 - DNA, 759 bp, Cannabis indica
ctatttataccgagcttaataaactcaggaaaataattaccttgcacatgagcagaaggtagcctttggcaaaccaaagcctatgaggaattcgaggagcaaaagagatcctaacaaatattataaatttcataaagatattgggcatacaaccgacgaatgtcgccaattgaaagatgagatagagagtctcatcgctcgaggccattttaaacagtatgtgaaaagacaaggctagggatacaaccagccccgtcagcctaataacccaaacaaccaggggttacaacctattcctgtggaaggagaggacatcttggttatttcggcagggccacatattgcaggggaaagcaataactctcaaaagagatatgtgaaggaaataaagaacgagcagtcggtccttgccccagaatcttccaagaaggtgaaaactgaagaaccccctattacatttatagagaaagatgagaagaacgtgagataccctcacgtcgacccgctggtcataaccattcaactcgccaataagaggatcaagagagtgttaatagataatgggagctcagtaaatgtcatttataaggagactctaaagaaaatggggctcaaaaggccaagttaaggctttgtatggtgaatctttgcgaattcaccggggatagcatcgctagcctcgacataatcgaactcacattaactttaggtgaggcacctttaactgctaatgttatgcaagacttcttggttgtcaac

SEQ ID NO: 404791 - DNA, 621 bp, Cannabis indica
tatacatctgcatgtataacttcaaattacccaagcagggtgaagggcagatcatccgagtaggcataaattttgttttctgaactacttatcaggacttgactacttcagaatgatctcgtgcagtcaaagcatgaagacaatccctacaatcatgggattgagtcaaaagaacatggaaacctgtcccaattttctatttcgcgtatcataattatgtaatgaatattctttcctattttatattgtaagcaaaaaaggaaaccttccctcatgcattgaggccctataaatagtgacttagcttcactgtgaaaaggatcgaaagaattgcttcagagagagatctaagagaattactcaaagaattcattataagagcttcgagagagaaaacactttgttctttgtctcaagtcaatacaatctaaggggagaaggctattaccacacttacgaggccgaacctctttaaaatctggtgttctttattacttacttgttttgctctattttaattatattttaatcgcttaatacttgactcactgtcgttggctaaaagcaaagtcaacaacatcaaagtagaaaatagagttgagcgataaatgttttgctcaa

SEQ ID NO: 404792 - DNA, 785 bp, Cannabis indica
aattcgtcaactcgcttgctttttatagctactacatttacaaatacaattaatcaatattaatcatctaattattaatggttatagataaaaaaaaaattacaatattatttcatgggttttttattagtgtacaacaataaaaaattattatattacaaaaaaagttacaaaaaaaattaaattataaaacctataacaaaaatatatatatatatatttacaaaaacataatattcagatcattttgtaaatatatatatatttacaaaaacataataattaaatataataataattacataacttactttaatttttttatatttgtttatttatttagtactcataatagtgtattaatataatataatatatatttatatataccaaacatatcactttgttgaaaatattaatattcaagaaggaaaaagtatattgtaatttaaataaataaataaaattatttaaaaatgttatattaacaaaaaaaaaatattgattattaatgtttaaattattagacaatttaggtctataatataagttttgatgtattttgtttattatagcaatacttataatgcttaaaagtgaagatttttatttaagttaaaagaaaacaatgtattatctttattataactatctattatattttttaaattaaagttaatatatataaatgttaattatttattataatatggttataaataaattacatttatttaaattacatacaaaattaaaataataaaaatatatttatttaaaattta

SEQ ID NO: 404793 - DNA, 899 bp, Cannabis indica
aatgccccccagtattgcagacaccttccctcttcagttacccgtgaaaccttggtcgcctccgtcataaatctgcttatgtatgctcagagaggctcgctgggtctttgcttgacttcgaccaggtttcctagatgcaacggaagttggcgagaggaggagaattgtgcatgaaattccgaggagaaagctttccatgagttgaactttgcaggggccagcttgaaataccattgctgggtagcttccgagagggtggtaggaaaatttttgcaccatacatctcctcataccccttgcgaatccatttgcatctcgaaatacttgaggtgggaaagagaatcttctcttccagtgtctatcttcctggttggcattttaaacttgtggggcaacgctaggagattgatctcaagagagaaaggggttccacgtgctcggcccaactcgagatcattgtttttctgtccggccatgccttggaacatattttttagttcgtcgagttgtgcttgcacaactagactaacctattcgggattttgaacgatttgagtcacgtcggtatctttctgagcgggaatttgagcagggtctgggctgcacgatcggcgtgccaagctgatcgtatactcctctccttctattcagatcatttctgaaatcatgagttgttcccaacctttcgaatacatataggcctgactgtcttagtgattgattggtttggttaacgtgctggccgacaccattaacctggttggaattatcagttacgacttctcccgatgaattactagacaaggtttgcccactactgcttggcccacagacggaacctgtgaccggagatttggcggctgaccatttatagtctgggaagtattcatcgcgggatc

SEQ ID NO: 404794 - DNA, 510 bp, Cannabis indica
atttttttagtttatgtgcattttaaaaatatagaggaaggcaaagtcagtcacttaaaatctataagttccataactatttggttctttcatgtgtgggatttgggtcgagttttctgcatttcaaagaaatttttggtggtcacttggttggaatttgcttacgtaactagctggacggggtgttatggactaaaggaagctttgacatgggacttacagtccatcaactctaacaaaaccataggtgacagatttgttcttgttggtcttgtcgtgggagagctattcaagtttccttggctctattttctggtattggggaaatcacaaactattgcaaagtaaaacttttgtgttttactaatgtcattctagagttggattttcgataaagggcaccaaatacaactccaacattctaactgtgtatcaaggacatcacaaaataccacattatgagcctggttctttgacagaggtcgcacacagcatggggctctcatgggt

SEQ ID NO: 404795 - DNA, 660 bp, Cannabis indica
taaaccttaccttaagctttcccactaggaagattttctatcctgctactaccggaggttagatcgctaggttttggattgaaaatcgaagaaaataaatttaagaggagagagaatttgttgacaaaggaggagggtttcgttttcgttcttctgttttaaaaacatataacattaatatatatataatcaaaacgtattgatatgttttataataaaaaaataatattatattaataatataataattaaacttaattattaataattatcttattatttcttagccactaagtaatttatactttgagggagctaagtcaaatcctactcactcctaattatcccaatacccatattatcaacttatcatgatattctcataaattctatcgattaaaccggttatgatatttttggcccatgatcgagtctccaaggtcgccaaaccataaaatatttttaggctcacacaggcatacagattgggatggatcctatcatgttactgggtcatacacaaatgaaagaagaatgtaaaatttacctgttacaaattatttacttgacctattgacaattgaaccatgggctaaaatcagatcattggatctgtcaacaagttaaccatggcaatttagatcaagcaataataggttt

SEQ ID NO: 404796 - DNA, 575 bp, Cannabis indica
gaaagttgttcttcctagtgttatttctgaaactcaaagcgccttcttacccggaagactgataactgataatatcttaatctctttcgaggtgatgcattatttgaaaaggaagcaaatggggagggagggtttatggcacttaagttggacatgagcaaggcttatgatcgggtggagtggggctttttacaggctatgttgaggagattgggatttgatgagcatgtggtgaagttgttaatgcagtgtgttagttctgtctcctacacaatcacatcggggggtcatgaaattgggcctataattcctacaagaggtcttcgacagggtgatcccctttcaccctatcttttccttctgtgtgcagaaggattctcggctttgataagagactgaacggttgggaaagattcgggggtgcaaggttgctcgaggggctcctgtgttatctcacatgttctttgctgatgactgttatgtgttctgtaagcctctgaggatagtgctattaacatgatagaaatgttaaatatctttcaaaaggcctcaggacaacaagtcaatctacagaa

SEQ ID NO: 404797 - DNA, 563 bp, Cannabis indica
aattctggaacttttgtaagtactgagtattaagtgttaagtaaattgtcacgtggcatttcctgattggtccaagtcattaaatttgttattattttaaaaaaattaatttaaatataccaacgagaaatgacacgaggataatgatttaatatttaacggtcaaatacctaagggtgaagccacatgtgccccacaagggttgtgccccccccaccccccccccccaccaaatttgaaaatttatgtaaagcccctatatataattatattatataccagatataatatcatatatattagtgaaatttaatttttttagaaaaaaaattacaaatataaattgagctcctaatacaagatgtgtctgaatatgagagaataattatttatgaatttctaatattttttttttataaaataacttgtaattatagaaaaaaaaatttagtatttcatatttaaaataaaaggttttaaaaattacaccgtataataacactcaattctcataggggtatgagaattagatagtatagttggaaacctctccattacccttc

SEQ ID NO: 404798 - DNA, 843 bp, Cannabis indica
cccttttagcttttcatacttagattcatatgctgagcttttccttcatgcaggccggtttgaagttggattatgcctactcccgggctaaatctgctacttccaacagtacggctctgtccgacaccttgagggcggaggcagacttggccaagaagaaagttgaggaggccagggttgaggctgcagctgttcgccatgagttgggtgaggccaacaagaagctttttgccgccgagaagaaggtcaccgtgttgacaaaggacctcgaggctgctgatcgctttgaggaaaccattgagaactcgtctgctgaagtcgaccgtcttcaggatgagaggacttctctttggcaggtcctttatcggctgaaggaagataaggacgctcaggcagctcaggcagaccccttgaaggagaaggttgatgctttggagactgccggcctcgagcttttcttggatttttggaaggctaatccccagaccaatttctactacttaggtgacgccaaggacatgtacctcgagtactgcgcgacccaagttgcctatagtgggaaagaggtggttgcttcaacttccggccaagctttcgaccaggctgcaaatgcttctcctgctcgaacaacatatcctcctgctccagtcggctcagaagaaccaaatccagagcctgggactccagctctttcaacattgatcttttcatctctcctatttatatatatatatattaaatatggccgtaaggcctttaagacatcatgaccggccaagcggtccttaaacatggaattaattttcattttttggacaacgagctgactgggcagcttttaat

SEQ ID NO: 404799 - DNA, 725 bp, Cannabis indica
ttctttgaaaatatattttaagttgaaaattagttaattttagatcaacttaaattgagatatttttcaaattaagatgattaattcaagatacttaatttgctatttaattaaatttttaaaaattatttgagttaaaaatttagttattttagaacaatttaaattagatatttttaagtatttgttttattatattttaattaattttgaaattatatataatattttatatatagatttttgatatgcaattgaattaaagctgaaaaattaattttttaattaattttagaccaacttaaattaagtaattttcattattaaaatatatagattaaaataaatggttaaataataatatggttttttttaaataatgaccttaaaaaaaaaacattggattttcattgctggtcctacatggttaattgtttcaatgtgacctcgagatgctagacttcgttccccttatgggaggttatccattgaagcatttacaccgtaagatcttgaatgataagtattttgtatgttttcttttctattagactctcccctatagtgactacttagaaataaatttacaaatatgaaacaatagtagcagctcataaaataagaataaccttcactctcgcctaccaaaacaacgttggatttttatttggatcatataaaagattgctaaaatggtatctattttagatgagctgacaacacta

SEQ ID NO: 404800 - DNA, 543 bp, Cannabis indica
ggttaattaaaagaaaatctctactttttggtctatgatccatccatatatgaggactatcttttgtaggtgcatggatttgcaatccatagccatttctttcccttggtccccttcttaccaaacaaaaataaactacaaatgtatagccttttccacattccgtattcaatctatcttttaatccatcatatcaaacaagttgtaactatcaacattgtccgttataggcaattctagttattatactcagaaacggggtgaaattccgttaatgcttgagtgtgataggaagctcgaataacccatctctttgtaataagagaaaataccccagataatttaggatattaaaatcaaaccaacttgtggttagctcctattaatacagcttagaagttataagtcatcactcatcagaatggggacataaatattaatttatattacccaaaagaaaggcttgtgagtgattctcttctttgtaagtgtattcattgtgggattagttcctccaaatccaactaattcagttagttggct

SEQ ID NO: 404801 - DNA, 683 bp, Cannabis indica
ttaaggataaaatacgttgagggttaaaatgttaaatttggccctacttggtataaatcatatatagaggatctttaattattgggattagaacgatggtcaaaattttcttagcgtatctatatcgtggaacatatagagtgttctatataattaagtgcttgaattggaaaatatggtattggtagaagaataggataaatagttgtaaaataggaaaatttcaagtgtgggcccacatcctatggtcggaaacatgtgcttaattttaccatttatttatcaatttttaatgccaaataattcaaacctaaacctacttggattcctacaaatagagagggatggactcaaaattgacatcctatgttacactagccttcactaaaatttgagtcttctgtctctctacaattttgaatccttctctctctctctctctctctctctttctctacaatatttcgaacccttatagtgatagagtacatgcccacatatagcaagttggtactcaatcatagtgtgtaagactatgaagaatccaatcaactgaaggaaatcgggctcagatcttggtgatactctactacagaaaggatacaagggttagtgatctaaggggaaggaatcatttaatttcactgcaaccaatgtaaggtttcttgaactttatatgtttt

SEQ ID NO: 404802 - DNA, 289 bp, Cannabis indica
atatatattttttttggcttcgacctctctcagtaaaatatgcataacttttgcatacgaactctaaatgagctgattcttctattccaaaaagtaataataaagaataaaattaactctaaaaatgacctgaacaataagctaaaaatagcctaacagacacatgttccaatcctgacactagtgtttcagactcgaaccacgaccccaaacccgaacatagacccgccttaagtaaaattaacaaaataaaaatgaaaatgaaattattgaacacatttttattttt

SEQ ID NO: 404803 - DNA, 750 bp, Cannabis indica
tttttttttttattattcatttttatactggctgcacaagccaatttattggaagttcttagcaattttaattagggaaattctaaaatacatccctctaaaactagtgcagtgatgcactcttatttgttccgatattcaagagatttttttagtttaatttttttaatgatcgtgtacattacaattatttaagatatcttgtaaaattttaagaaaatcagaaaaatataacacaccgaaaataaggttataaaaatattgatagcaattttaattaaagaaattctaaaatgcatccctctaaaactggtacactgatgcactcttatctgtttcgatattcaattttaatcaagaaaattctaaaatgcatctctttaaacctaggtgcactgatgcactcttatctgtttcgatattcgagagatttttttagtttaattttttttcatgaccgtgtacattacatttatttaatacatcttgtaaaattttaagaaattcaggaaaatataacacgccgaaagtaaggttatgaaaaaatttatagcaattttaattagggaaattctaaaatgcatccctctaaaatcagtgcactgatgcactcttatctgttctgatattcgagagattttggtaagttaaattttttcatggtcgtgtacattacagttatttaagacattttgtaaaattttaagaaatttaaaaaaatataaaacgccgaaaataaggttataaaaa

SEQ ID NO: 404804 - DNA, 524 bp, Cannabis indica
ccaatatatattgtatttctttgtttttgttagtttgtggctagtaaatggtaattagtaatgagttaatttagtaattaagtcaacttactttcatggttgactctttaatttggtagttagattaagctttttttattttatttattggtcctcaagtctttatatataagtgaaattttaacagtcacttattagagtaagatcttgaagagactgccttagttagttacatatctttgggttaaatatccagaaattacattgaattattaaccaagaagctttaaaatcctttttactctactagtacatgagcaataaaatgataatacatgaaataaagagctttaaatgtaaaaatagaacatcataattaatttatagagcttcaattgagtgctaataaattatagaataatgcttaagtagagttacaaaaaacgtcggtatatacaaataatttttttttttcattatgtgtcaaaattattattttatattaataattaattaattctttt

SEQ ID NO: 404805 - DNA, 1392 bp, Cannabis indica
ggacacaaattttgacaaatgatccggatcatgattgaggacttggactagaaactaggcaccggaactgggatgaagacccaaaactcgaccccaaacttgagagacagaacccaaccctaaacccagaaacaaggacttgaccatcgggacacaaccccgaactcgaacgcaatcctaaacttaggacccgtcccaagacccaggacccgaactagaacaagaccaagactaagacccgaactaagactcggacaaaaaccagtcccaaacccaaacttggacctgaatccgtaccgtctgaccaaaaatttgaaccgaaactggaagtagacagggacccgagaatgggactagaaccgtaaccagaacttggacttagacctagaaccgtaaccggacttaaacctagacccagaactgtaaccggaccaggtgccagactccaactaagagccagacccaaatcgggacccaaacctagatcccaactcatacctagactcagtgctgaacctagaccaaaactcagacctaaacatggaaccagactcgggacacaaaattgtggccgggacctagaaccgcaccccattctcggtccgaacccaaactgggacttgggacccaggacctgaaccggaactagactgggacaggtgactgggactagatcagggactcaaaccaggacccgaacccgaacctggaccaggacccaaatgcggaccgtgacccaaaatcaagaggtggaactagaacctgaacaagaactgcaaaaccaggacccttgacaagagtaggactgtgaccaggacccggacccaaaccaagaaccgaacttggacctagccccaaacccaaagcgagaccaaaactcgagcccaaaaacaatcctgtacccagactgggagcgagagccggaccttgacctagacctgggacccgatctaagacctagactttgacatagatagggatccggatacgaacctaaactcacacccagacccagacgcaggttggcatcgaaactcgggacctagatccatactgagatcgtgacccagacccagacctggacccgcacctaagaccaaaactttgacctggacccgaacctagacccagacctaaacccaaactcggacctagactcaaaccaagactcagaccccaaccaggcccggacccaaactcgaactcagacactgaatcgaaatcaaaactgggacaaggacgcaaacccaaacatggaccaagatcaggacttaggacccggaccatgacctgcgcctcggaacccagacccagatccgaacacaggactcagactcaaacttggaccaggactcaaacccagatcctaacctaggccgagattggaaaccg

SEQ ID NO: 404806 - DNA, 881 bp, Cannabis indica
tatagttaagctttactaatctggatatgactttagataagtgaaagaataaaatagatttattcatattcaaaaatagaaaaaattcaagagaataacttctctttttctctagtctctttctctctctcgagctccatggaagccaactagggcttgtgattcttcagcctaattctagaagtttagcaaatttcttctgaattaatccaagttaaatatcctaacaccttttctttgtaatttcttaggtttcaagcaagatttacgcatgattttggggttaaggttgttgttgttgtgctttgttttcactgaagtgttctgaagttggaattatgtttattgaactaatttgaggctagttagttgcttaatttggttgttagacaatgtttgagcttgtttagttgttttgttgcttggtatatgtttattatggtatatatagcaaatatggaaagtttggtagagtttggggttgaattgagtgagtagtgtaattttgaagttttcctacgctgaaccggtcgactgggtgattgctatgttattatttatgcttttcttactgggtctgtagactcacatttattgtttgcaagtgtaggtaagggcaaggctaaggttgggcagctgtgaaagcaagcagatggagactgtacatgtcggggtagttaggcctggagcgtacggtctttgggacattagagcatattttgtatagtcgctaggcgacaaaattttgtatatgcacagtaaaaattttgtaaacggaatcctgatttaatataactatattattttagtgttcataattaattaagtaaaattttaattgatcacgatttttaataaactcgttgattagcaacaagttg

SEQ ID NO: 404807 - DNA, 713 bp, Cannabis indica
agctcctcatccatgaaaggaaaggctctctctatgtgtctatgtgctgcctttacaaccctttgccctacaactaagcctgctccttgatcgggcctccaagcaccctatcccgtaggttgtataacaggctgcccagttggtgaaggccctgatggaagaggacacaaagatgacccagtaacatctccgccacgacaagtctaggccaccttggacctcactcttcccgtgggctcatctgaaagtcccctagtgagaactctcagcctggaagacatatctacaaaaagaaagtagcaaaggcacagagcaatcataaacattcaatgcaagacaagaatatggtgttattgaccgagattttcggcaactaaccaaataatataatgagaagagctgtagaaagtttaatgcaggagatttttacgtggttggggcattaatgagccttagtccacgagattttggtatttatgagagtgtttattatagagaatgttcttggtagatttgtctcctcttttctctcttagattccttaactaaaatcgatcgaccccttttcagtctgtttgtgaggtatttatagtgttttcctggggggatccctatgaagggatatcttgtctttttgtgttagcttcttaggggcacatattcctagtagatacaaaataggaaaaacatgacctataccgtaggtatcttag

SEQ ID NO: 404808 - DNA, 611 bp, Cannabis indica
gtgtccatttggcaagcaacaagctcatgtgtcagtgtaataaatcggacaaccttggtaacctattgtgtttaagcttgataattactctaagcttaaaaatgctacagccacataacactacttcaaattaagaattctttcttaagaccatcgtaggcttgaacaccattctcatacaattctgttaaatcgtcaattaatagttctaaatatatcgatattatgtccaagttgttgtgggcctgatataattaaagaaagcatattgaatttccttttcatcaataaccatggaggaagattgtacataacaagaaagataaaccacgaactacgagactacttagagatatatatgaatttactccatccgcaaatagactgagatgaagatgtcttgttttagatttgaattctagatttatgtagtttactttttttttcaagcttgtgaatctacaggatgtttgagttatccattttaactctctctgtctcgtgtcaaatcaaaatttcagaatgttttgcactatgatataatcgtttaagtcgcataatcaaaggcatgtaccacaccaccttttgggggataagtttcctattctcct

SEQ ID NO: 404809 - DNA, 828 bp, Cannabis indica
cttctcaaaattacccaaacttgctggtgaaaattctaaaataaaatatagtatatctttgaattctaattgacttacaaaatcaattagttgagtctacaagatgatattatctcagacaatgtggggaccatgagcctatgtaacgaagctcctaataagtagatcttgagatttaccaagtaaattttctaatttattaattcctccaaactccactatagattcggaattacactccttattacatagacgctctatataccaaatatagatacacggtaaattatctattatttcaatctaaataatcaatgatcttctatagatggtctacattgaatatggactaaattactattttacccttcaatgtattttatctttaaaacacttagctccttgtaaatgataattgccgaaatgaggccttagacattcaaactcgtttagccaaggtctaagaaaactatcattttacttctatgtacttatagaagttatagattctatatctatgactagcgctcctattcaattgcactaccatgttcccaagatgtaagtatttgagctaaactaacgggacagcttttaacgaataaatcaaagaacacgtgaaacacaattgagctataacctaatcatctcaggattaagatcgttgatctaagatcaacttttagatatttacctagaaaagatattacggtaagtttaagatatctttttcgctgtgaatatcggtcctgtctgatgtatagccaatacatccaatgctagtttactttactaatgtcatgaaaaagacattccacttatccaagt

SEQ ID NO: 404810 - DNA, 649 bp, Cannabis indica
attgggatgggtagaaagtatggagatctttattacctgaattacaatccacctaaaaatgttcattctttttctgctactgcttgtatttcagattcaaaagtttgcaatgaaacagtttggcactatagattgggccatccttcttgtgaaaaactcatcctttgaataaagttttgcaatttcattcaaattctcaatcattatttcattgttcagtttgtcattatgccaaacaaaagaaattgcctttcatctcacatcacaacatagctgaaaatattttcgatcttgttcatgttgatatttggggaccttttaacaccatgacaaatgaagggcatagattttttatcaccattgttgatgattgttcaagatatacttggattaaactcattaaacaaaaatctgatgcccaaattgccattccccaattaataaaattgattcaaaatcagtttcataaaaccataaaaggaatgagatccgataatgccaaggagctgcaacttaatgatttatttgctgaacttggaatcatacattatcattcttgtgtccaaaggcctcaacaaaattccgttgttgagagaaaacaccaacatttgcttaatgtggctcgagctcttttgtttcaatcttatgt

SEQ ID NO: 404811 - DNA, 660 bp, Cannabis indica
gtatggttcgtgaaaccttcttggtgtgttcttgaatttttgaagaaaaataagtgcatgcttggtgatttaatgttgatagctgctgttggttgttgttgttgttttctatagtttaaaaatgtttaattgaatgaaatagaatagattttgatgcatgattagttgattttaagcaagtgtagaattttaactcaaactatggtttttatggtaaattgatgaaatagcttgttgtgcttgttgcatttgattgttgttgttttcagaggctatattatgcttgtttgagtagattaaatcaggttttgttgcatgttagggtgatttaaccaagcttgagttttgaactcaaagcttgaagctttaatggtggtttttgattttgtgcatgaagcttggttttcttgctttggttatgttccttagggtctaaatagcaggtctggaagttttggtatgaattggggttgaattgcatgagtagtgaatttttgaaaatttcctgcactgaaccggaattccggttcagggaagccattagcaaccggtcgaccggttggggcttccaggaattttccagaaccggaattccggttgtagaaccggtctaccggtcgggacatttttgggaaccctagttcttcccatttttgtgtt

SEQ ID NO: 404812 - DNA, 836 bp, Cannabis indica
gatgagattagaatcaagtcgaattccttcatttgaacagaaaaaggaaacacgcatcttcaaaatataaactataacctaggtggcatattggttcactttttataattaacgtgagttttcaattagcatattttaaaaaagtgacccatgaatttctcataaatcattttatttttaataataaactattttatttttaatataaataaaaaatcacccataaatttctcataaaccaagaattatgttatataggcacactttatatagaatagatatatatacacgatttaaaattaggaactaattatattttagtatttttattatttaataatgctaaattttgaaaaaagattagtagatatttattagtatataatttttttgacgttagattagtatattaatttatttattaatatttatcaatctaataaaaaattaaaaatatgagaaaattaaggagagaataattaaagcacctaataaaaaattagaataataagagaattgaggagagagcaaatagatgtatttagaatgattttagagcgccatgtgttggaaattattttaccaggatcttaaatctactcacaagtacgttgattaacaccctaaatatgaactttctaaaacgatgaaataaacacatataaagtttagtaaaccttacattgggtgtagcggaataatatgactctttccgttcatatctctaacccttgtatcctttctgtcgcagagtattataaagatctgaacctagatctttttctctccttctttaatgctgaaactctttgttgaaagtctttcttcacaatctt

SEQ ID NO: 404813 - DNA, 1167 bp, Cannabis indica
atacctttaagagtttaaaggtaagtgtcaccacctttttccattttcttctaataaataaaattgtatattaattttattttgtcaaaaacaactatacattattataaattgactcggaaaatatataatataattaacacacactcccaactaagtactaaccatgcagattggtatttttttctttaaaatgaaattggaagcattattaaataataacgaagaataaataacacgaattggtatatgtaagtcgtgtatatatataaatcactacaaacaaaaatttacaattctttagtcacaacaaaaaattatttatattaaaatatagtatttagatatattatcaataatttagttttagttacaataaatattatgacgactaacatactttaagtcacaacaaattataattaatttttgtaactaatatttttagccacgaaactttaagtcataatgtaagaataataatttttattataattagtcgcacaactttttatttttagtcacaaattttaattttattaaaagtataatttttttaatatttatatcatcaatattagatggaccaatcaaaatttaccacgtgtacatttctgtacaccatatggcagtccatttagtacttaacaaaccaaatggacagaagtacaaagcaaaattattgaccgcaaatttttcaatttaagaagtcgtgccaaacttcaaaattcaaaaaattttgaccgcaaattaccttatactgtgaattcactagttcaaatagaataagccccattccacgtgccaaacatatgtcgaccgcatatatcccaattgataatattattaatttacattttgtttataaataaataagaccaaacatagctaattaaattactacgtgtttaatggggttttttattactatgtgtttataaaggggttttttataaaggggtttttttaaattactacatgcttcaaaaaaaaattactacgtgtttataaaggggttttttatttttacatttcaaaataatttttttttttacatttttatgaaattgtatattaaaactattattgcaactagcgctgcaactactttagaaacccaaatcgtaaatttgaaaaaaagttaaaaaaaaatagtatatggaataa

SEQ ID NO: 404814 - DNA, 1054 bp, Cannabis indica
actcatggacgcagagcttgcaagaagttactgcagttatcccagtgcccgttggatacaagtaaaggtcggttgtctgtgatataaagaagaagcatctaaaggttggactcaaatggtcagccaccaatcattgatggggagctctttcgacctgtctaagcctgatgattgttactggagcatagaggatcgaaagttcgatttctattctattgccaagcatgatcaaatggagttggtggaaatgtttaatgaaaggtgactcctagtaaattgaccaaccccgaaaggtgaacctgaatcaagctagttatctaacctggactcgggactcgataaacagttgaaaagatgatgtttgatcagagacagaagtctatgggactcccaagcagtgaagaaatgcagaaagagaaccttttgaagatattcatggctgagcacccggaaacaaaagtctatgggactcccaagtgttacgtgcagtctatgatggcacgttacaagctaagtgatgcccacaagttggccaagtggtggcgcatgttgtggtgcatgcaggtggcatgctgatgcttagtttgtatgcagtggcattttcgtaaatatcttcaatattgtccggatcgggacgggacttggtattcgccatttatttgggtctacaaatagaatggtgcaatcggtttggcgaaactaggtgatttggtatatggtgcttcccatatgtctacagagcaaaaatcatctatgttcctggtagaaggctaaaagctcagaatgctctttaagggggtactctggtgtcagctctccaccaccccttgcaccttggtgctaagtgagctactactagccagtggggactagtagggcgggcatatgaggaccacgaggggactcatatgtctccatgagttggagtactcatggacattatcgggccgacccggtagtgcgtcgaagaatgccgccagaggttcaatggtacgtttcccttggcttgccggtatgccgcttgcacgagacgtggcctagatcctccaagaga

SEQ ID NO: 404815 - DNA, 519 bp, Cannabis indica
ggtcacaaagaacacgaagaatgtgttcaagttcttgaaaaaacacatgtttggatcctgtacacctcctagccggcaaggaggtcttgttcaaggccttgctgaccatgggtggtcactatggggtttggctggccaagggggatctcctaccaattaccgacatatgcttggaagtggaatttctttccgaccctagactaggtcatgggacatggccggcgctctagggcttgggaaccctagccggacaagggcaaggctccaagcgggcggtcaatttttttcttctattaacctcgactagggtctcgtgatggccttagatgcatatacaattgtagccttatctgtggttctccttgggaacgctgcataggagtcaatagtgagtccattatagtcgcctgcacaacttaggactcactatttgtctaagtagatgtacttgggatcgtactttgttggaaatattttaccaggatctagatttactaccaagtatgtttcattaacatc

SEQ ID NO: 404816 - DNA, 622 bp, Cannabis indica
aagggtctccttttttgcctcttagaatccccatggctccaagcgaattgatcctggttttcctttaagaaacttattagctactattttagctgctctcccaggttcttcccaatgtaaacacactttgtgagatttcctgggtcgagaataatgtcttctaattcttcaattagttttaacaagtttctttcatcttgaacccgggggtcaagatcctcctccttcttttcactttcttctgccaagatcaccattaactgatgatcaactttcctatgctgcaactctatgcgatagcaattgcgagccagtatttggtcatccttcaccactcccacaccctctggtgtttggaacttcaagagtaagtgcttgattaaactaatttcccctagtccgatcaatgctggacgacccaacaatatgttgtcagctgatggcaggtcgacaactaggaagtcttacataatagtggaaaataggggtgcctcgcccaaggttaatgcgagctcgattatgcccagactggaaatgttgtttccagtgaagccgcaaagatttaccatacaaggcctcaatttggtttttcgagcgttatcttcctcagtgtttccttata

SEQ ID NO: 404817 - DNA, 644 bp, Cannabis indica
cttaagtccatactttatctgcataattacactataaatatgtgttagcttaatagaaccattcaaatacaaactctcactaaaccaacacaatcttaaataataccatatccatatatgagtaataagctcctaaaaagccttaagtggtatattcttaatgatctggatcacacaaaatatggagtttgttcttagtatgttctatagacaccttattactctgaacttcattttaacaataattagctcaaagtcaatgtgccttttgaccttatagagttcatgttgttactaaatgcaacctgattaatttattgtcacaacatatatctttaatagcttttaataccattcctaattttacagccatgtgtgacaaaaaaaaagaaaaatctcacaactaaaaactttataagatcagaatcagaaatcttaatgatctccaaaatattcagttttctgatttatgataaagtgaacatataatattttgttctccttaaattccttatagcttatttggctgcataccgaaagttctttatatggttacttaaatatctatccaacattcttaatatgtatattaagtacaaatacatacatgcttgagcatatattagattccaatataaattaag

SEQ ID NO: 404818 - DNA, 696 bp, Cannabis indica
ttaattaagcataagtttttcactaattaatactcattaggcaacattaagaaacataaagatataaaagaatattcattgctaagaagttcattttgaactaagaatcaataacaaatgagatttacattctcacttgtctttataaaagattctattatagtaacattgatatttgttgctcgtttcaattcattaataaattcctaacagtgaactagaggagaaggtatacagactactataaagattttcctctaatagtggtgaacatatacaagcttaaatagtctacatatatatagattaaaataaatttctcacagttggtattttatcttgtcatctttttctttagttttgaaaagagttatggattaattatataccagaaggtcagtaagagtaatatttattttatatatagacaatatatatgttacttgtagataaaagttttctatataaggtgaagtaattcatatcttaaattattattttgagataaataatataaataacatatgtaattttaattaattagagagtagccgcaacatctctgattatataaaattatgtattattcatcttatgttacttatatctttaagtgtaataaattaaactcaaatcatcatttgtaaaataatctagaatgagaataaattaagaacattcatttgcttctatttt

SEQ ID NO: 404819 - DNA, 435 bp, Cannabis indica
cgtgaccttgatgaaataccaaaatccatctaggtaaaatataaaaattatgaaaatttacacaagcacttaaaattgtatttttttttaaatttttttttaaaagtaatttgcggtataaatacttaagtttaaatcttagttacaaataaatatttaagttttaatttttagcggtaataatatgtaagttatatttttgaaattgtaggtacctaatcgttaagtattaagtcatcattcacgtgtcattttcttattggtatatttaaacacataagtttcaaagtaacaaaaaactatataaaacaattggtaaataaaaatagtagtttattgtattataagacaacttattaattacaaaaataaactttaaagttacccaaatatattttaaataataagataacataatattgttgggttttatgc

SEQ ID NO: 404820 - DNA, 565 bp, Cannabis indica
tggcataggtctggtgtggggctacaattttctgcaacaactacttttgccgactggttcaaggattttttggcaggggctagagtggctttgttggacgaagttttgatggtaggctggggcattggaaagctcgaaatgagctactttggaaggatcgttcttcccaggctgttgatgtggttaggctagctcggtctgctcattttagctggttgttggctcaagaaaacaggttcgaacctctgctgcatgagtctactcttactggcagcagtgtatgttgggtaaaacctcctgctggtgtgctgaaaataaatactgatggagcaatttttgaagctactaatcaatatggtactggcatcatcattagagattgtcatgggaagcttatcgaagcttgttcttctctacattttagggtctgtcagccggtggttgctgagatgttgagtgtcaaggaggcccttagttggttgaagacgaagaacctatccaatgtgctaatcgagacagattgtattgcagttgttcaagctattaatagctcggttgcacttcc

SEQ ID NO: 404821 - DNA, 441 bp, Cannabis indica
gttttttttttttttaatgaattcagagctatatacatttatagctaatcttatagatatgctgtagttgaaatgatgcaagctatgggcctaagcctaattaaggcctatggctagtttttgggtccggcccatgtggtcctgaaagtcaattctaggaccacctttaaatttattatgttggtccagatcctaagccttattaaaagcccagtacaggtaccttgtgtcagtggatctgatcaatgggctcttgcttgtgtagtttttcttaggaattatttcacaaatatacaaaaacaacaaaaaataaattacaaaaatacaattgtacggtttaaatattttacgggttttaagattttatttacagaaaatacagacttttgatgtattttaatgttgtactcttgttaactttttattaattttttgttattt

SEQ ID NO: 404822 - DNA, 1702 bp, Cannabis indica
ccacttagtgaagtaatcaacaataaccattgcatcctacacttcaccttttcccttgggtaattgtccgatcagatcaatccccaaatggcgaaaggccaaggactttgcatctgacttaactcgttgggcggagctcgaggtatctttgaaaatcactgcatttgtcacactttttaacataggcctttgaatcctcgatcattgtcggccaaataaccttgctttagaaatttattagataaactctgcctggcggcgtgatttccacaaaatccatcgtgtaattcagacaaaagtcgtgcagcttcttcttgggtaacacatctgagcaatggcatggagaaccctcgtttgcacataattccctctactatgatgtaccgtgcaaccttccttctcatctttcgagcttcatttcgattatctgggagttccccagtgttgaggtgggtcgctattggcgtcatctagttttgggaagtatcaatcgttttgatctcctccatgccagtgatgctaggttcttcgaggaactggataggaaccaagttcattttatcactcacattactactcgcaagctgagctaacgcgtcagcagtcgtgttttcttctcttggaatttttctgagactgtagcttttgaactgtgtgagcaggtcgtgtattttgctcaaatatgctatcatcttttctccttgagccacgtattctctagatacatgatttaccaccagttgtgaatcactacagatttcaatatgctcggctttcatctctcgggctagctttagaccgatgatcaatgcttcatattcagcctcattattggatgctttaaatccaaacttgactgcagcgtataggtgttgccccccaggtgtgacaagggtgattcctgcaccagatagttgatctgtagctgacccctccacatgtagtctccaggtcagcttgtcttcaatgttacttggctgaggtatttgtactggctcggggttgcctttcgatatgctttcttccttgcctgtgcattctaccaaaaagtctgctaagggctggactttgattgttgttcggggtgggaaagtaattttatactgacccagttctaccgcccacttgagtaaccgtctagaggcatccaacttttgcaatatttggcgtaacggttggtcagtgtacacccgaacaagatgatcttgaaaatagggcgttaactttcttgttgctagaatcaggcagtaagtgagtttctctatcaatggatatcagccttcgacctcaatgagtttttactaatgtaatagatcgggcgttgtatgttgttttcctctctgattaccacgacacttacaacatgctccgtgaccgctaattatatcccaagttcttctccgtccagaggtttcaagagtacaggaacttctacgagttgcatttttagctcctgaaaagctttttcaaattcctctgtccactcaaattgcttgtttcctcgcaggatgttgaaggatggaacacacttctctgttcatttttaaacaaatctgcttagtgcggcgatctaacaagtcaaactttgacttccttagttcttgttggcgatttcatatccgggagggcttgaatcttctctggattgacttcaattcctcgggcgttcttaataaagcccagaaactgttgggttttatgc

SEQ ID NO: 404823 - DNA, 504 bp, Cannabis indica
atatacaaaataaagaattaactcattattttttagtatattttattaatattttgtattcaattttatttggtaaaaaatattttaatttaattttctattttaaattactattaaattttttatacttgatagcgctttatattaaacatctttttataaaaaatattatttttttaattaaattatatataatattatttattgtaacattgaaaagtaaaatacataacttatataaaactaaatatttgtgtcttacgcaaaacattaatcaagtaatatatagttgtattgaatctacaacattagctgtatacaattttagacaaataatatataattaaaataattattaaaagttaccattagtgcttaataataagaataattagcttttttagtccctgtacttatgacattatactatgatgccccttaatttataagtgtagttaaaaatacccctaaaatatatcaattggaatagtataatccttctat

SEQ ID NO: 404824 - DNA, 647 bp, Cannabis indica
tttatatatatatatatatatatgtgtgtttttattatatataatctatatattatttaatttatatacatatttatagaaaaatagaaagttcaaactactatatttttctttattacggatgatttgaactttgaattcaatttttatatttatctcattatcacaataattaaatataacaattgaatgtgaaaaaataaataaacattagtgcttcggtttggacacgttatacccaaccaaactgactgggcgggttgaaactttttttttcttaattgggcgggttgcacttagatttttgtaacccgatctttacattagttaaaataaaatgtaacgtaaaccgaccaaaccgaccgacgtacacccctagtcaaaagaaaaatcgtagccacatcaacatttttagaatctaaaaaaaaaaattagagttaatgtagttttgtcaataatgtcctttataaaattctatattttttgaaattatatgatcagtgacatttaaccacataaattgattttttagtggtaaaagtaaaacctttcaaatctcacttttgttagttatttacttcttttgttcaaaaggcaatgttaagtgtcacagtggacatgtcacagtgtacataagtgtacacgtg

SEQ ID NO: 404825 - DNA, 1021 bp, Cannabis indica
atcgacatattatacattccctttttgttgcagcaaattataacacacacattcatattataaaacagatatatttgtatataaatatatatatatatatatatgtaaccttgagcaatagtatgttacaaattgaatagaatagaacttttgctagaacaagtggtttgtttctgataatattgtcgaataattttgagctatatataaatatataataataaataaccatatgacacaaaactctaaaaagaacattagcaatgtgtaaactaaaagcaaattattataggaagatcaagttgaatagttgaatgaatgaatactagtcagtgtcttgaagatgagaatattatgtttcgattcatatacatcattatgttattatataagttacatcaacatacgtgaaataatgagaactgatcagacgactgttctttagtttaagttgtattcttcaagcttttgattttcataatttatgacatagcaatatgcatgattcattttcgtgttattaatatgaaggtcaacattgcattttggcataagaatcatataattggaaccagaatcgattaagaatcacaataagctttggatttgtaaaggaatagttgtgagatgctgttgcaagttggggcaattagtggctgaattgagaacattagatcaaccccacaaattgctatgttttgctacctctctagagttttaaaatatggactattggtaaattaaaagttagtttacattaatgtggttaagaaaagacaaaatatcatgtttaaaataaaagatttaacatatataagatatgtcacctgtattaccataagtagaaattacataggaaaattttagaatattttgttatgtcataaataaataaagttaagaggttatgggttttttattagatgtctcaaatataaacaaaaatagaaccggttataattgaaatataaccggttctgtaacacaaagaataaaaataagggaaattatcccatatact

SEQ ID NO: 404826 - DNA, 1010 bp, Cannabis indica
ttttataatatgcagtgcgatttaaactgtacattaacaattcaaaaccgcaaaccgcaacgcaccgcgtaatttaggaaaaattcaaattgcgaccgaactgcaaagaattttaaaccacattttttttgcggtgcagtacggacagtttgagcagtttgatgaacaaccctaaatattatcatgtaatagactttgtttcatttgccaattaataatttaaaggaaacttacaaaaatactgatttttcccatatctttacaaaaatactgccacatggcagaaatttcttttttactgtcttggccaatttttttttcttttatactgtaaacacacacaaaaaaaaggtctccatcttccacacccacggacagaaccactacatgaacactagaacaatcgaaaaacattgcgagattgagaaaaaaataatgaaatcgacgtcaaataaagaatcatgacaaaacaactgtgaaacaatactaaaacaaatcaaacaaaagatagaataacatgattaaaaaaagtaaaaaatattcttcaatacccaatgtaatagtagttatatttgtaagcctcaatcttaaaaaattagaacaaaaaaacttctaaaacaacacaaaacagatttataccaatagacaaatataaccacttagaaaaacaataagcagatatatatatatatattttattctcacttagaaaaacataaaagaatcacataccttaaaaaaataaattatggaaaagaaccgtaaaataacactaaaacaaataaaaaaaataaaaaataaatgtaagtagtataaaacttataaaaatacacagtaaaaatgtaaattttgccgtgtggtagtatttttgtaaaaaaaaaatagcaaaagtgagtatactatgtaaatttccccattatttatcaatatttccattttcatttttaaaaaataaaaaagaataattacattagacacaattttttgttaaaaagtattatatttttacg

SEQ ID NO: 404827 - DNA, 540 bp, Cannabis indica
cattaacttttattaattttattgaaatttagattgattggataattctttactatgttagtcatattattggtgatcaatagttaatacgcttaacgaaaggtgaacccacatgtaggcaaggcgggacagtctccttcttgaaaaaaaaatgaaaatatatatatatgcaatttaattagttacgatatatatttgtaataaaaagtaatgtttataaacataatattagttttagtgtaatggttaaactatattacatataggatagatatcaatggtttaatttccataaagagtgttgttttttccttttttaagtttacttttgcccactgccttacaaaaaataaattacgcccctttcactttaaattttgggtccgccattgggcttagcatctgtgtataaagtctaagtgaagcagaagtatggacttttctagttaactaaaacctttgatgagcaggctcagtccaactagagttatgtagctaagtcccctccctaattctataaatacatattgtctcatcaca

SEQ ID NO: 404828 - DNA, 547 bp, Cannabis indica
ggtaaacgtttcgttttcgttacttacttttacttttacttactagtacgaactaaattttaagtttagtagttagttaagggtacgggacgaaaagtaaaacttcggtagggtacgtacgaacgtaactttacttaacgaaagtagtaggaacgtacctacctaacgttaggaaaggttacgttcgtagtacctacctttactttacccaaccccaacctagtagttactttcgggtcgggttccctttccggtaaaggtaaaaaccttaaccgtccgacctttaggtttagggaaagggtaagggtagtactaacgaacgaccaacttactttcgtagtaggtggggtttccattccgtgcattgattaaacttcttagtcgcgtcaaagcgagactggatagatgccataccgaatagctcagttaactacgtcatgatttgtgcagccgtgacagcgttagcaaacctttgttttcaaggtgtcaaccatgctggaaagcatgaagtatcgagctttattgttagcattctgccaacgctcga

SEQ ID NO: 404829 - DNA, 536 bp, Cannabis indica
ataaatgtggttattatttaaatgccacatagctgtgattaatccacttttactgggtcaaaataaaaggtatattaaatacattgcaaaccgtatcgttttggaatgtctcgctggtaatagagcagcggtaaccttgatagcgagctaaagcttttcctatttcttttcaaggttgataatgtaaatctcgtcgcttttaatctggaaacataacaccctgtccgacactcacagtttttggtgacgaggtgatctttttcgtgtgcatgtcttcttatggcgaggtggacgcctcgctatcacttgcttttgttcatctgtctgttatacttagtttgtatactatattttatacgctcagtgtcttcacaatcattatatctcatccatgtaatcgagtttggtgcctcgtcttatacacttgaagtaacatggtttctcgttgatgcacaaggcaatagtttgtatatctttacctcgcataagactattcagtcagccgagttataaatttactttgtcaattatgcttt

SEQ ID NO: 404830 - DNA, 522 bp, Cannabis indica
tttttctcatcatgcattggagttgtaatatcgcgaaaaataaaatgatatttaattagacatattttattaaatatgtaattattttagtaatgaagtaagattatgatcttacttggatcaattagtgaaaatcgattaaatgattatataaagcgtaatttattaattacaaagtttatattgagatatgtgggtatcgtggatactatttttgaaataaaaatattttcgggcccgacgactgtggaaacttgacgatgtggtcaaaaatatcacgacattaatggatggattattttgaaggtcttccggactagtttagaattttagaatgttggtttgatggattagtaaaattatcataatgcccctaggttattttaaagtttaactttactttgaggggtagattagtcctttataattttatttttgttctttttgactttgtgggctgacctttatttaaaaaaaaaaagaaagaagaagaaatctttatatcattacttaagagtcaag

SEQ ID NO: 404831 - DNA, 552 bp, Cannabis indica
tatcaccggaaagttgccggagtagttgtcggcaccgaaaagtcgccggcagtagaaaagtcatcaataccgaaaaaagttactagaaaagtcacagtcgtcagaaaagttactgaaattagatgtctcatatataaattataatagaaccgattctataacataatgaataaaaacaagtaacacaataattctaaccgtttataattaaaaatagaactggttctataacataatgaataaaaacaaataacacaggataattcaaaccagttataattaaaaaaaacaaagagaattagttcctaaaatactgaaatatagttttaagacataactagttccacaacaaaattagtaaaaatgaataacatataatacctcataaaaccgattatactttatttttgaaaaatgtggggatcaattccaaaaatactgaggtataaatataaacaaaatcggttccataacaaaataaataaaaaataataacacacaatgacacaaaatataatacaaagaacctgattatatttatcaactagttaa

SEQ ID NO: 404832 - DNA, 610 bp, Cannabis indica
taattaataaatgaaaagtaagtcttgggagaaaattacattgtataccttttttactttacttattttaatttttacctctattttcatattgttttaaatataaccatttttatagatgatgtctccattaaaccctttaggttaatgcaaattagacaacttactcaaaaagtaggtatatcttaataaaaaaacaatatgaggatattttttattaatagatacagaaaagatgtattttttaatttatcccaagttttggggtaagttgaaatatacccgttttttcatcagttaaccaaaaatacccttattttaaatttaattgaaatgtactccttttataaatccattaccgattataccctcacataagggtactgttcaggaaggtgaggaaggtttttttcattacataagggtataatcaggatataacaaataaaagagggtataaattaaatatatagaaaaaaaaggtaaaaataaaatgggttaacaaaaaaagatataaggtgctgtggtgtgaccttggtatgatctacaatcagagccgccctgaaacaaagtgggccatagggaaaaaaaattttgggcccttatgtta

SEQ ID NO: 404833 - DNA, 548 bp, Cannabis indica
tttacaacttttaactttttattgagttaaaaggataagggggcagttctctccttaaatttaccaactaaatagaaacaccgacacataagacaacacaaacataatatattcttatctaactcacactactctcatatatataataaatttatatataaatatctttatatgtataattgctctttgtttttttctaacatatgctccacctgtaaggatctcatttacatatgtacatatctcataatcatgatattgtttcctttttctttttaattaaattatcagaatttcaggaagaaaaatattatttatattgatttttttttattaagaaaatgttaactttgatatgtactaaatcatgttttttgaacttttaagatcgttaaaaatactccctggactattgagattgttaaatttaagtacttttgtctaatttcattctattttactatttcagtcatgattatttatatactaaaacatgctccccaaactttgatatctactaaatcatgtctctcgaattttgacatgta

SEQ ID NO: 404834 - DNA, 725 bp, Cannabis indica
atttggctcaaattctttcctcatgatctgcttttaatttagccttgtagatccttgagttgtcataaccatcattgcgcaactcctcaatttctgacaactgaagcttacgatgaaggcgcgttgagatcagaatttaggctttttacagcccagtatgctttatgttccagttcaacagggagatggcaggccttgccatagactagtctgtaaggagacatgcctagctgagttttgtaagcagtgcggtaggcccagagagcatcgagaagtcgggaggaccaatctttgcggtcagggttaaccgtcttttctaaaatttgcttaatttcacgattagctaactcagcttggccatttgtctgtgggtgataaggcagtgcaaccttgtgaagtacaccatacttttgcatcaaatgctcagagtggttgcagaaatgggtgccttgatcactgatgatagctcgtggtgtgccaaaacgagataacacattttcttttaagaatttcacaacagttgtgttatctgcatttcgacatggcacggcttcaacccacttggagacatagtctatggcgaggagaatgtaaaggtagccagaagaaggtgggaacggtcccataaaatcaattccccaacagtcgaatatttctattacgagcattgggttcaatggcatcatgtgtcgtcgggatagcgcacctagtttctggcacctttc

SEQ ID NO: 404835 - DNA, 667 bp, Cannabis indica
ctttcttggacttgaaattggtagaagaacgaagggcatatctatatctcaaagaccctttactttgcaattactaattgatagagggtaccttggagctaaacctgcttcaactccaatggaacctaatatcaaacttagcaaagataaaggacaaccattatccgatccctctgtctacagaagcctcattggcgaactgatctatctcaccatttcaaggcctaatatcacttatgcagtgaatcacctaagttaattactcacatgtcttcgagtaccacatcttcaggctacccatcgggttctccaatacttaaagcgcaccccaggacaaggtcttttcttccctgctaatacactactccccaaatatcagcatacgtagaaactagcttgtctcccacaaatgtacaactgtcctttgttgctgatgcagactggagagcatgtcaagacataaggcgctccatttctggctactgtgtctttcttggccaagctctagtctcttgaaaatccaaaaaaaaaaaagaaaacaggttgtttaacagtcttctgctgaagccgaatacagagccatggacaatgccacctctgaagtcacatggatccttaccttactcaaagactttgacatctcactcaacaaacctgtctctctcta

SEQ ID NO: 404836 - DNA, 576 bp, Cannabis indica
ctaccccatgtcaagcacacttaaccatggagttctttcatgatgggctaccaaaaaataagatgcacattgttgatataggtcgtaccaatcaatccatttaagccatcttcaactgtgtagtaacatacctacacagtctcaaaatcatcacacttgaccttccccaagtggtgtgagattgcacacttatttccccttacggatcgacgggactactgactgtcacaatcccaccccttacggggtccaacgtcctcgtcgaccacactttcggctggtaacgtccccgcttcaaacctccactaggcccttacactcaagaatcatggctcttagacacgagtatgccactctagctgcttcctagattgacgactgaccctacagaccaacacgagtgtttccagcgtgttttgtcctcactcgcacgcttcttgagaaaacttcccagtaggtcaaccattctaaaattaccctaggtcaagcacacttaaccgtggagttcttttgtaatgggctaccgaaaaataagatgcagcttgttgatatgagtagtaccaatcaatctattta

SEQ ID NO: 404837 - DNA, 647 bp, Cannabis indica
ccccacaacaaaagttgtcaatagttggagatccctcaatttacttatttgacatggcatctcaactaggctatctccactgataataagatgtctcaaattaatgagatgattcatatctttgggaagagcttcaagttggtgacacttttctaatttcagtgtttgtaaattgtatagtacagttacagagtcaggcaacgtcacaatcatggtgcaagaaagatctaaatagcgaagatgttttagttcaccaattgaattagatagctgagttatataaagaccacggaaagatagaactctcaaacatttcaacatagatagtagattctgcactacttccttagaaatactgatttcacaataccttgaacctaataatgttaaaaaggttcgcaaatttgttgcttcaaaatcatagctagataccttgttatcagaagaatgttccataacacatccgaggtgacgagtcttcttctcaaatgtaacaatgtcttcattgtgctctaataatgaactatattttccagaaacaattttagccaaatccacaagaagatcatgtatcacaaaacaagatgaacctctcctatcccaagattttacaaaaaatgacatagatactaaatcatcaaaatact

SEQ ID NO: 404838 - DNA, 604 bp, Cannabis indica
atctttaaatgccttaagatttttaagataaatgttgagctccaaaaggaaaagaagattaaagctgtcaattctaatagaggtggagagtattatgggcgttatgatgaaactagaaggaaccccgggccgtttgccaaatacttgcaggaacgtggcattgatgcaagatatacaatgccaggtacaccccagcagaatggaattgctgaaagaaggaattgcatacttcttgatatggtacgttgtatgttattcattctagcttatgagagttttttatggggtgaggcattaaggactgccgcttatatcttgaatcaagtgcctagcaagtcggttcaaaagacgccatacgtggtaaggcatgaaatcgagtttgcgtcattttcacgtttggggatgcaaagctgaggtaaggccttataaccctaaatctaagaagctggatccgaatactatcagtaggagttttgtaggctacactattggttcaagaggttttaggttttattgtccctctcacaccaccagggtgatggaatcagaccgagctgtctattttgaggatgattttggttcaagtcaagggtcaagagaaatt

SEQ ID NO: 404839 - DNA, 535 bp, Cannabis indica
atcaagagattattactattactgtattattatatgatcatcaaaaacttgtattatattgtattcatttcattgtaaaaggtgaaaatgtccctactcatattgtaaaaactatacaactttaccactagacatacatgaggccgagtttaaaatttgagaaaatagaacttcattcaaggttaagaaaggggctgaagccctacacacctagcagatgaactgcaaaaccttacaaggagatggcacaaatattggctaaccacaccaatgatggaaggagcaaaaaactcaaggctcacacatgagcatttagagggataaaccccaaaatagtctaagactaacgccactaaaactaaaaggtgaacaacatcaaaatgactaattaaactaaaatacacaaaacaaagaaacaaataacataaaagaacttcaaagaacaccccccaaacgcagaggaggctgcctgagagcccaaaacaaacatgccaaagacaaagagttgctgccaacttccaacaaggaaagtcca

SEQ ID NO: 404840 - DNA, 425 bp, Cannabis indica
aaaaataaaaaaattaaaacatggagattttaccgcaaatttttcaataaataacctaaataaaagccttttcaaaataataataataaataatttgctcaaaaaaaaaatgcaacagattttttctttttaacaaatatataataagttaatttatagtcttaagagtctttcacatttagtaacttgctattgattattaaggactaaaaatagagtagcttacccactccaatattattgcacattatttgctgtgctggagtggcaacaagtcaaagtcaatatcgccaatatttagcatcggaagggaccgatattgaactttgacttagatttattaaacttacagtaatatctattcaagtcaatgcttctatctggcgaatagtaagcaaagggtgatttccttcgagcttaaccaa

SEQ ID NO: 404841 - DNA, 847 bp, Cannabis indica
ttttctagattcggcctcagcaattggtagcctttcgcaacgtgataaggttggagagcagacaactgacctgtacaaatatctttgaactgttctttcagcaaacaagccttctccaataccaactccccttggataggggggcttgtagtgccaccaatttttcatctcggatatacacacaatggatccatttcatccaaagactatcttccttgtttgaaatggcccaaatatattttccccatagctcactattggatttaggataacacaacttatcccaaacaatcatgccaggaccagcagcaatagcttgacctgtccataggaaattcctacataccaaactagtattatagggtttttaaaaattcaaaactaaatcagatcaattaaatgattaaaccaaccaaacaactcaaaaataattggtttggtttgagccatggtttgtattttgtagttgttcttaatttttttggatttttttacttttaataattttataatatataaataacaataaaaaattattatcgtaacaatataaactcaatattaatattctacctaattttgttctcaaatattagaactttgtaccaaaaaatacattaagtatatatataataattatacagattggtttggtttgaaccgttatagagatttctaaaatcatgactaaatcagagaatttaaaacggtccaaattgatcaaattattacaccaaaagttatgtggtctgatctcaaatggtttggtcagaattaattggggtttagaaccacgaattgcagattatatgaagggtttttttttcataaatgtacaacaaaaaca

SEQ ID NO: 404842 - DNA, 823 bp, Cannabis indica
cgaattgtctctccatcgaactccattgtcaaggttccctcatggacatcaatcttggttcttgctgttttcatgaatggtcttcctaacaaaattggagtggagcaagggatagaatcatcttccatatcaagaacatagaaatctgctggaaataccaattcattgacttgaactagcacatcttcaatgacacctctggggtaggcattcgacctatcaacaagttgaatgattatcccagtttcttcaagtggacccagattcaaggagttatagatagagaatggcatgacattaatggaggcccccaaatccaacatacaccgctcaatcctagtgtttccaatagtgcaaggaatagtgaaagttccaggatccttacactttggaggaagcttcttttggaggactgctgacacattctcccccacacttactttttcattaccccttaacttgcgcttattggtgcaaagctccttcagaaacttggcatatcgtggtacttgttttatggcatcaagaagaggaatgttcacttccaccttgcgaaatgtttcaagaatttccttgtcagcttcttccttcttagtattctttaatctgcttgggaagggtggcggtatgacaatggtaggctttggtggagctggattgtttggcttaggtgcctctttttcatcttctggactatcatcttgtggtttagatggcactggttttggttttgggatgataggtgggtcgtagtgttttccacttctcaaggtcactgcactggcattctccttaggatttttctcaggttgggatggtagtt

SEQ ID NO: 404843 - DNA, 611 bp, Cannabis indica
atcaaatcaaatccaagcccagcttatgttgatcaaatctgcgatccccaccaagccggccaaccagcagcgaagcccgaaccccatatctaacccagcgaagcaagatgcaaactccaaactcgacatcgcaagtccccgattgcacaaagagaacctcaaacacctgcaaagaaaatggaagtagcagatcaaaggccttttgggctatcgcctgttaccaatatcgatctttcgaaggatgtcggaggagatggcaaagaagcccgtcgttggactatttgggcgatgtgagtgggtgatgaagtccggtgaggctgaatgtcacttggggtttcagtccgtgtgtcgtccggcgtcgatgggccttggaagggtagggatggtggtcgttgcttcgtcatcttggaggtggttcgcgcgcaggaggtcatcagatttcaaaagcaaagagagggagaagaagaagaggcatgttaggctgggttttttggctgatagaatgaaaccctaaatgtgatgttgaagagataaagaaatagggttttgttgttaaaaaaaaaaagaaataggatttttttaattaattgaggatactagctgatttttag

SEQ ID NO: 404844 - DNA, 771 bp, Cannabis indica
atcataatgaacatatttttctttttaaaaaaaggatattaattttgtcattaaaaaataattatgtattcgtgttattatatatataattgagaatgattaacacctatattttttattaattagtagccactataaaaaggttggagtatcacggctgaaatttaatatgaattgaatttgtgtatatataattgcaaccctttgacctgagttattaattcttagtggaattttagtaacagaatatttatatatataggtttgacccattccaagacaccggactttttcaggatctttctgttttataggaaaattaataaatcataatacgaaattttcattctagaagaacgatatatagaactaataaagaatcaatagccgacggtggctacctttgaactttttttatttaatttaaattaataagcgaaattcctaactagctaggtcattacataaaaactattttcataatcaattgaaatatacacagaagattttttaatttttttccttcggatttaatttgttgaagagaccatctttattaatggaagatttaaaatttatgctaaaattagtaaaaaaaatgagtttgtactatatatgccctactataaataaggaaaaaataattaattatattgatagtcattttatattattttattgagaatatacaaaagttattgttttttattcttttattatctttttacaagtattcttttattatttttttttctttttgacaaagtgatt

SEQ ID NO: 404845 - DNA, 819 bp, Cannabis indica
tttacttgacgagacgaaaggtgatgactttgattggttagcggagtatcttgaagctggagataagggatcggataatgattcagatgatgttgttgtggttggtgagaccaagcctaagtctaggtcaaagtcttctaaacctacggttagagatgcggacgaggattgtgtagttttggatggtgacccagataagaagactctggttggtaatgatgatgcagtgagtgactcggacgagttgtgcatagttggagagaagggtccggtaagatttaatgttaaacttaattttcagtaagagatttttgttgggtgtgaacttattgaagttgttattttggtctgaggataattttgggataattaagagtccagcatttgtttgggatactttgaattttgggataatctcatttacagtctaggtttctatatatgcttgaatttggatgaaatatcacttggaaagttggattgtctcatggtaagataactgttacttcattttcagtaggagacttttgttgggttttcttatttctctttttttttttggtttattgaagttgttattttggtctgaggaaaattttgggataattaggtcctgcatttgtttgggatactttgaatgataattgaataattctactatggcccagccatggagtcatttacagactagggttttatatgagatgcttgaatttggatgaattgtcatttgtaaagttagattgtgtcatggtaagactctgtaaacttaattttgagtaaagagatttttgttgggtgtgtaacttattcaagttg

SEQ ID NO: 404846 - DNA, 501 bp, Cannabis indica
attatttgataaatacctaaaaaatgaaaaaaaaaaaatacattgtcacggatctacagtttttgttgttttactggagtgttgtttttacgttgtcaatgtaataataacgtgaaaataactttttaatcttctaaaaaaataaataaagaacttatataatacagaatctgtaaaaatatatataaaaaaattgattctaatttattcgtctaaatttctcattttaattttagattatgttttcaattgatacatgtttgttgagtgcacacataaataaagagatttttatatcacatactgaaatatttttttttttattgtagggtagatttttttttcaaaaatactatatatttttatactgtgtattgtggtaagttttatttgttgttccactgttatttattagttattctactttggtttttaatttttctgttttgttattttacagttgttttataaaaaaaaaacagtatttttgtataaaattcc

SEQ ID NO: 404847 - DNA, 504 bp, Cannabis indica
gatagtggtgcaacacaccacgtttgttgtcatctagaatgcttttcctctattcaatcaaatcctaaggcaatttctgtccaattaccaaatggtcatcgagctagcatacataaaatcggtacagtaatacttaactccaaaattactctaaagcatgtgttatttgtacctgactttcgatacaatttgctatctgtaagtgccctcacacacgaccataatgccttagtttccttcactaacaacaattgtttaatacaggacctttctccgatatcgaagattgggactgctaagcgttttggcaacttgtactacctacagcaacagaccaatgaagacaattctactatacaagcttgtaatgtacaccttaatcaaatccaatggcatactcaccttggacatccctctataaagattactaataagatcaataaacatttacaagtttctgaaatttctacaccttttaatggtccaacatgtcatattgcaaaa

SEQ ID NO: 404848 - DNA, 666 bp, Cannabis indica
ctacacaattctatgtcaactagactttacacacataaaagttactcattaactatagatcaacaaacaatatgactaacacaataaaaaatatctaaataactacaaattttagtaaaaccaaataaaaattaatagtaaagtcaaaataaaaaatactaaacaattgttttgggggaaattgagaattggtgtgttcgttcgaaatcacgcaaggagatcgttggtcgtctcttgatatcttctacttaagtttttttgttttttgtttttttttgacgtgatcttctacaagtttttaactataggaatagtggaagctagggtagtttcacttactattattttcttactattaagttttattctaaagttaaaattaatagaattaagagaaatatgttttttccaaatggagaattaggagtatttcactttctttcttcccctaatgttacaatttattagaaagactaatgtgttagcttttttacaaatgagttagctcattcttttaacatatagtgaatttgtgtgtaatgatcaagacatgatgttcacttttttcactagtatttacgctttaagaatatgatgaaatttttaatttaagaatatatatatatatacgggtgcactcttaatgggtattacccatgaataagt

SEQ ID NO: 404849 - DNA, 551 bp, Cannabis indica
aaccaagtgaatcaatcgctgagacaaccaagcacctctgtattcgaaaggttgggcgcaacccatgacctaaggaatgatctgaatagaacgaggggagcatacgatcagaatgttacgacaatctcccatcctggaacccatactcaaattcccgctcagaaagatgctgatgtaattcaaattgaccagaatgccaagcaggtcagcccagctgtacaggctcagctagatgaactgaaaaacatttttcacggcatggctggacaaagaaacaatgatcttgagttggaccgagcacgcagaactcctttctctcctgctggtgccccacaagttcaaaatgccgacgtggaagatgtacaccgggagagaagattccctttcccatctcaagtacttcgaaatgcaaatggatttacaaggggtacgaggggatgtatgctgcagaatcttcccttccactctgtcggaagtcgctaagcaatggtatttcaagttggctcctggaaagtttagttgatggaaaaccttctcttcagaattccatg

SEQ ID NO: 404850 - DNA, 507 bp, Cannabis indica
tctgacaggttgtaatcaataaaaaccttctccaccattacatttccttagtcacaaaatcttggatattgtgaaattcttctttataagtctactcctccaaggatactggattctttactttttggctactacttctatgttagtcaggaagtaacacaagtagttaattcattattggtacaacgccaaaaactgcataaaactttccataggctgaataagtatgtttcctacaactttaacattcagtctcattggtagagttagagactcctaattggtttttacacttctccaaaatcactgctccacccctaaagtaatcaccatctcatcagtagactttctagcattaacgcaagtctaaaaacctaatttggtgtagtataagagtattaaaatactaaccttatcaactaacatatagttcctcttcctgatcttaagatttactcgattatcttctaatgttccttttctagattaattggatacctactcatt

SEQ ID NO: 404851 - DNA, 991 bp, Cannabis indica
ttcatggcacttgaaaatttttctgcagaataagcataataaaagatcatctcctcttgcttctttctgttttctcagtttctcataccttttgatactattcagtggtcccataaaataaagaatgattccaagtgagatgggaccatccgatcttattaaaaaaaatataccacccaatcacttttcttcctaggtaaattttcatgtagaatgtgatttagtgaaaacctaattaacattattccaatttagttctaaatcaaattaaaataaaaaattgtgatttgaattaaaaaattagcgtacatataatttcataaattgaagaatactaattagaaagaataaatattcattttcaatacaatttaaaggatacttagagtcaatgcaagagtttttaaagttgcacttcaaaaaagtggatttccaaagattgacttttcaattattttcaacaaagaacacatgctacgttgctaaagttatttattttaatttttttttataaaaaatctaattagctactttaattggaaaaaatgaaaagtgactcactactttagaaacttcttctattatgggatgttggaggtattcttaataataaaaatgataattagaatttttgtcccctaaactttaatatgtaccaaatgatacccttaaatttttttggctattgaaaattctcattgaactattgcgattgttaactttaaggaattttctctaattttatttaattttactaattcagtgattttttatgtactaaatcatgttctctagactttaatatctaccaaatcatgctcctgaactttgacatataccaaattatgttctcataaacttttatcaatgttaaaaccttccttactataaaattggacaaaagtccttaaatctaacaatcttaatacttcagggaggattttcaacaaccttaaaagtttagggtgttgggttttattgccctaaataa

SEQ ID NO: 404852 - DNA, 1292 bp, Cannabis indica
attttttatatttttttaagatatacctatttttatgaatgatatttgtattatattttttaagctaatataaattatgtgctaaatttaagtaaaataagagtgaaaatatattaaacaattaatttataaacaaatttaatattagagtatttttgagtaatggataaaaaaaatatcactcaaacttaatcggaaatattattaatacaaccacgttgggcaccaaaatagagtaaaataatagtacctcgatcacctagcaaatcacatctctctatgtaagttagaaagaaaaaaaaaaaaaaaaaaaagaacccaaaaattaattcgaccccactaattctaattgttttttttttttttagttttatttttaatttaaatttgacccactaattttaattgttcatgaccagggcagcaacaataatcaattatattaaatttcctagttttccaatcacataattactccattaagtatgtaataatatcaccacatgtaaatacatgttatatatagagttagggataacatattatattcataatttaatttaattaaattcgattaatagaagaagtagtactagtaatagtaggctccaactgatgtggagttggcaaaatacatatggtgtgaccaatgtgggaaaccgcagagaaaaggacttgctaacggaaaacaggatgagaggaaattgagtaagagtaagagcaagagggacctacctaatacaattcatttccaatcaaagagaagacaaacgcaatgcgtggtcgaacctcacacaccaaaacccaaaaataaaaaaactatagtttctttaattaataaataataatcaaatttaatattatataattatccttcctctcattgtccatttcacacgaaccatatcttttattattattattattattattattattattattattatgtaagttttcattttttaataaaattttaataagagtttaaactttttgtcgtgtgatttattttttttgaatgaaaataatttttattagacagaaatatccgctaatacagaggactgaagagcaatgggaatatcactctcagaaaagagacgacgtgaccaataacaagcaccacgtgccatacagtgcgcggctttgttagcagaccgtttaacatgaccaatagaaacattaattaaagaagataaaataacttgacaatctttaacaaataaaccaaaaatagaaggcatagataccgaactaagaatagcttgaacaactaaaatgcaatccgt

SEQ ID NO: 404853 - DNA, 559 bp, Cannabis indica
tctctttttaagaagaataatggcgttcgggggtttatggctttgaagctggacatgagtaaagcgtatgatagagctgagtggtgttttctgcgtgctattatgggtaagtttgggtttcctaggcggtgggtggatttgatcatggactgtgttaatacggctcagtatagctttttagtgaatggaaagcctcggggttgtgtggtgcctacaaggggattgaggcaagggtgtccgctctgcggaggctttgtcttccctgctgcatcaagcgaagtttagtggtgagttgatggggtttcggtgttcccagtctgggcctcgggtgtctcatattttctttgctgtgacagtttgatatttggtagagccaatggaagggaggcggaatctatccgtcggattcttcagtgttatgagtatgcctctggccaacaagtcaattttgataaatctgctatcacattcagtccgaatgttctacctgcggatcgtgcaagtgtattgggtattttaggcttggggtcagtagacactcatgataagtatttgggtt

SEQ ID NO: 404854 - DNA, 1105 bp, Cannabis indica
aattacctttaataatggtttttttttggtaatttaataatgggtttagcaggtcaagaatcaagattatatctatatagtgcactaggcaaaagtatttctttgaatcaatcaagtggcaatcaaaaaagacacaatgaagacgaaattcattcaagaatgcccagtcaatttttggaagataacatttttattcacacacaagggaatataagttttgagcgtaaaatttgattaaaaaccacataattgattctcattctaagaataaatttgtgcagatgaacttaaataattaagagaaatgctaaaaagtatccgtggtgccaagcattctcctacttataaatatcgctattgatctaattaagtatcagatcccatatagtttaataaaataacatttaaataatatcgttatctaatcgcaaaacaacaacatgtttaagggtgctaggcactactggtgcccaataacaatactcaataattaatcattcatcaaaaaaaaaaaacataagtaatccacttagtattaagtcgacaatcctagaatataatgcttaatctcatttctaatctcataacttattacatatacaaatgtgtgagctttgacttccataactcaccaaacaatgatgcgaaatcatatgactactcaattttatttattttaacaacatgttgatacataataacgaaattacgtcaaaatttgaaaagcgtttttttcccggtaaggatttattgaaaaaagctttggaacacaagcaaagagaaagaaaaatatattcctaaaagaaaattataaaggttagacttttgactgtctatcacacagatatttattttattattagaaaatatctgacgaataaattaaataattttttttttcaatttagaaaaggaaagaaagaagaaagatgggttctgtttgtttatgataagatatgaaataattgagattttctctgaattgttgtctccatatatcacggtggttaaaagtatatagttattatccaattgaaaattgcaaatgtaacttattaatagtaataataatttactctttatatgctttcaaaaaaataatgta

SEQ ID NO: 404855 - DNA, 732 bp, Cannabis indica
aattttgaaaaatatagaataaaaaaatgtatatacatataaaagatatatagatgataagattgatgcttctcaaatttgtctaattagaacatacaacacactttttatatgcttgactacttctagagcaaattagactattatgactaagttttcttaaggggaaaattattatagttagatttattgagtttgatcacttatactcttttgtcaaattgattttaggtatcgtgagagaaaaagtaagttattccatatatatttgtgtaacataatctctaaagttgaacatagttttatatatataataataaatttagttaaattaaagtagaaagaagaaaaacgttgaacttagttttttttttccctttatgacaagtttgaatgaatagaccgatatataaagaaaattgtacatatataattatatatagtttaaatgtcatattttcaaaaaaaaaaaaaaaaagtcataattaattaataattaagatctctattgtgtaagtaagaaatcatgcatccatcactacaaaaaattgctacttttagttataattttatagtcacaacataatttttttgtcactaaatgtgacttctacatatcacaacaaaatgttacttgtgactaaaacatagtctttaaatacaagttgtcactaatttaattttagtcacaatacttattgcgactaaaaataaatttagtcacaacaaatt

SEQ ID NO: 404856 - DNA, 601 bp, Cannabis indica
attgtgactgtcacagtttatgtatcggaaactgtttattttggtttgttgattttgaaatattctccactttcccctctttatctctttctatgcgtgtcttaattagattgtgattcttgacttttcttctatattttctgatattccatttatataatttgtttagcagctttgctcatctttaattattttcagctttgcaggattatttgattgagtcagtactgagctcagtaaggggtaagaaaatgggagagaagaaaaggcataaaactgggaagctcgaggagaaaacaaatgtgcatgaaaagaatgacaaaggatttcagaaagataaggaggataatatatgattgctgataaagttgtggaaactttaaaaacatgcttagaaggagaagacagtacaaatgaactaatggaactaaaagagaagaagaaaaaacataaggagaataagaaaaagaaagagggaattgttggaatatcatctttgggtgacaattgtgaggattaagaaccggtggtgccgaaggagaagacccaactgcgtctcgtcggagtgggtgaccagctggtgcgtctcgtcggatccaga

SEQ ID NO: 404857 - DNA, 505 bp, Cannabis indica
tcaatgtctaagaaacttcacataagaccatcaatatttcacaaaaatatatataaattaagaacaatagtattattaaccaaaaaaaatgatgtcaactttgagccatcatttcaactatacatatatatatacagtcattcattatatacataacaaatgtatggtacaatctctctcaatgtatatttattcagagataaacacttcaaaacaagccttaaattcctggttttcagaccaaagaacgtgaatttatggcaatatgacttgaaagtgcatttagtagcattcaaaacaattttttaacctaaataattttagatgtccacctctactctaattatttaagtgtatgttgtagttatttaaaattacctataatttttttagaaaataaattataaatagtttacaacggaaagattaagttgaaatatttagctactagtgattatttttatttatacatatagtttacgactgtttaaactttatttttatt

SEQ ID NO: 404858 - DNA, 707 bp, Cannabis indica
tcgctgaatgcattggcctcgaaaaagatgaccacatggtctgtgaagaccagttgcacacacctcagactatagctcaagagggttctggacctccttataagctttacgtagatgggtcctctaatgaacatggctctggtgcaggtctcatccttgtaaatcctaaaggattttgcactcactgtgcattgcggtttaagtttactgtaactaataacgaagtagaatatgaggcactcctagtagaacttcatttggcactagctaacaaagctgaatcactagagatttatagtgattctcaacttgttgtcaatcaaatcctttgcgaataccaagcccaaaggcttaaaatgatggcatactttagcaaagctaaagatatattagctcagctaaagcactactccattcagacacttatttcaaacccacctttaataacattttaaaaaaagtatagctatgagctaggggtgtacgtcggtcgatttggtcgggttataatatatttttagtaacccaatataaatattgggttgtaaatatttaattgtaacccgtccaattaaaaattaaaaaaagtttaacctgtccaataattttgtcggtttggtcgggttaacccgtccaaactgttttttattttttttttataattattttttagtattcaaataattagatttaacaaaataaaaata

SEQ ID NO: 404859 - DNA, 1191 bp, Cannabis indica
ccctgaccacatctcaattggaaattctaaaattgattgcagaggaaggactatgatttttcaagtaacaggcaaatagaacaaattctgcccaaaaaatttattaaaaactagaataaatcaacatgcactttaccctttcaaagattgttctattcattttttcagctaacctatttttctgtgttgtatttttcacagttaaattcctagctataccaacttgtttgcaatagttcttaaacacatcaacacaaaactccaatcatttattagttttcaatctttttatcttcctactagtttgagtttcaatcaaaattttctatcgtttcaaagtcttaaaggcatcattattattcttgaggatgtacacccatacatatcatgacaagtcatcaacaaatgttagaaaatacatggctccacctctagatgacactcgtgatggcccccataggcttgaatgtatgtagtcaagagttccctttgtgttgtgctttccaaccctaaagtcgagtcttattttcttccctaacacacattgttcattggattccatgtcttccatagtattttcactaagaagccctagccttgtcaagatctaaagtcctttcttgctcacatgtccaagtcttctgtcccaaagcataatagaattaatcattatctttgatgccactattgcttgatcctttgatgtattcccttacaggatgtacacctcatttttatcattgatgctttcacgactacaaatatcaaaattcacgacggtcctaaaaacgattttttttggggaccgtcgctaaaaactttaagtaactatttaaaaccgtcaggaaaaatttagtattctcgacggtttaaaattgtaataaagacaatagacgacgttttttaataaaatgaaaatttttaggaggcccttatacccgacagttaaaaaccgtcaagtatagtataggcgattgtcgcctatactatacccgacgattttaaaccgtcgggtataagggctcattaaaaaatcgtcacctacttctcgtcacatttcccacgtgtccacctactttttttcttatttcccacatgcccacctatttcttatcacctatttcttccctatttcccacaccctaaacgaaaatcttaactctccaaaaccccacccacgcctccgcacca

SEQ ID NO: 404860 - DNA, 972 bp, Cannabis indica
attttaaacaaaaaaaatagtgtcttatagtaattattacctaaaattaataagaaaaatactaacagagacacttttaatttttaaaattagtttgattaattttttttttattttatatcatatataccatatattaatttttttttttattttctctaaatcatttaaatattctattttaattcgttataaatatttattataatacttattcatatacttttttttaatttaagaaaatccatatatatatataaatcatataattatgttttaactagattttaataaattaaataaaaaaaaaaactaattataaaactaccaatgtaaaatgataagagatctaaaaaactttttcacataaaaaaatagccacaccctcttaaaaaaaaaaacattgatattaacctacatacatattaataagtgtcaccacttgtaaccaaaagtccactttcaaatcttatttgatcaccacgtatccatagttagatttatgtgctatatataaatacataattagcagtcatactcatatctattaataattaatctaagcttaagttgaaacaaagtaaggaaaaaaaaaaacagaggatgcaagtcactataagtagatgaaagaagaatatacttgtaaatacaaatggtatgctgtaatatgtatttttttgtatggaaagatatcgttgctccaatctaaaagagagacaagtatagataggaattagagaaaaataaataaataaagcaaatggtattattgattaattaataaaataatggtttggtaaattgcgacataaatacttaatgtacccaatgttacaattctcttacatctgttactaccacttccgttaactcataaatgtggacacgtggagggtctagatgcattacattttttttattttaaaacttaatattcttaatatcaaaaactaaatgctacttgtttcaaaa

SEQ ID NO: 404861 - DNA, 691 bp, Cannabis indica
ctggtagacatttaaatttaaggttgtaccttgttaaagtatatcaaaatttttgtgtttagttgggaggaatgaaattgtagtaataagaatgagaataggaatggaataaaatttataatgctttaaaattttctcttgttacattggaatagtctttcctttctttttaaaaaagaatagtcattccactaaaatagtagaaagaacattccattgaaatgtcattccaatatttttaaatgcaaccaaacaaatgaatgtaatgaaaattgtttcttttcaattgaatcatatttaataaattttcgattcaactgatccagtccaattatttattagatgttaaattttgtcaaccgatcaaatccaatcgaacgaattgagtcaacgaatccaatccaatccaataactacattattttcaaacagttctaaccattaaatacattaactaattaactaattttttattagaataggctgaatttcattatatatataaacataatttaaaatctagtctcatagtaataaacacaaatatataaaattaataaatatattttagaaacaaaaaatatatttattagtgttataaaggtcatttgtgattttataaatttagatttttttttatgtaatcttatatatttaggtgcatattcataataaaattaattaatatatt

SEQ ID NO: 404862 - DNA, 656 bp, Cannabis indica
gaggtcacctggatgaccccataatagactactgaaaacaagagtctcctgaaaataagtagaggctagaaaattgcgatatcgagctgcttgatatgtcatttacgacgataagctctatcacagaagtttcagccaaccactactccgcaaagtgcatggtggcatctgcggcaaccatacagggggtaatttccttgctttaaaaataatgaggcaaggtcactactggccaacattgtgagcagatgcatcaagttttgccaaaaaatgtgacaaatgtcaacgaatagctacatatgtaaacaaaccaccaagccagctaaattctatcacgagtccctggcctttcgcagtctggggcataaatctgattagagaattaccaaaatgcaaaggaggagtgaaatatgtcgtagttgctgttgattacttcacaaaatgggctgaaaccaagcttcttgcgactatcactgctactaaattacgtgagtttgtgtacagcgccatcatctgcaggttcgacataccttacaagttaatctctgacaatggaaaaaaatttgactgtaaggagatgtgccaggtatgcgatgagttggtcattagaaagcattttcagcagtcgcatatccacaaagcaacggtcagacaga

SEQ ID NO: 404863 - DNA, 531 bp, Cannabis indica
aaaaagtaaaaaaatactagcctgcacagtataaagtacgtgtcgcttcattttttaagcaacgtctaattttcccaaccccaactcataaatttatgtcgtattcgtattcatatttgtgtattgtgttgatatccattttgccactcttatagatgaggctaatgttgatgggtgatcctattaatcatcaatctttttttattattaaatttatgttaggttgaaattaaatgaatacaatttaagtacacaaaagttaatgatcttcaattctatatgacaatttcctattatatataatatttttttaattattgtatccgaaaatacatgttaatactaaatattttttttttaaaaaaaaattaatgacgatatttgttatagttgtaacattatcttaattaaatttttaaaatttaatttaccacgcacatgtttaaaaaatttcaaatatattttcgacactataaattatttaaattttttaaaaaaatttacggatataataatattataactataaca

SEQ ID NO: 404864 - DNA, 585 bp, Cannabis indica
agagaaaaatctttagagattatcaaccaaagttgtgtggtttaaatctggaaaatcacacttgtaaatacatgttgattctagaggataatcaagctgctctaagatgagcttgatggagacgtaccccatctacggggatgaactactaagataaaatctttgtatgattctatttttgtttatttttctaaccctaactctcatctttctgtattggtgtgtatgtgtgatgatgttcttgagtttttgtgtgattcgatttctggatcatgagtgtgtgcgatctatgtggtcttgctctctcgaagaagacaaagaaggttcgagattgtaatttgagaagtctgaagtgttaactcaaacttttagggttttgtttgtttgcctttcaggggcgggtcgagtctatttggactcttcttgtttttattttttccatttttattgtggacgcatgacttaaattgcatacataccataattttatttttgtgtattcttgagtgttaggagccgtagattctaatagtggtattaaagctggttttttttttttttgaaagaatcaagatacaaattaat

SEQ ID NO: 404865 - DNA, 727 bp, Cannabis indica
ggcgatttggtgtgggttttttgagtttttgtttatttggttatatattaaactatataggactcaatacttaatttgactaatagagatattatatataggagggtgataagcaccactagtaccttttaacatttctatgcaatttttgattattttttcaaatcaactcacacatgcatttttttcaatttcctaaaccgtatgtgcatcacaaaactaaaaaaactgcaaaaaatagtgtggtgtagtgcgattttgactatcaccaaataattaaactatcataaatacaacaaaacttgagtaacgcttgtcaaaaataccataagacttgaaaataaatatgaaaaaagaaaattcaagttttaacaatacaataattagtaggcttttagtgggccttcacatattggacctaaataaatataaaaattagtattattattatatgcggtgcagtacaatttgaactgcatattaacaattcaaaactgcaaacagcaccacaccgcgcaatttaggaaaaattcaaaccgcgaccgcaccgcaatttccccaaagaattttaaaccatattttttttgagcgatttgatgactaaccctacttctatttatacttttaaggttcgtttggtaggtggtataaaggtcgtgctgtatttaataataaataacattatatttaaataaattaatgtgttgtattaatgattataactaaa

SEQ ID NO: 404866 - DNA, 510 bp, Cannabis indica
gctgtgtgtgaaatgcagtgccatagtaagagcagcttttaattatatgaatataacgagccacttcctttatttcactatggacttaaatacgcctatcattcagtccagtatcgatgattcttattgagcaacaaaatttttcttttggtgcaaagagtttgaatatacattatagtaatggcattttttgtttaaatatgaatttgaattaaagtaatatacgtgtatattaaataaatataaatatacatgtgtttcctatttaaaagttatttgaatgttattcaaattattgttatatatatatatatttttttttttttgtaagtaagctggatatttttaattatgcttataaatatcatcatgaattaaggaaacagttttaattttaaaagtttttatacgcattctttatatctaggacttaaactaagccatctgtaaagccatcacttttcagaattatcttcttcttttttcttatatatatagatacaggattca

SEQ ID NO: 404867 - DNA, 552 bp, Cannabis indica
ttttttaggttgggtctgatgtggacctgattcccgtccaatgcgggcccaatgtttgttcgatgggttttaaattttgatatttttaagttgctacaaaattgctaactttcattttgttgttttttttttgcagagacctccataactaataattccactctcggagcattgcacaggtcatatcacttggcacgacgacagttagtactaccagaagattaaggccaaatttgaagaattcagattatgggatagggggagggaatcccctttcaaatagttcttcgagagagagccattacaattttcaggagcattgatccatcaattgatgttgcacaaaatcaaatctgacaagccaggcaaggtacacttttacttggcaaagaagagatgcaaatttggtagtaggggtgttcattcgatcacatccaatggatttggacccaaccaatccaatccaattatttattggatattgaatattgtcattcgatccaatccaattgaattgagtcatccgatccgatccaatggatgtattggatt

SEQ ID NO: 404868 - DNA, 697 bp, Cannabis indica
gttatcaagtttgtcaaaagttaacgagtcattagaggatgcagcgttgagtttgggagatggacttgtgacatagttttgggagccgatacaagcaagagacagagggaaaattcgtggttttgggtgattgttagatcattgactacgtgaaagaagctcggaggagcatgtatgcagtgggacagaggggccttttgcatgaagtcgtgggtgtgcggtagggctggaggaccaatgttcagaacttcatgaagagattttgtgaaagagtgcacttggtgctgcattgggtgcaattggcttgcgagcctcgtccaggtgggacgcaccaacttttatcctgcaataggagtgtcttgctcaattgccattaggaggatggtgcgccatggagttggcgtgtgaagtttctagagggacttgtctagaggggcttggcttcagtagaagcatgttctttcagtgtcgttgggtacggttggtttgcaaacctcaccccgaggggtgcaccatacttagtccttgtcgaaaggagtatgcattggatgattggcgagtgagctactatcagaggatgtgttagcttcaggatcagtgttgcaagggctacttggttgactggagggacgttgtgagggacttggaggagttcatattggggaaagtattctagtgcagaggcactactccgtgg

SEQ ID NO: 404869 - DNA, 530 bp, Cannabis indica
tttttttttggtcccaactcccaaccagtctagtgaatttgcagcgaatctatttgaagaaaattaaatatatcactttattttactttattttaattttttttttttttcattattttttaaaatataccccgatgatctcaataaactccttaaattaaaataaattatttacatagataatgaaaatattttagacaactcactcgtaaaactgaatatattttaataaaaaataaggaaattatttcatatacaatagatttctaaagtagtttctatgtgggttgcgatttaggttgcttcgttagttgcgatttaggttgcttcgttagttacaataagtgtaaaaatgaaaaaatccctaaaatataaataagaaggtatttttgattaatagataaaaaaaaagagtattcctcaacttatcccaaactattttatgttttgattttttacatggataaattgagagatacttcttttattatatattaatctaaaaataatttactatattatatttttac

SEQ ID NO: 404870 - DNA, 732 bp, Cannabis indica
actaaagtgtcttcttgaaattgtaaagtggcacagtaattcaagatcctggtgatcaccgttagccattgctcggctttcataacattggggcctcccaggaaaactggaggtgcctgcttacagaacctttcatacagggattccattcggttcattccaaccactgattcggcctgcacagcaggggcaggtgccactggcatttctggaataggcactgcaggagcaccctgctgtcttaactgccgaagcacttcctcttgttcattgattctagtttgcatttctacaaacctattttcccaattctaggcatcctgagaagcttgggcagcctgggcaacctgtggcgggttagcatcaccccgaccacgtgccctgcccttgagacctctaccacgacccgggcatttaggggaatctgagctccctgaccttcatttgatccaacgaaattaccctggctactggtgtttcgcctggcatccatactaatctgaaaaccctgcataaccaagagctagtctggttagatcgtgatcaaagaaaaacttactgaggccgctaatttggaaattaaaaacatacacctattctactatcaggttactaacaggcttttcttatatcataccataaaaataaactactaaagcaataaaagcttactaaaccgtggaacaagttgactgctgatgatgattgtacatgtcgtgacgatcttcggaa

SEQ ID NO: 404871 - DNA, 542 bp, Cannabis indica
aattgatgttgttgtttttgtgaataaaatgctgaattaagtaagattagatgggtttaatgcatgctagttacccttgttcatgtttgagaaattttggttcaaaagctatggttttcaaagtaaattcttgattttcgttgccgtggttgctgctattgttgtgtagtgatttctggtgttaatttatgttgaaataggttgagttatgcatgatttagttgttgtttggaggtttagtcaagttttgagtttttgaactcaatcttgaacctccaatggtgaaatgtgtttctgtgcttgaagcttggttctttttctttagaaatgttcttaggggtatatagaacaggtctggaaggtttggtttggtttggattttatttgagggagttatgaattttcgcatgattcttgcgaggaaccggaattccagatgtgcaaccgaaattttggatggggttcaggaattcccagaaccggcctgccggttaggggattttctagaaccctagtttttctcgtttttatgttatttgggg

SEQ ID NO: 404872 - DNA, 615 bp, Cannabis indica
atatataataacatctttcatcagcatgttgtttactatgaaagagttattcatatcacaacaatgatcattagtagatcagtctgaatcctgagtatgaatacctatttgtgtttattgagttttttaattcactcgttaaagtttctcagagaagatgattcttacaacttttattttgtgagcttaataacatgagtgaataggaacatggtatacaataatagaatctaagctttccgaaagggtagaatattaattctcttatagtgttaattttgggagtgctaagattatagatcaactgttcacattgaattaatggtacataaggaattaagagataattagaaaggtaaaagagtaattttgaccaactttaattatgaacaaataattggagagcgaactacttatattgattatatcaatagactggaagtaagaattctataaatataattctatattgtcaaagagtacaattccatctcgtgaaactagtttttactcattttgttgtgaaattaattttgtttttaatttatatttcagtgatttaagaactgatttcctctttgttttttaattataatcaatttaaattattgtgtg

SEQ ID NO: 404873 - DNA, 803 bp, Cannabis indica
aattttaaatgatggtgtataatatgtatacctcccataaattttaaaaaatatatgaatataataaaaggattattaaaattattatttcataattttttgaaaatttgtgtggaagattttacataactatacattatagacaatcatattataaaatatttatatatatataaataagttgcattaattttatccttatattgaaagtaagtatatataatatttaaaaacattaataaatgtagccaacaattaatttttcatatatatatacctttgttgtaagtattgatgttcgagtgatgaagacaaggatggttagcattacatactcggcatgtactctgcattttcatcctaaatttataatcaaacaataatatataattaatgaataaaataatacatgttatatatatatatatattatatatgatattttgagaaatttttaaaattatcttttatttataattttacaacttcaaaattttatttatagtattattttttaaaagttttaaaattacaaaaatataattttctttttaaaagtaaaaaagtaactataagataataagaaataaacttcacagcagctataaataaattataaaacaataaaaaaaaaccaacttcctattataaataaattataaaataacaaaaaaaaaccaatttattatttttactgacaaatatatttttgtaagtaaaaaattaaaaggataaaaacaaatgaactttttctgtattggtatattttaaaaaaaattggtctagtttataaatttctaata

SEQ ID NO: 404874 - DNA, 967 bp, Cannabis indica
tttgtcccaactttttcacaaacatacacatccatttttaaagaacacaaatctattatgtttgaaattatgtcttagttatgtgaggatgtgaggataatttaggtacaatatttataaaaagatgtatatttgaattaaattttatttggaggtaaatttggttaatgtataaaaaaattggtatttttcaacttcttccgagtaaatattattttggaccttgtgttttgtaaaagttactaattagattcctgatttgttaaataacaacattgaccttatattttctaaaataataaaattaggaccctagctcaatttttaatgattttattttttaatgtaacaaactttaagataatttctaacacgaagagatataaaaaatgtaactagttttatcataacacctttagatcggattattattaagttttattttgataaaaaatcaattcaggatcctatttgtaaaattttagaagatacatagtctattttatcatttaacaaaatagagggttcaattagtaacttttgcaaaacacaaagttcaaaattgtatttactctaaattagaagaaaacaagttggaatacatgaagatgggattggatatgaaaagttgttggattttatgccttaaataaaacccatttcaatataatcttatttgttatcaattgaagattagaagtcatttatgtttacatgtattattgatgtttaaggtttaatatacaatttctgttaaatctagaacatatagttattcacaattacagtgatgtcaacccggtggaaggtaattgtgattatatgcttcaaaaagattatgtcccatgattcatcagtgcactggatttacactgatgtgatagtcagcgataaagtttacttacaccttggataagtgttatgtcctttctaggatattggcaaaatatgctagtatcggatgtat

SEQ ID NO: 404875 - DNA, 881 bp, Cannabis indica
ctttagtatcctatgactccaatacatgtttcaatttcctccgttgttctaattgttattttttagtatttcagtttttttcattattgatgccttctcctgcatgtctaatgttttttcataaatgatacttaaggaatttaagagatgattagaagggtaaaataataattttaacgacctctagttatgaactaaaaattagataacgaactacttatatcaattatattaatatggactataagaaaaaatcctgtaaatataattttatattgtctaaaagtgtaattctatatttataatggagtaataataatattaataaataaaattattttattgatgagatgaatagtaatatcaagtttattggaacttaaaaatctatgtttacagggtaaggtcaatatgagaaataattatttaaggaaagaattaatttttcaaaaattattcttgagaaaataatagtaattttaaataaatcactattttgaatagattagcttaattatgaattatgaattaagtaaaattatgagagatgatattattttatcaaaaaataagataatgagtaaatttaatcaattagtacttatttgagaataaatagtaaattttttttaaaataaaattgagaaatttattttaggacaatataatatgagaaatttacgtcaagtattgtgtttcacatttttattttatttttacagttgaacgctatttattacatttttgttgcctatgttttatactgtgtactgactttttactaaaaaaatctgttgttccattttaacttatacatgttaccccatggattatttgtatttatttttattattttattgagtgtaaaagttatgatatga

SEQ ID NO: 404876 - DNA, 827 bp, Cannabis indica
atattttttctcaactttatcttatattatttttcttatcattttcttacattatttttcctctcttcattttctctatcatcattttctcatattattttttctttcctcactttctctttcatcattttttcacattattttctctttcaacacctttctcctcattttctctctcaccactttctctttcatcaaggttgggatccgagatttggggtctgggcctgaggctgggttacaagtctgagactgggatcgggttacgggctcgaggttagggtcgggttacgggtctgggttaggggtcaaggccagggtttaggtctaggttcagggtgaggcccgagttcggggctggggtgtgggtatgagtacatgtttagggtgagagtacgggtccaggtccgagtacggggtctgggtcctgggtctagggttgggatccgggtttggtttaagggtcgtggtttaggtctggggccagggccaggttcggagtccgtgtccgtatccgggtccgatgttggggtttagatcctgatcaaatcttgttcatatatgggtcttaagtgatgagtatttttttcaaataaaatgaaatgaaatgaaaaatatttttagtaaacattaaccatacaagattggtgttttgaaaacttcaaaaattattttttgttctcaattttaaaacaaaaagtagaaaacaataccaaacatacttatagtcgccttcatatttattttttaaataaaaattattctccttaaaatattactaaaaataattgcaaagatgaacatataatttcatatgtattatggat

SEQ ID NO: 404877 - DNA, 555 bp, Cannabis indica
ttttcatataagcggcattagtaggtttctctttgatcacaatcggaccagactagctcttggttacgcaggctcttcagacttgtatggacgccaggcgaaataccaggagccagggcaattcggttggatctaatgttggtcagggagctcaaaagcccccaaatgtatgtggccgaggtagaggtctcaggggcagggcacgtggccgaggtgacgttaacccgccacaggttgcccaagctgctcaaggtgctcaggatgcccaaaattgggaaaataggtttgcagcaatgcaagcccaaattgaggaacaaaataatgaaattcaacggttacgtcagcagggtgctcctgtaatgcctgctccagaaattccagtggcacctgcccctgctgttcaggccgaaccattggtggcagtgaatcggatggaacccctgtatgaaaggttccgcaagcaagcacctccagtttttctgggaggtcctgatgtcatgaaagccgagcaatggctattcgtaattactagaattctgaactttatgggtgtca

SEQ ID NO: 404878 - DNA, 622 bp, Cannabis indica
ctcttatgaaattaaatgacacagatgactatatttccgattttttatcccgaaataatataaatccacgatcttaaaatctcctacttgtatatgcttactttaggcaacttagacttagagttagattagtagtggtggtccaagctagaataattactaatgtatatttggtataaatttaagtcttttgactttaagttttagattccaaaaagaaatttaaatttcagtttcctagaatacattggaaaatacagtatgactttcacaagtttttaatatctattttctgtcaatggattcaaactgtatgtttatgtatggaatataagttttgtattctgtgaccaggatccacttggactattctaagaactctttagagtaactagacctaagtcatcaaaagaccataaccacaatcatatatctatggcatttacaccttgttcatagtggttttgactagatgattctctgtaaagagtaaatatgtctatatccatttgaaaataatttcatctatattcgaatatggatgtatattcaatggtgggtatgagttatcgttatattattaatacgatcattcaagattttaccttatgcaaagaaattt

SEQ ID NO: 404879 - DNA, 1044 bp, Cannabis indica
taatataatatttcaaattaaaaggataatgatattttttaatttaaaatatatttaatattaaaatatctaatcttacaattaaataatatgtaaatattaaagaaattaacaaattttttaaaatttggccatacttaaaaattaattctttaatttaaacctcaaaatatcaaaattaataataatctactaaataaattaaatattattaatttgtaaatttgatattaaagtttaaatattaaaataatattttattaagatattagggttttgaaatgggaataatccaaaattggtgaaaaaaataccaaaaactcaaatttagggtgcaaggcaccaactgcccacgagaaggctgccagcagccttggacgcgagcgcaggagggcatctgggaacgaatccgcgcgcagatgaccctgctagcagggtattacgcgcgcatcgtcgtgtctgaatgtggggcatcacgcggcttcagacagcacttgtccccttctcacgcgcgcacatcagtgccttgtccgaagcctggtgcgtgcgtgcaccatctcgacacaccttggacctgaaatttcaaaacaccaaaactctctcattttttatcggaatcgagttccgtaaaaacaaaattgcttaatttttcacaaagaatccaaataaattattttcatggaaaaatttcataaatcacataacatcatcaaataacacataaaccatcatgaacacatccaaatcaacataataaacatattcatcgttttaaatccatatttcatgaaagtaaatcattaccgtggctctaagaccagttgttgggaatattttactaggatcaagatttactaacaagtatgttgaattaatatcctaaatatgaatatctctaaaataatgaaattatacacataagagtttaagaaaccttacattgattgcaacagaataatataattccttccgctcagatctctaaccattgttcctttctgtcgcagtagtattataaagatctaagcctcgatctctttctct

SEQ ID NO: 404880 - DNA, 684 bp, Cannabis indica
ggaaccctgatgataaacagaaggctgatgctttcaggacatcaaggggtaacagaaagtttcggggaaacagaggtggccgtcagggctgcagatcttcattctgatcataccctgagtgtccaaaatgcacgaacaccatcagtgtgaatgtcaggccaagacttgtttccagtgtggcatggtgggccactttatcagagattgtcctcaggccaagaaagaagagctgaagaagaatactaattagaacctgggttgacttcttaccatgactcaggctgacgcgaatgctagtccatcagtggtgacaattcaattatctattaatggatgttcttacactgtgttgtttgattcgggagcaactcactcttatgtgtcgagtagagtaatataaagtttccataaaccatgtgatgtgtatgctttcgggtttggtaccctgttaccttcgggagaccatatagtatccactaggtggattcagtccttgtccttttggattgacggttgtgaataaactaccaatctaattgagttacaattgtcttatttttgacatatacttggcaatggattttatgtctaagtatggggcaacaatcgactacaagcggaagatggtggtgtttgaacctgatagtgctaacccagcagtatattgttgggttttatgctcta

SEQ ID NO: 404881 - DNA, 548 bp, Cannabis indica
gtaaaaatgtttgtaatataactaacgtaataaaaattagttacatgaaactaacttaattaatttaacaaatatatttaactaattaaataaaaaatatacaattcaaatgttatataaaactaattccttaataaaaattataaaatataaattgacatatatactcataattttctttgttgctccccttcgactatcataatttggtcgagggtataggggtacaggtcaagcactacaaaaaatagctacttttagtgacaattttagtcacaacataaatttttttgtgactaaatgtgacttttggttacaacaaaatactacttgtgactaaaacatagtatttagagacaagttgtcactaatttacttttagtcacaacaagtatgtacattaattaaacacaacaaattgtaatttttgtgactaatacctttggccatggaccttctagtcacaccatagaaatagtttttaataattagtaataacttttttacttttaatcacaagttttgtttagactaaaagtaagattttt

SEQ ID NO: 404882 - DNA, 693 bp, Cannabis indica
aaatgtggggcccacacatgtgtgacctgaatgggcatcatgcacatgggtttggtcatagtaggtggttggggggggggggggggggggaaggggtgttttcgtcaaatcacatggcatagtcataaggaggaggaggcttatgtatgatgagcacatcacagctagataagccaaaactccatttgtcagtctctcactcctgccacgtgacaccaccatgaaacacgtgcactaaggctgcctttatctttactttgacactaacatgatttcttttgtttgggttggccttaataataaataaaagaggagaaaaaagaaaaagaaggcattgcctaatggaaacaaagtaataataacaattagatgcaaatgtgatgctaaacttgggaaattttgaaaaattgtatggtgcatcttctaaaaatgaataattacaaaaggtactattttttataaaatatttatatttttacgttcaaaaaatgtttttttacatttttacagtttttcaaaaaataacacgaaaacaacataaaaccaacaagaaacataaaagtaacatcaaaataacatcaaaataacaacaaaaaaacaacaaaaaataacatacatataacaaaaaattaacaacaaatgaataaaattttaacataaaaagaccgtattttatgtaaataaaatcaaaaa

SEQ ID NO: 404883 - DNA, 911 bp, Cannabis indica
aaaatgtgactctctgaaggcccaacatcaccttccaccgcttccgagcacaaacacatgaattgaataatttacataaaatagcataatgaacatatatgatattaaatatatttccaaaatatgcatttcataaatattaattaaatctcatgcataaaccctaattattcaataatccaaaatattaatcttaggcggtatttacaattatccctccgttaaaaggatttcgcccccgaaatctaacctgaacaactctggatgctgagtcctcatatcagactccaattcccaagtggcttcctccactttactattcctccagagtactttaaccaacgctatggttttacttcgaaggaccttttccttcctatccagaatttgcactggtcgttcatcataagacaggtctggttgcaactccaatgcctcataacttaggacatgcataggatcggacacgtatttcctcaacatggaaaaatgaaatacattattcacagctgacaatgatggaggtaaggctaaccgataagcaacctgcccaaccttttcaagtatttgaaaaggtccaataaatctaggacttaacttgcctttcttcccgaagcgcctgattcctttcattggggacactcgcagaaagacatggtctccaggttggaacattatatcccgtcgcttgggatctgcataacttttctgccttctttgcgaagcaagcattcgagctttaatcttgtctattgcctcatttgttttctggaccaactcagggcctaagtatttccgttctcctgtttcgtcccaatgaattggggaacgacattttctgccatagagcagctcataaggagctattcctattgtaacaccctaactaccttaggcgtattacgtgattt

SEQ ID NO: 404884 - DNA, 750 bp, Cannabis indica
acataagactcaagggagactagaattttttgctctaaaattggatatgagcaaagcgtttgatcgggtagagtggaaatatcttgaagcagtaatgttgaagatgggctttgcttctaaatgggtgtcactaatcatgaattgcatttgcaccagttctttctcatttttactaaatggggaagttgtaggccatgttcaaccatcctgagggttgagacaaggagatccactatctccttacttattccttatttgttctgaaggactctctcgacttttgcaatatgaagaagctgttggcaatttagaaggtttacggttaactaggcattctccatctgtttcacatctcctctttgctgatgatagtttgttgttttgtcgagctaataaccaatcagccattgcaattcaaaggactcttgacacttatcatcaagcatcaggtcagatgttaaacaataataagtccgtgatgtccctctctccaaacacagctgatgtcaccaaaaatttctttgctcaaacgttgaatatgcctatcacggaatgtcatgaacggtacttgggtttgccttcttattctggtagagacaagcaagaactattcagccatatcaaagaaagagtttggaagcttcttcattcatggaatgaaaaaatattttcgattgggggaaaagaagtgttactcaaagcagtggttcaatcgattcctacctatgctatgagttgcttcaaacttac

SEQ ID NO: 404885 - DNA, 848 bp, Cannabis indica
aacacttaatttctatgtgtactaaaaatttgatttggttagttaatgcaactcgttcttatgatttaaatttatttatatgttaagaatgctcttatagtggtttcgttttttttttttttgttttttttttttttttttaatttaactagtttttatgtttcaatgtatcattttattgttttaagtttcttgtattaattaggtaattgtatttggtaactaatttttgtatttaatttttattttagttatttaggtaattgatttatgtaagttaatttttaatttaattattttacgtaactggtttctttatatcaaattttgttaagttatttaatgtaacatgtttttgttatttaatttataagtcattgttaaaaattattttatggaatgtattttttttcttttttaagtaattggtttttgtaattaatatatcttttcattactttaggtgtcatatgtttgttcactttttagttgattgtaatatgaaattagttttgtattaaattattatttttgttattataggtaactgattttaagatttagtttttaatttggttaatttacataactagtttcattgtctcccgtacctaataaggtacgccgccaagtatatcgcatcatctaattaggtgagcctgtatatcacattcatggtatcatcacattatcataaattaatcaatcaatcatttcattatataacaataataatcatatcttaatctcaatatcaatcgattccaaataatattaattgtattacgatataacatgctatgcagtacaatatacttttcttagctttaatctaaattcatgcatgt

SEQ ID NO: 404886 - DNA, 355 bp, Cannabis indica
gaaacttagtaaacatagaataattcagcgagcgatttatagacgaaaatgatgattaggtacctggacgaataatttaggagtgtacgttgtttggtttgttcagtttatagtacattttattcaaaggaatatactatattaggaaactttttacaaaaataacgttaaatatatatcaaacacataatgacgtgacacatcataatcttcttcacgggaaccttcaaactaaaatcaactgctaatcctaaaagcaggaatcaagcgagtgattcacagtctacatcgaaacatataaattcctcaattttcattttaaagctcattcgaaacaaaaaaaaaaaaaacctaa

SEQ ID NO: 404887 - DNA, 906 bp, Cannabis indica
tgccacgtgtcacatgctaaaaaataaagataacatctttagttctcaaatatttagtttctaaaaattttggtaaacagtaataaaacttaaatataatactcaatattataattttataattaaaattattaaaacatgtaaaactaacgttatatattaatttattgatagagtgtgatataaaaattaaaatatttataggtaaatatttaaattctaataattcaaatatttttatatgattatatataaaatattattgagatgttatataaatataactaaagcaataaaatatacttataattttttttaagaaaaacaatattataatttaattattgtaaaaaaaaagtaaagcacgaatttgagcccatatctaaaaataagctgatctatttaagaaatacagacagcacgagcaaagcccgacacaaatccgagcatggcacgaaaatatcaggcatgctctttaaaaatattggcatgacacggtacaactcatattttcttgtagcatgacacaacatgacacgtatttttgaaaaacacgaataaatatgaaattcattgtaaaaattagtaactttgtaaattataatatatatatatatatatagtgcaatatagtttgaatagcaattattgaattcaaaactgttaacctcatcacactacacaaattagcaaaaatacaaataactacatcacaaagaacttcaaactatattttttgtgcataagcttatggtattcatctcttcactcttttttaatcacgaatgaatactttagaaacaatggcagaactaaacaacaaaataaggaggggccaaataaaatatattttcacctaattttttagtatgtagtattttataaatcaatataagaagttaatta

SEQ ID NO: 404888 - DNA, 730 bp, Cannabis indica
ggtcacatatatgatctaaatggataatttttctagcgcaacgacttctagcatccaatgtgcactaaacaatatattgggatgtatataagatagtataaaataatttcaaattataatatagaaaattaattttaaattatctcttaagtagtatttacccgatattttaagaaataaagaacatttggtgttggctattcatcgatgataaccaatgtgccaatccttttgatgcattcttaaaaggctatgccttctttaaatcattcctaccattcactatgagaagctctgagtcgtaaaactttaaaatttgtctcatatcatgtaatccctcccagatgtgtctgcattaaattgttaaatattagtgttttataataatttcaatagattttgatatataagattaattagattaaagaagagtatacattattctaaaaagtattccctggttgccgatgaagtcaaacaatgccatctgcagcaaatcttttccaaatattgtgatctaggtacgaggcgctatgaattcatgtggtactcgaattgggattgttgtattttctccttgattctcaaaaattcttcaacatctatttgagtgccctagggattaatgacatgaactctggtgtgaataatagatctgcttgatcatcatcaggtacattcatatttgaaaatgattcgcaaaccatttatattttccttttggacaaag

SEQ ID NO: 404889 - DNA, 730 bp, Cannabis indica
ttattaattttttttttttgtatgattcagcaaatttttcattactccaaaaataactttacaaataaatagcatataaaaataaccactatactaagtatatttttctctttttttttttacaacttggagagttcgtgtctataacattaattttcttaagccagaaataagtaattctacttttaacattattatttttgatcttgtttatgatcaaagattctttggctttacccgaattcctatttcatttctataacacgccaaatttgatacactaaagctatcattgcagccacatatacttgtttacaaagtacttgctatatttggctccaatccattgaataagcttgttcaaatgactcgattctgccctccaagagagcaattattattattatatttattattgtgtgaattcaaaaattaactaactaaacaacttgtgtttaaaaattatattttagtcgtaagtagttttttattgtgagcaaaagtcacatttaatcacaaaaaatttaagttgtgactaaaaaattgtaagtaactgttttattagtgaattataacaacaatagttaggattaataaaaataagggataattacataaggtactattttttgtaaaaaaattatatttttacatttaattgattttttttttttaacatttttacaatttcccgtaaaaacaatatgaaatcaacaagaaaattacataa

SEQ ID NO: 404890 - DNA, 626 bp, Cannabis indica
gtactatatatatatatatatatatataggtcaagatataacgacatgattcaacataaaataaaaaaaattgggtgatatgttttataatggtatcatgtctgtgtttgaatttaatttttaataataatgtcatgtttatgtttatctaataatcatatcgacacgatagcataaattaaataaacatagctaggtttctatattttctttagaatttttgtgtttatcttgataatcatgtcaatttgaccctaattaatcgtatcattttagtgattaaattttcgataggtttaataaatgtatcatattcgtgtttatcttaatcatattatattataatcatgtcgattagggctaaacatttagacctaaaaaaatcttaaaaatccactcatctaacttgactcgttccccaaaacctatttaatttgagaacttgtatagcatcgaatcgggtgtcttttgatctatacactatcgaatcgagtttggtagaacatgttgaacctgttcggatcccgtgtgaacctagaacccaaattaaaataaataaatgaaatctttattacttaaactaaaaattagatctaatttcaaaaataaaaaagtaaaaaaattaa

SEQ ID NO: 404891 - DNA, 629 bp, Cannabis indica
aggcactgcaagctatggtttaatattcaacaaaactggttcaaagatgaaactggaaggatttgttgatgatgactatgcctgcaatagagacactagaaagtctataaccagctactgcctccagttaaatgaatgctgtattagttggaaagttcagctctaacctgtagtagctttatcaacaactgaagctgaatttatggctactactgaagccttcaaggaggcagtttggctaaaaggaattctgagtgaaattcaaatgaagcctaggaaagtaactgtgttttcagacagtcagtctgcaattcacctttgcaaaaacccagtctaccatgagaggtcaaaacacatcgatgttagattgttttggatcagagataagttagaagaaggagaagttgaactggaaaagatccctagtgaagaaaaccctgcagatgcaggtaccaaagtcttatctgtcagcaaattcaagcattgcttggacttgctgaacataacttcgacctgagttgactggtataccccctttggtctgcttcaacttgcttgctttgtttggattaaggtggaatatgtaggtattggtaatccaaataaagaatcaagttgtctaaattcag

SEQ ID NO: 404892 - DNA, 1063 bp, Cannabis indica
atatacaatatattaaaatgtattgttagtttataattgttataaattatatattttgataattaataattaatatatatatataaaggagaagtatgagacgatgatatggcattctaaaattacactaaaactattttttttattcattccttaattctctcaattttaatattttgttaaagcataaatctacaaattgatattttactattattttaataatttttctatataacaaaattataaatctacaaatcgatattttactattatttaataaattttctataaaagtataaaaaaatttaaaaaaattagaaataaataaataaattctaaaaaaaaaattaatttaaacttaaatcaaatataatttattgtaaattttatatatatacatacatagaatatcattcatctatataccttaacgttttttaatttttttaaaaaaattaataataataacaataatagatttataggctgtacctcctgatgcaaatcgagcttactctattaaagagggttacgaaacttctatgtccttcttatccaagaactgattggcagggaagagtgtggaactggctatctattccaaaacatcaaataattttggattagtggtgcttgacagattaaaacttaagacttgtcttaatttaccatttcaacatatgcttggatgaaatttgtcgaatgtgttggttggataaagaaacaaaggaccagcatgtatgtttcaattgtcacttaactggaattcagctaacaacactgttcagggactattgaagtggatttcaaaatctaaaatcagtaagtttcacaaacaggtttttttcggtcaactttggctgctgcaatatgccatgtttggaggtgtacaaatgaagcattttagaacaacaaagtatatataattgactcgattgtaaagagagtaaagagtgatgtaaagaatagaattaaaggcgtaatgcctaagaagatagctcaaaaagatagagattggtttcaaatattgagtttgttaaatttaaggacttttgtctaa

SEQ ID NO: 404893 - DNA, 1039 bp, Cannabis indica
tagaaaatcgattttacagactaaatatatatatatatatatcgtaatattttatttataataaattataatattaatggtatttaaatttatttattaatttaaaaatgttattcaaattaatataatggaagggaataactaatcccactcttttttaatgtatcaacattaccctcctcaagggtatttacattaccaagggaatgatattttaagattaaaccttccaaacaaacaaggtaatgtttaacattaccattcccttgctaacattaacctattccaaacaccccctaagtaatactattttactgagtgaccaatcacacgaataagtattatctcaaaaaaaaaatcacacgaataagtatgtatgtgactttattcattacttatatataatctatttataaagaagaagaataaattggtggcagtttaaaattattccaaataattttatttattttctctttaattttcttattttttttcattattttattagttttataaatattaatcaattaattaattaattaatttttttaaatataattcaaaactatcaaaatttaatctaaactaactcaaatatatatataaagataactccttttttttaaaaaaaaaatggtagggttaataagaatgtgtagctaaccacttacgttcttcaaagattcatttgcactagaaggagatattagaaaattaataataaacccatctattaatttgtatataatatagaacacgattaacaatatatattaattatgtatatgcgtacgtgattgatctatagtaattactgtaatttgatagtgcaatactatcaactatgtctttctccctagatctctaaatcgacagttttatttatctgattatcaaaagtatacaattgtgattaaacaatatgtatttatggagttaggaagaaaacttagctacataaccctagttggtatgagcctgctcatcaaaggtttcaattaattagaaaagctcacacttctgctttacctagact

SEQ ID NO: 404894 - DNA, 547 bp, Cannabis indica
ctcagaatcagcgagtgagtactccgtcgagcctccatcgtgtaaggggcctagggccagatatctccctcggaattcgcacctggactagactgttgtttggaactgagcttctcaacgacggatttgcactcgtgagcaagcttggcaaatacaataaagatttcgtatttgtaggggttattgcgaatatatattctcacaataacgatttagtatttctgtgtatagtattttaacttgtcaaatatggaaaacgcatatatatacattatttttttttttttgcttaaaggagaatattatgtgaacttatactgtatttgtagtcacatagagtcgagacaataagtatgacactctctaaatgacaaacctttatatgtttagaattgtaagattaattaaaaaaaaataaagatcaactaattttagtttgcttctgaaaatttagattctggtagataataaaagctaatgtggttataaaaaatattaacgtttgtaagtttccaaactcaggatgaagggagacatttagcctagc

SEQ ID NO: 404895 - DNA, 617 bp, Cannabis indica
tgttctatatgtttgtttgttcacgttcaaacttgttgggcccactcctactacttattgggcccccaccaagttgggatctttcagttcattttactgaaataaggtgatgttttatgtacaaaaaaaaaaaaaataaataaataaagtgatgtttattttgatgtaagataatagtaatataatggaataagaatagtaatcaaaattgattctgatgtttggtttgttgttagaatgaatatttaaataagtgataaattgataaaattatcctcactttattatttaagattatataaagagaaagtattaaagttattttaactttatagtataatcatgattctattacagttaccattataataaactagatataaccaaagttttactagttacaatcaaataaatatacatttttaaaaaattaaaaattaaaaaaaaataataggagaattactccatatactttttttttgatcttttttttttttcaaatttacagtttggatttctaaagtagttgcagcgctagttgcaataggagtttttatgtagaattctgtaaaaatatcaaaaaaaaaaaaaaatttgttttaaaagtgtaaaaataa

SEQ ID NO: 404896 - DNA, 572 bp, Cannabis indica
tatatatacatatcaacaaatggaatattttaaataacttaaaacactaattacactataaaacattattaaaaaaacgttaggaaaattatatttaaaaaaatagtaaatagaggttaatgaatgaatgagaaattgtgaaaacaagtgaattaatgcgaaaaaatctcacaagatttgtgaaattaatcataatatttaccattaatttttgaaaattaattggaatatttactattattttggaaagagtaaattgcggcataaatacttcagattttatacatgtttattttggaggcaaaatacatatttttttaaaaaaaaaataagagaaatgcaatactaaattaccatagctaagtgaagtgccaatatcatgtgaaaattgttatgagaacattctaatattaaaaatattaagttttaaaataaaataaaaaataaatgtaatgtatctgaactctccacgtgtctatatttatgaattaatggaagtggtagtgtaaaaaatctgaaacatttggtattttatgccgcaatttatctttttgggaaattgcatcatttac

SEQ ID NO: 404897 - DNA, 568 bp, Cannabis indica
gaaaaattatatatttatacaaacataaatagttattatattgccgattcaaaatagatttttttgaacatcattatactactctttatcccttcccttgatagtatttcaaggtggcgattcggggactatggaactataattttaagttccaataaacaagattatttattgagtctcatcaaccaaataatttttgtttattaattttatgattactccactaaaaatatagaattgaactcttagtgattatagaattatatttattgcgttttactgcattgttctgatataatcaattcaattgattagcccttcatgtgttggttcgtaattatttttggtcaaattactattttacccttctaattacttctttatcctttagtaccattagtttattagtggaagtataattcagaccccatatgaatttatgcacaactttccagtactagaattaacacataaaaagaaccaacactcaatccattaggaaagttagagttccacaattatagatcatgtttccagccatccacgttattagattcctaaaatagaa

SEQ ID NO: 404898 - DNA, 628 bp, Cannabis indica
actgaatgatatttcgatcatcccccagtagtcgagcaagcctttgagctctatctctaagagcaagagtgaagggagggcggtgatatgtggagatctgctggaaccgagtatgggtggtgcccatgccttccaccatgaagtactcgtcaataaaatgcccaatcttgctaacggtcttatccccggtacccgtcaatcacttgaagtctggttgagagaaatagaagtacactgatctgccttgcttaggggtggacttcaagttaaaaaaccagcttacctcatggggagagggcatatcccatctctgggaggcatagagaacgaagagggcggacaaatacttaatgccattgggagtaaattgggtcggatagaggcagaagaattctgccacattccttatgtacgggtgcaaaggcaacaatgcccctttctgggcatgagcacccgaccaggcgcacattcccctttcagggtttgtggcctgattattgttggcgagaatgtaacagtccaatttgcccaagtagccatcctggttgaaatcctgtaggcgcgcctcagtaaccttggacggagggctcacccacctggcacccaaagtaccttgccttctatgagg

SEQ ID NO: 404899 - DNA, 532 bp, Cannabis indica
gtgagtctattttagtaagcgaccagtagtttataaaaattgaaataaagtaaagcaatataaagacacaggaattttatagaggttcagccccgagcagttcggtaatagcctaatcctcgttatttgtactaacccaagaacaaggagaaaggttccttttcttatagctcttacaacaatatctttgaatatcaattcttagacaatatctctcaactaaaatctttcgacccttttcccagtgaacatgcatcactatttatatggctatgagcttggagagaaagtatttcccttctcgttacaattgatataagcagaaagaatgcatagtaaatgcagaatacactgatcgtgggatttggacagcctcccatatctctgtaatctgatccccaagttatagggatttctttgaagactcacgatgcgaaagctaaagtcgctaagtgtttgtcgttctgtgcggcttgctgattgctttgcctcgagcatgcatatgaggtatcctattcggactatatcttgc

SEQ ID NO: 404900 - DNA, 537 bp, Cannabis indica
gcagcttgattgggcaaatgagatcagggagaataggctttatcctgttacgctaataattttagagattactttatataccacattgcatagagagatgggcctaaagtggttggtgcgggtagggttttttactttaggtataagaacaacattggtggcatttatccctctatgcatgtttcctgaaatgaaaaagtctgagaccgcatcacaaaagtccgctccaactgaataccaataatgtttgtaaaaaaggacagacatcccatctggacccggggccttgtggttatgcatagcaaaaagaactcttttgatttcctcattactaggacaactgaccagggcctccgagtcgtcctgggaaagcttccgaggaaaaagctgggcacagttgtaatccacaccaatatccgatccagagaagatatccttgaaaacatcaataaattctctcccaatagctccccgatcggagatccagacattttctttgtttaagatactctcaatggcattccttctacctttaat

SEQ ID NO: 404901 - DNA, 816 bp, Cannabis indica
gtacaagtatgtttatcctttgtcatttttatttcaatctagttatgagcttctaatctttattcaatataattaagatgatgatgaaacaaaatgtaactagataggatttatttttgtatgttgatttcctatttatgctacaaagttcatgaatttttcttataaaaaatatgtcgttttcatcttcaatatcatatgtttttaattgttaaaggatatttctacttagttcttcattatgcaaaaatataatactatttgattcaatgtctttcattaaattgtttacatttaattctttagaatataagtgttatattttgtcaacacatagtttctttaattttagtgtagtttctttaaattgtctacatttgatgcttaaaaattatacattttataagtgaagaaaaatcctactatttttaaaaataacttgtgcttattgagaaaatatattgtgaaaaatataatgtggtttatttcacctatatatgaattgggaatcaatatacttaatactattgaacttgcattttgtgcattaatatcttaataatcttattttacacatcttatttagaaaactactttactttcactcatctttaatacttaaatccttttattacttgtcttttattatatctttgtaaactaaagtctcatcaaatatttggaattaggttagaatattcttcctttgtttgaaaaaagtttcttttgatgttagtcaactcccatgggttagacctcgtacttacatgaacattatatctcgaaacgattcgtgcacttgcgagtataaatatt

SEQ ID NO: 404902 - DNA, 603 bp, Cannabis indica
gaagaagaagaagaagaattaggaacgataagagtgtagttgtgtgtgagagagagattgagagcttgctctatgataagcttcttatataaatctttcagaaactcccactaagtttgtgttcttcagtttctttggtctcaaagtgttgactctatctctaccgtacttcaaagtccaccatctttctccaacttaccattttctgttactgatttattttattattattttaaggttgttttcttttatttctttatcatatttttctaaatattattgtactgctctattttcaatagtaatatgaaaataataaaatttatatggaagttattttcttcagtatcctatgctccaatatatgttcaattttcttctgttgttccactattgttttttagttgttctgcttcttttcatttttgatacattctcttgtatgttttcttgttgtgccacagctccccacatttgctgcatttgtcatgttgtttcttttcccaaccaacttccatccttctttttttattttgtctttcaaatttcaccctttcaatgggaggtaagattattaatgtctatgattctttcattctggtt

SEQ ID NO: 404903 - DNA, 523 bp, Cannabis indica
gttggctgttggctcaagagaattggtttgaactgctgttgtttgatgctactgttgttggtagcagtgtttgttgggtaaagccgcctgctgggaagctgaagatcaacacggatggggcgatttttgaggcaacagctcaatatggtacgggcatggtcattagggattgtcatgggaagttaatcgaagctagttcctctttgcattctggggcttgtcagccggctgtggctgaagtattgagcgtcaaggaggcccttagttggttgaagtcgaagaatttgtccaatgtgctagttgagacagattgtattgctgttgttcaagctcttaatagctcggttgctcttccatcagtttttggtttgtttgttaggagtgtcaattgattctttcttctttacataatgtttctatttgtcatgttaaacgatctgctaacaaagtcgcacattgtgttgctcgcggtgcttgtttttggtctgatcgtctttttactgagagcaatgttccttctgct

SEQ ID NO: 404904 - DNA, 439 bp, Cannabis indica
agcgtgcgcttcagacaaaattttgttgaatccgcgcgcacaaggagcttcttgtccgagttcttggtgcgcgtgtgcaccatctcgacacccagggatccaaaatttcaaaacaccatagctttttcaatttttatcggaatcgagttccgtaaaaaataaaattgcttaatttttcacaagaagtccaaataaaatattttcaaaataaaaataaaattattttcatggtaaaatttcgtaaatcacatacattcatcatataatcacataaaccaacatgaacacatccaaatcatcatgcaaacaagattcattgttttaaatccatatttcatgaaagtaaatcattactatggctctgaggccagttattgggaatattttaccaggatctagattttctaacaagtatgtagattaacatcctaaatatgaa

SEQ ID NO: 404905 - DNA, 503 bp, Cannabis indica
gtacttcacggattgtaatccgtgatgtacgacagccgtcagatgagggagttatttgatctaatagctgagattgatctaggggtagttagggttaaaaagtagaaacgtaccctaacactcatttaatgtaccctgaaactaatctaatgtaccacggaatacattccgtgaaaatacatcacaggacaaaatcatatccctatatatgttatgcagattcttaatatttctcttgttataaaaatttcataatgttttactaataaatagatattgtttgagatagaaaagactgaaggtgataaatatatgatagaaaaggtttattgatagaagcttattctattcctaatcactactcaggtggcgtttggttagaggtaataaaatggaatggaatgaaaacaatttttattctattcctttgtttggttgcattttaaaacattggaatagcattccaatggaatactctttccaccattttggtggaatggcta

SEQ ID NO: 404906 - DNA, 521 bp, Cannabis indica
aaaaaaaataataataattttttgatgaaaaactaattttttgataaaatcatcataaataagaagaaatactaataaaaaacttaaaaactcatattaattttacttttatataacaaaaaccagtttcatgacgaggaaactagtttcttaataaaaaatcagtttcttaatgaaatcgtcatagatatgaagtaataccataaaaatttaaaaactcatatataaatttaatttctatataatcaaaactagtttcttaataaaaaaatcagtttcttaatgtagtttttttgattaaaaaaccagtttatggaatacaatatctttgatttctttagtttatgatttagaaagacatttacaataatatgacaaatctaagcctataaaaaagaaatttttacatgaaaaatccattttgcacaatttattacctaaatacctctacacgcctatgtctacatttttacttacaaagttggttttattacacaaataccacttagtcatcattccat

SEQ ID NO: 404907 - DNA, 570 bp, Cannabis indica
tcaacattacatatgcttgggggatctcgattttaggactatcaatatgtaaatgcctttttaattgtagaaattggaaaacaaattcgacatcaaaagttgcatgtattatttatgtgtttggaaactaattcaatcatgtatatatgcaatgtgcatgtattacaaattatataaacataaatgtgtggtatagttccttcaaattaaaatatttccaaaagttagaaaattagatgttatctgaaaaggtatttttcggaagtctaacttgtccatccagaaaaaatcttgtgaaatgatagatgtcgtctgaagggcgttcttggaagtctatcatgtccgttccgggtgaagtcttcaggaaagttagtgcatgtttggcatcataactaaaaaactgttttttgtttttataaactgaaaattgtttttaaaaacaatttagcttgtttggccttgttttttaaaaacaattttcagaaaacaaagttacaaaaaacaaaaattttgaaaacaacaaaatgttgttttttttaaaaaccaattcacttttggtcaatattgttt

SEQ ID NO: 404908 - DNA, 627 bp, Cannabis indica
cattggtgtcgtggccatagtcttcctggaatcgataaaaccttgtcatgtctctcttgctgacatccttcttcatgggccagggcttcttatacggggctagcgactgagtggccatgtaaacactttctataccataagtcaagatggtaaatgcagtgtactttgcttgattctcccgggcagcctgctcggttttgccggtgaactttcccttcttcccattccctcacctgttgttgttgttggaacgtttaccatttgagcatgaattatttgggtaatgggggagttgggtggacgttccagtggaaggagcttttgactttccaggcttttgcttgcctttttcctcgctgaacagcctcttcaagtttgatgaagccttcagaatggttcagaaaaatcactcattgagtctaccgggccgttcttccttatgtccttccaaagttcaccgaggacttcaatgcccccagtattgcggacaactttccatgagaccttggtcgcttccgtcatgaatctactgatatatgctcgtagaggctcgcatggtctttgcttgacttcgaccaggtctcctaaatgcaacggaagttggcgagagtgttggaaattatttta

SEQ ID NO: 404909 - DNA, 1137 bp, Cannabis indica
gaaggtgatgaataattactaataatgttagtgttcttcaatattgtctcaacttttctttttgataataatataccaattgatgtgatgatatatgtatatgataagaaagtaagttttttaatctcctttctttatctgtgttattgaatgtgatcataattcataaaatggaaaagatatcaaaaacttattattattattgtgagatcatttagtacatattatagcatatatataggggtagtaagttatgattggaaaaatatagtgcacctccaaaaggaattattcaaatatacccttttatctatttttgcatttaggaaaattttttagtcaattttatttttcataatcctgtgttagtgatttgtcctaatacagaagtgcatccttgtcagcagggagttagttttgttagttgacctcctccacttttagactacctaacaaatacctataaattacagaacaccactcactctatagtaagcagatcgagttaaatccgagcctcacttagacacatctctctcttctccctactgttttttgtccaagatttgtgtgtgttggagggttgttaacaggttctttgtgtgtttgatcaatggtaactatgtgttaggacttgatttgcaatggtgccttaggctcaataagcattgtatacacagattataatggtgctaattatacttaaaaaagattcacttttcaagctaagttctatttctccattgttttaaattctgtttgtctgttttgattgattggcttttttgaattgtcactacaaaatatagatacatatagtgataatttttagtcaaaacattaatgttttgtgactaaatatgacttttagtgacaacaaaaagttacttgtgactaaaatatattatttatttatcactaatttagttttagtcacaacaagtattgtaactaaaaacacaattagtcacaacaaattgtgatttttgtgactattacatttagccatagaccttttagtcgcaacataagaatgatgatttataattagttacaattattttacttttagtcacaaattttattgtgactaattaaaagtaatttttttttgtagcgtgtgttcttgatatcact

SEQ ID NO: 404910 - DNA, 550 bp, Cannabis indica
ttttttatggcataaataaatagcacaaaaaaacataggattaaaaaataattaaagtttaaaatataggaaaaacaataaataaatttgataaaacttgtaataataaggttcgtcggaaaaatcattgggaaagtcaccgacgccagaaaagttgctggaaaagtcaccgtcgtcgaaaaaaagtcaccaaagtaaatgtctcagatataaacaaaaaatagaactggctctataacataatgaataaaaataaataattcaaaccggttagactgaaatataaccagttctgtaacataatgaataaaaacaaattaataactcaaaataactcaaatcagttataattaaaatagaatcggttctataacagtattataatgaataaaaacaaataacacgaaataactcaaatccgttataactaaaatagaaccgattatataacataatgaatacaaataagtaacacgcaataactcaaaccgattacaattaaaaaataaagaggaaatcagttcctgaaatactgaaacataaattaaaa

SEQ ID NO: 404911 - DNA, 843 bp, Cannabis indica
gcagtctttaatcatggatatcttcttatggccttgacatgtaagtatccgaatttacttttctttatgccaagctgaagtatgtctgcacctgacttagaagcaggtttagtagcttattttctaagcattacaatttttctgcataagttctttatgctaatttgatgcattgtacggtgtgggtgccctcaagtgagcacgtagacttacggtctcttggtcacttaaaatttaccaagtttcatagatcttgcttgggaattttcttagggtgctacatgttgtacgcatgtggaactggaaaaggataactttaagaagttaatcttggtagtaagtggtttagacacaataatttgaacataaacatttttttttcattcattatttggtctttattgttgtccaacttacataaattgaatctacaagcttacatataacacatattttcttctagattgttagtgttattattttgtgacagtacaagcgccatcaacatctctaaaaaccctgtgcagcactctcggaccaaacacatcgacatcaggtaccactttatccgagaactagttgagtcaaatatgctgtcaatatctcatgtgcccacaacaaatcaattagcagatttgttcactaaagctttagatactcaaacttttactcatttaagaacatgtattggtctctgtaccatctaaactgttcttagtgtcatctgatcaatctattttgcctatgagtatgcatgtatgtcacagttcttcagcaatggttcttctgtccttccccatctactatatactactttgattgttactacacttgaatcttccc

SEQ ID NO: 404912 - DNA, 743 bp, Cannabis indica
tcctatggtcgcatctctctgatcaccaagcccatcctctctttaatgccgacatcagtgtgggtctcccatggcctggttttcctaatctctaggtacactacgaggattggtggtgtgatagttgaatacggtataatatagctgtgactggagcacgctagctgatggagaatagctctggtgtgtgagtgcctaccttttaaaaaaaccaagaacaaaggtataggtgtttctaggtgtggtttagtcttttcaaattgcagcacacattttgcttaagtgacctttgatgcaatggagtgattggatttggttaaataattattttgctgtattttatttttcattaggctctttaactaattagtgtccaagaatgttttttaatttgagaagggaaatttcattttttgcccttaataatatatctcatatcaaattttataccacttactaatttatacaaaacaattccactattttcaaattctacccaaaataccccttacatttaattttcccactctctctttcccactctctctttccctctctctctgtctttcccactctctctccgacttttcctcttcgtccctgcccaaaaacaaaacaaccgaacaacaaaatcgaacccgacgacgacgaccacgcatacgccgaacccaacaaccctcttcttcccactcgatttttccctctctctctctatctatctcggtcttgaattcgacccgtgc

SEQ ID NO: 404913 - DNA, 894 bp, Cannabis indica
cccgagtttgagggaggcatagacccagtggtggctgaagagtggatgagtcgcatagaaaatattttgcagatgctaagggtcgatgggaatgaccgagtgaagtgtgcatcatacatgttgaggaaagatgctcgtatctggtgggaggtggtggaacaaacaaaggatgtaaataccatgaactgagatgatttcaaaagggtctttaatgagaaatattataactcagcagtgttagcagcaaaggttgatgaatttactggattagcccaagggagccttactgttacagagtatgcacaaaaatttgatagactggcaaaatttgctccagatttggtacctactgatagagtgcgagcacatcgatttgtggaaggcctgaaaccaatgattgctcgggatgtagagattgtgtcaaggggtcaattcagttatgctcaagttgtcgaaatggctcttacggctgagcgaagtgaaaacaaaatttggaaggaaaatgctgctaggagggaatctaagaaaggtggagccaattctaatgaccacaagaaaaggggacaagatcagcctagacagtcaacggtacaccggagttggagaagacgactctgatccgacgcatgggggctgttattttgggtagtttttgatcgttttgaggtcgtaagcactctgggaagcttttccaatcgaaaggacgcgtcaagagcaatcagggacaaagtcacatcttgtcgacgacgaaaccgacgtgaatgccggcggtcgcgatctgggcatatctgagaatcttgttctcaacaaggatattcattgaggtgcttggagtagcaagaaggtgttcttaacaattgaggtaagaagagtggacatctgtgcacagggtgt

SEQ ID NO: 404914 - DNA, 775 bp, Cannabis indica
actataaatttttaaaactagttaaaaaaaatatttttacattttaaatttttcaaaaaacttttaatttttacaaaacttttattattattgctcttaatatattttcctaacatgttgttttatttatttttcttaaaattttaaatagttattttttatttaatttttttaaaattattattatattttttagaactttaaattaaatatcatgtatcacaataacaattatataactaatgatatgtatatgtgcacataacactaatctaattaatataaaaaggttgtataaatacttaatattttatatacttatatattaattattttcttaataattaaacatcaaatgttatattttacttatttctacttttgttgaataaaagaaaaaataatttgtacgccccgtgttattgattatgtcagatattttattaaataaaaatattaattaattttaaacaaaagaaaaataattcttttttgtaaatattctttaggttttttataaaagtattggattttgtacaaaagtttacaattttactatcacacagaatttttataaaaaatactgtctttttgtaaaaatataaaacaacaaaacagaacaattaaaacaacagttgaacaactaataaaaaacaaccgtggaacaaccgtgaaaacttaacacattacacggtataaaacatacacagtatttttgaaaaaaaattccacctcacagtagaaaaagtaagaaatttcagtatttggtgtaaaa

SEQ ID NO: 404915 - DNA, 622 bp, Cannabis indica
aatttccctgaattgactccaaagacacacttaagaggatttagtcgcattttatatcgtcgcagtatttccaacattgcttgtaaatggttgacatggtcttctgcatgttgagattttacgagcatatgtcaacatacacttccatggtgtctccaatcaaatctgcgaacatcatatttactagcctatgatatgtcccacctgcgtttatcaaaccaaagggcattaccttataacaatacaaaccttgatctgtaatgaacgaggtatcttcctgatctggttcatacatcgagattcgattatatcccgagtatgcatccatgaagctgagaagctcatgacctgcagtggcatcgacaagttggtcaatcctaggaagtgggaagctgtctttgggacaagctttatttaaattagtgaaatcaacgcatgtgcgccatgagccgttaggcttgggcacgagtatgagatttgctaaccagtctaggtagaacgactctcgtatgaagccacatgccaagaggcggtccacttcttccttcagcgcttggtacctcacggggtccattttgcggtgcttctgtcggacatctcgtacttcggggtcaatgttcaa

SEQ ID NO: 404916 - DNA, 655 bp, Cannabis indica
acggagttcacactcccttaaatatttgtggctatggcagaggccttagagcaaaggatgtggtcggggtgatgttaacttgccgcaggctgcccaagaatgggtaaataggtttgtagaaatgcaagccagaattaattagcatgatgaagaaatcaaacgtttgagatagcagggtgctcctgcgatccctgccctagagtgcagttagctcctgcccctactgtgcaggtaggaccggttgttgcagtgaactgaatggaaccactatatgaaaggttccgcaagcaggcacctccagtctttttgggaggtcccgacttgatgaaagctgagcagtggctgactgttattacaagaattttgaatttcatggtcgtcaccggtaatgacagagtggccggtgccacattccagtttcaagaagatgctctagtattgtgggacatggtttccctgacctgtgattttgctacgatgacctgagaaaaggtccaggaattgttcaaagcaaagtactataatgaagcagtcagaagtgagaaaagaaaagaatttactcagctgactcagaaagaaaatatgagtgttactgattacaaaacacagtttgatcgattggcaagactggtctcaggaataatgcaaacaaatt

SEQ ID NO: 404917 - DNA, 789 bp, Cannabis indica
gggtcttggcttgagatagagtagcaaggtatgaaataagcaacagatcgagtgtatattcaaaatgtggaacttcctttcccgcttggccaaactcatgagccaaccattgcttcacctctccaatccgagacgcttccgatcctcctccgccgccgccggtcttggccggttccgttaaggaggaatcgctcatgttactacgagtctggtctaacattagttacagagataaagtgttgaatgaattgaattaaagcaaagaaaaagatgatgtggattcaatacctgaagtggagattgttggaatcggcgatgggagaatcggagacggagaagaagacaactctgtcgagaccagaccagatttgctctacccttcgattagttttactagttttttttttttttttctaaatataatttatttttttgtgtaacccaccaagagatttgtttgcagccgttggattacttggattgggaatttttttgtttatttttttaaatccaacggttcgaacttggccactaacaagcaaggggtgagtgaacagtgtaaggccaatggtttatggatataactaggtaactaaaccgtgcgaatgttgtttaatttttataatctttatttgtatatatatatttattatacttatattaagtgatatatttaaaatataatattttaatgtgtgtatttaattattatttataaaagtttttacattttattttatggtgccgttaaaatactttctttacaaaaatgaaaatgaatgtaggatg

SEQ ID NO: 404918 - DNA, 653 bp, Cannabis indica
acttagatatttatatcgtaaatgactctttagttgataattttaacaaaacttattatttaattgatttaaatagctatgattaacttgtgaatggatcccatgatccaaattaatcatagtttattgttaataaatcaattaaataatttataataaaggtatattttttcatattcctttcatctatgtcataaacctagtaacatgataaaagattcatccaaattaatgcatatgtgagcctatatttttcttatggacttagatgcatatatgagccctttttttttatatatatttaaatagattaggttgttaaataaaataatcacacaatgatagattttatttgggcccatttagaattgacatattcaatgagtaacaataatttaataaaagttaaattcctctcttttggaccttgtgtgagagttagggggtcattagtaatggtaacaatatactgaatccagttttctctcacatgaacaatcctaattgtgtaggtctacttgccttgtttaaataattgtatcaggctaattatattagtttaagataataaaaatttcttagcaacataataaattcaaaaaatatttgaaattaatttttcaatagattatttttgaattaatttagagaaa

SEQ ID NO: 404919 - DNA, 578 bp, Cannabis indica
tttaattgcattcacttgtgtatataagaaccttttgtaacaattttgttaaaatggttgaatatgtagatttctctctctgtcctttgtaacagttttgttaaaatttatttaaaaattaaataaaattataaaaaataaaatatttaaaaaaatataaaatatcataaattttaaaataatttttatatttttaaaataataatattagatttaccaatataaaatttgttacatgtacaaaagtgtacacataaaccgtctatattgataattaacggtaaaaaatggatgacactttaaatttacgttaaaatttgagcttaaaaaattaagtgtaaataaaataataattgagagaatttagtcacaagaaactctataacaatacaaagataaaatattttggaaaatgttttcaagcacaacaattggttaagaagttgtaatagattttaagctaattagtaattttttactccgaactttgacatgtactaaatcgtgcttcctgaacttttttgccgttaaaaattcctcctgaactattaagattgttaaatttaaggacttttgtc

SEQ ID NO: 404920 - DNA, 650 bp, Cannabis indica
tcggacataacaacacttctaaatgacaaattgaatctgaatctctttgcaaattccttaaacgccgttcttaaaataatggtcagtctgtcacaccagtctctgctgacccctcttctacttcggttgtttctggttttactacggattcagccttacaacagtctggttctttcgcggtggatgctatgcaccactgcgactcgcgatgaatctcataagttggaatgcgcagtgattagggaaccccactacattcagatttttacgcttgcttatctctgagtaggctccctgtgtgctttttcttatggaaacaaaattacaagctggtagtattaataagtttcgtaatagtttacattttcccaatggcattgaggttcctcgtattggacttggtggtggtcttatgctcctttggaaatttgaggccgatgtggccattaataacttttcttccaaccacattgactgtttcattgaattttaggaaatatgtctactcacaagtatgttgatttaacaacctaaatatgaacttctaaaaacgatatgaacttagatctattcacaagtatgttgatttaacaacctaaatatgaacttctaaaaaccatagaaaattaaacacataagagtatcagaaa

SEQ ID NO: 404921 - DNA, 466 bp, Cannabis indica
cttttactgttaaattgattgcctattactgccaaactctagttctcattactggttttatgctactagtttaattggtttcagttcacagtcgtgttgtttaatttcagttgtttagttctgttcttgatcaagttctttgtattgtgttgtttgcgaggtgattgatcatgcattgatcacatcaaatggtatcagagctcagtcgaaggacatcatcaaagaagtgaaacaaggacatcaagaacttcaagaaaagaaccaagaactgatctactatggcttctactcggtttgaagttgacaagttcaatgggacaaacgactttggtctatggagaattaaaatgaaggcatttctggtacatcaaggaatctcagaggcaattgatagagatgagcttgctgctctaggagatgacaagaagaaactcaaggaaattcagaacaaggcacacagtgccat

SEQ ID NO: 404922 - DNA, 1213 bp, Cannabis indica
atctaggatcaactaggtgatattgaattgaatagatattacggtaaatttatcatatctgattcaaagttcaatatcggtcccttccaatgcatactccatgcatccaacccaagctttactttaaccaatgccctggaaaggacatagcacttatccaaggtgcaagtaaactatgttgtagattatcatatcagttaaacccagtgtactgataaatctaggaatatatatttaatcacacaatcttgattactttccactgtgctgacgacacaataaacaagaacataaatgtgataaggatttggatgaatttataaatcaaataaacatataaatgataacatgaaccaaatgacacattaaataagtgatgaaaatacttctgtctctttattgatatttaaatgatagagattacattgaaatagagttttatttagggcataaaagcccaacagtcacgtgggctcttgtccattttaaattttcattatcaattttaagtaaaaaaaaaaatatcacaaaagtgatatgtccaatcaaatcaacactatttaaaaacttaaaatataataaaattggttagaatatatgttgaaacgtagtgaccaagttttaacaaaatagcaacaaaaaatttcttaataacaaaattaagtatagagtataatcatagggtagtaaaaatgtaattgtatgcctaaaacagtaaaattgtaaaaaaattgggaaattcagtaccggatgtaaatttcccaaaataaatcctagagattattataatatgagcgtgcaatcacataacgagaatgtggagtcttatttgcaaactgaagcttatggtgcatctttcaatgttgacagtgaagatattagtttggttagaaaatgttgagtttggtcactaatagaggattacacatcaactagctaagtcctacacagctaatcataacagttttacctaaatttcagttatgacagttaggatcgagtcttgtaggataaggctataaatagccatctgttgcagcattgagaggatgatgtttttggtaagatgagagagagttagttctgtggatcatagagagagagagagagtttctgtgtgatgagttgttattgaagcttggcttcatgagtgtatgtgttagttaaacaccttgtaaaacaacttgtaatttctctcatctagcatcaataa

SEQ ID NO: 404923 - DNA, 714 bp, Cannabis indica
agatcttaatttccatagttaatttttttaaaaaaatatacatatatatatatataatcaattaaatatcacactaccattattttaaaaactttaactctaaactaattaaattcctactacctctcattctcattcacaacaaatatatatacaatacaaatacacaaaatacacaaatagtatatacacaatatatatacacacaacatatatataaacacatattcaataataaaatacaaaatatatacatatatattatatatcaagtaaataaatatttaccttataaacgcaatccggcgacaaattgcgaccaaaaatccggccacctatagcacacacaatataatattaataaaatgaaaaaaatcctaaaaaaaatttacaaaaacgaaataataccaatgtacattaataaaatgaacagaaatcatatttataccttaatgaacgttgagattgaacgatttctccgctaaaagcggtggtcggagttaaaccaccacctttttttaaaataggttcgggtacagtgtaaatgggtaaaaaaacaaaacttttttagtgtatgggattagatattgaaaatagaaacttttaagacaaaaatgaggtgaaatggtgaagaaatgagagagatatggggtttttagaggtggttggcgagggttttcgtgggttttctctgctgtagagtggctgggtatg

SEQ ID NO: 404924 - DNA, 969 bp, Cannabis indica
gagaatcagactcaggaaggagagaaagagatccaggttcagatcttgataatgctgtgctacagaaaggaatcaagggctagagatatgaacggaaggagtcatttaatttcgctgcaccgaatgtaaggtttcctaaactttatatgtgtttatttcattgttttagaaattcatattaggatgttaatgaaacatacttggtagtaaatctagatcctgataaaatatttccaacaactggcctcagagccatggtaatgatttactttcatgaaatatgtgctacttgatgatgatttgtgttgatttggatggttttatgttggtttatgtgctacttgatgaatatatgtgatttacaacatttttccatgaaaataattgtattttgtttctaaaaatattttatttggattccttgtgaaaaattaagcaattttattttttacggaactcgattcgaataaaaattgaaaaacatatgaaggtttgaaaatcagggttgaatgtgtgctcaatcgcacgagacagccctcgaacaagccaatccgcgcgcgcatcttgagacaatttcctgtctgaaggcgctgatcgctcggacaccagctgctccaggacgctgcacccaccttgcccaaatgcttcatctgaccgagaaaactcggtcagggaggctgcatccctcctcgtgcgcgcgcgcgtgtgaggctgcatgcagcctccttctcggcatcacgtttaaatatattatttttaatatatttaaaattaaatatcatttttaaattattaatatttattttttaatagattattattaattttgatattttgaggtttaaatttaaaaattaattattttattttttaaattatggtgatatttaaaactttgttaatttctttaatatttatatattatttaattataagatcagagattttgatatttaacatattttaaat

SEQ ID NO: 404925 - DNA, 663 bp, Cannabis indica
ttttttttttttttcaaatttgcccttgcttactggaactcataattgagacatagtcttacttagaattctaattgattaattaaaactaattaattgagtctacaagaaaatattatctcagatagtgtggggaccatggcccatataattaacctcccaataagtagttctagaatttatcgagtaaattccctatcttattaattcctctcgactccactatagattcagaattttactcttgatttgaacactctattaaccaaaaatagatacactataagttatctattattgcaatctaaataatcaatgatcctttatagatgatttacattaagtatggactaaaattactgttttactcttcgatgtattttacccttaaaacacttagtttcttataaatgatatttcttaaactaatataattactgaaataagagctcttctatttatgtcaactagccaagttctaaggaaatcatcatttcacttctaagtattttatagaagctaaagattccatttctataattagcgcaccctctcaattgcactaccgtgttcctaagatgtaagtattgagctgtgttgggaatatcctaccaggatctagatttacaaacaagcatgttgaattaacatcctaaatatgaa

SEQ ID NO: 404926 - DNA, 713 bp, Cannabis indica
atatcataatataactttataggtaataggtacatgcaatggctattgaagtgagagaaagttttgctgtcaaaatagacccaaaacgtgtgtaatgccaaaaataagggtatataaaaataatattatatgtgtgcccatagattgttgtgtcgaaattgattaaaagcagaagcgcaagtattggtaagtttacgggtggcccctgcccccagaattttatactattataattaatatatatatataaatatatatgatacgtaatgactattggtttctgtaatgtattaaaacaatattatatatgattttgtcccgtgatgtacttttacagaatatatttcgtggtacattagatgggtcgcagggtacattaaatgagtgttagagtatgaatctattttttaatcctaattacccctagatcaatctcagctgtaagatcaaataactccctaatctgacggctgccgtacatcacggattacagtacaccacggattacaatccgtgaaagtacaataacgagacaaaatcatagacatatatctaatgttgtttcaaattggaagatatatatatatacccatatggaacacttcttaataggtattacccattgatgggtactaaataaatttaacaataaatattaattttaaaaatattaaaccattaaatttttggtttcgatagcgaataataaaaga

SEQ ID NO: 404927 - DNA, 650 bp, Cannabis indica
tgttattgccagtaattttataagtgatacctaataattaattagtaatattttttaaaatttattaattagtggtgcaattctcaatttacaaaggaaataatttcaactaatcatttttgtttatgatttgtcttatttatattaaaaatgatttatcaaatatatttaatttatgtgtaaatatattataattagttacatattttaatttaataattattatttaatatggttgattaaagttggtacttaataataatacttttatagtataatctctatttaagaatactctattcaagaataacttctgatttgttataaaaaaatcaagttccaatttgggtcagttataaataagaataacctctaaattgtaattaattatacattttttaagtacgtattaccaaagtatacttctatataagaataattacatcttaataaaatatatacatgtattttgtaaatttatttatgtaaaattaataattttattttaaattataatacatgtatgaatattatatttactctaaattatttctattatgatatagtattgatgattatttattattattattgttacgttgatattttttaatttttaattttttttctagtgtaactctatttagtta

SEQ ID NO: 404928 - DNA, 510 bp, Cannabis indica
tccaagtgatgaactaggaaagaatactgttcatgaggaactgggagaaaacactgttcaggaagaacaaggagagaacactgttcaggtggaacagggagagaacactgttcaggtggaacaggaaaagaacactgttcaggtggaacagggagagaatactattcaagtggaacagggagaaatcattatttagttggaacaaggaaacctgagggaaggtcaggaagaggacttagaggactaccaattgactaaagacacagctaaaagagcacctagatagaatcccaagtatagcttcaacatttggaatgaggacattgcctatgaactgttaagtgctgtgcaaggatagaagaacaaaccagaaagttctggagaagctatgaagtgcaagaatgctaagaagtggaactgtgctatacatgaagagacagcctctttgagtaaagagaagacttggggttgtgttccaaaacccaaggaaaagagtgttgtgaaacatat

SEQ ID NO: 404929 - DNA, 533 bp, Cannabis indica
aagaagggtcgacgaataagccttctctagggaagaaacaatgggaggggtgaaagttgatcaagtgggaaaggagatgggtattctctgttgagtttggcattgtgaataaacaacgtcgtaattgagatataacggtaataggttatgagactgagacatgagaaggagaagggtatgggtttttttttatttatgtagagagagaaagcttgaagagaaagagagaatggtaataatattaattaaaaaaaaaagccaacaatgttttgagagtgactcaaggtagagacaagttgctcaatgaagatgaagatttgggttcctcatcttcttcttcttcctagctttcatcgccaagagaagagaagagaggcaaagaggtttctctctcttctgttttttattggtttcagtggtgatggtggtttcaggggtggttttagggattttggggttctgattgtagtaatggcagaagaagaagaagaagaaggggttctatcgagattcgagaagaaagagaaagaaaa

SEQ ID NO: 404930 - DNA, 767 bp, Cannabis indica
cagtgttcgatcagctaaggcatcgtgcacgacctcaaaaccaatttgaattgtaaaaagggactggatggacaaaacgttccaccgaccgtccagccagatacccgcacccaagatcagttcaagagatcctaatgtaacataggtcagtcaacaggctgaacaagttcatccacttgtgcaagcataactggatcaacttaaaagcatggtacaaggtctgatcggcccaaaactcatagatcttgaacttgactgagcatgtcgatcacccttctcatctaaaattgaaatccttgacctacccccgaagtttaaattgccaatatgaaaaatgcacattggaaaagaagttcctttatcacacttaaagtattttgaaatgcagatggatctgcaaggggtaagaggcaatgtacggtgtagaatctttcatgccacactcacagaggcagcccaacaatggtatttcaaattgcctctaggaaagtttaatgataattgctttctcctcagagttcaacacacaatttttttcctctcgtgagcttccctcacacatggaagacttggtagaagtgaagcaaatgccacattagcaggtttatgattgaagcaacaaagattaaggggatgattagagaggaaagattgcaacaatactagggggcatggagcctctaggagagttatggaaggacatcaaaagattaactatgggattcatggctgaatttctagactgagtagatggattcattaagctc

SEQ ID NO: 404931 - DNA, 770 bp, Cannabis indica
tttatatccattcattcttaccatcatcgctttctgtcactttctttttattataattattattttgtactttgcttaaaaaaatcattttgttacgaaaagaaaaaaaaattattgaggtctgaagctttgattggagatatttctactaaaaatttgggtgttgaattttttattttaatcctctaattagagttgcaaaaagtacagtaaagaattaaaagctggaatcattaaaatgaattataattgaagactatttcaaggcttgaaaacgtggcacttttcccacacagtagaaattgctacattatttttctttgtaatatcattttatgtttataatatgaatcattctcaaatttatatacaaattttgctcaatacggtgctacaatatccatagaaggaaggaagaagtagctttttcatgatgagagaaatagaaccaccacatttaccaaagagatccacaccataaaaacaaatgggtgcttctagccttctacaatgtatgtcgaccgactcactatttatctctttagaattttttagtccaattcaaaaataagtttaaatagtttattttacatgcgtataaaataagagtttcgcttgtaaaagattgtttgaaccctatgttagacatttatatgtataaactgaaacatatatgtttatgtataaaatgcggaattaaatcaaacatatatatactatgaataaggatcgaaatacctccagccattgattcttgagcttcaaaccca

SEQ ID NO: 404932 - DNA, 617 bp, Cannabis indica
taaaaatttaacaaattaacaataatacagtaataaaaattcatacaaaataccataatttctataaacataatcaataaaaataaaaataaaaaatgtttaaaatttgtataacgtattttattaattttttattatttttatatatttgttaaataattcttatatttttttttgttggataattatcttttataacatataaacaattataataatattttattatatcattgactaaagttaattaattattttaaattaacagtgatcacaaaagataaaaagaagataaattattaatgaccactttttaaaatttaaattatatgctactgtgattatgtttcaatcaaagctataaaaagaagataaggaattgcagttaagaaatccattgaaaactttaattaaattacttaattctcgaaaggaaaaaaaaacacttctccatcgatcaattttgatgttaatttttttcttagccatggatttggggaagaattcaaagccaatgtgttatactcgtgaggcaaatatgtgatattatatatatatactagaaaagctacgtgtatactaaattttatgctagttttttttatgttatttgaaag

SEQ ID NO: 404933 - DNA, 540 bp, Cannabis indica
catgatgtactattgattatatataaaaagggaaagtttttcaagtttgaaaattttcaaagtttctgaaattttctacttattacaccaagttgtaattaaagtcgcgaacaaaatattttaaatagcaaagaacggagtacctgtgtactgcgagaatgttatagataaaatcaccgagaggatgtaaagtcattcaaaagaaacataaacgtaaatttgttcaaagtacaaagcgcgagtacccttgtaccgcatataaaaaaagagaagagattctaacacaagtaaatattaaaagaaaaggaaaagttaagcactaggagcagtaggggcagatccatccgcgactttgctgatagcctcgtccacgacctcctcattacccgcggcctcagcttccttaggaagcaggttccctccatcgccttgagtatgcgtaggcgacatggcgcgaaaagcctcagccatctcagcggcttctgctccgaggatagaaaagtcaaaatctggaattttagaaagagtggtgtaaatgta

SEQ ID NO: 404934 - DNA, 847 bp, Cannabis indica
caaaatacaaattaattcggcatcaacatattaagagaacagaaaagaaaaaaacaacttacaaataggacaacaacaaacctaaaaagaaattaaaaaaaacattaaaaataataataataattaaatgttttagaataaataagctgaaaccataactttgctggaataaataaacaaattttggtaggaataaaattatgaaaccatgatttaaaatcattagagaataatttcatattaatatatagattaaatatatattaaaatattttgtcaactaaaatgaaattttaaaattaataaaagaaattactcaattagaaataaattagacttcaactaaaaaaatatacttatgaaattaagcattatttttgtttttttaattatttgtgaatataaatatcaaaaaataaataactagataacaacctaactttaatataaaaattaataacacatcaatattgtaaaaaaaacttaaaataactaaaaataacctatacatcaactaattgcattttattatgaaaaaaaaaaactctacatcaaacccgcaatgcaccgacaattataatatttcttttttttttaaaccaattttatcataatatttcaaccataaagcttgtgacttttttttcttggatgatttaagtttcaagtttatcttaatcttcctatattatgtttgttattgttgatttgtttggatgactattatttattacaattttacatcatggccttagaacgattattaaaatttatatatctttggggattaggatgaaaaacgtttagaatcagtattttctacggattgtaatttctacaccaacca

SEQ ID NO: 404935 - DNA, 909 bp, Cannabis indica
agcaaccttaatgctatggtctgactctcagcaagcagttgattcttgatcttcacaaggcgaaaaaacctacattaagttgcctcctttctattcctttcctttgtatgtgttgtggtctctcttgttatttgaacatttggacgagtgatttattactactaaaatcattgtcttgtaggagccatggtcttggtctctcctctcacattgattaatattagattgactacacttgaagtttcatcttcattttaaatattcgattcaatgtttatggaagatatatttattaaatgatggttcatggggcaggttgggacttgtgcaggtttcatttttattgtccaccatatctcctgaccgacttttccaggcaaaacgttaacaatctttactagggtaggttgttctcattccgtttgtatttgtcaaactatttatgcttatattttttagagcattggacaccaatggtgtttaacactttatataggatctagtacttaattataagtgttaggcggtgatattttttatcagtaaacattggaatactaaaaaagacacatgtaattaattcttccaataaaaaattaacaatgcaagtaaaagtagtagttcgtatttaaaattatccataaatatacattatgtctagaaagtaagtgattttatttttaaaactggtaaaaaaatatgtaattttttttaaatcaaaaagtataatttgtgtgtttaacattactttttcttttttaatatatagtactattaaaccgtaggcttttttcaatttgatgttatcaatataaaaatatttaaaaataataaaaagttaaataaataaataagtaaaatatcatcactcttatgtttttaagaaaataaaaatctaggaatcaattt

SEQ ID NO: 404936 - DNA, 1045 bp, Cannabis indica
ttgtaatgtaatatttcagcacatcacattaaattattatgttaaaagtcaagattgctcacctattaaattaactctctattttctttctcaccaaccaaccaaaataagtgaagttattaagtaatttcaaactattctatgaaaaacacaatttcaactaattctattaagaagatcattttcttttttgaataattacaccaagttttttttttaattttttaattaggatatcaaaaagttaattgtggtatttatttgaagatataaatataacacataaagaaaaaaattattgctcataaatataggtaggccatatatgaataaattttaatgaactctactatagtcttagatcacctctaaattttgacaaaagaaaacgctaaatattatatttatgagagtaatttgcggtaaaaatacttaagtttaacttgcatttgtagataaatacttaacaaaatttttttgcggtaaaaatacattctgttaaggattggaacttccgtaggtacctgactgttaagtgtcatgttagagtctaattgtcattcccttattggtctgcattattaatttgtattttttaattaaaaattcatttaaaaatttaagaattaaataaaaagtattttaaaatcaaacaaataaaataatatatattaaaatttgtattttaattaaattaaatgaataatcattaattaaatccctaaactaatgccacgcacatgacatctcagtaaacttgacttaattaaattataattaaaatacgagttgggatttgtgaaataatgtgagtttaagttgggtttttgatttttatgtttttatttatttaactaaaatacgatttttaatatatattatcatttttatttgattttaaaatatcttttttatttaattcttaaatttttaaatgaattttttattaaaaatacaaattaatgatgtggaccaataaaagaatgacagctggacacttaacggccaggtacatacggaagttccaaaaccttaacagaaggta

SEQ ID NO: 404937 - DNA, 850 bp, Cannabis indica
agaaacttctgcgattcttcttcgccatggcttcatgcactttcacagtccataatgcttgttttctgaactatgtaatatctgtgtttcatcttgcttattcaaagcttcatgaactttttgccctaactcgagtaaattttaaacttcttgagttttgacttctctttgaatattttcactcttgcttctgttgagtactcctggttggcatatttgcttgttcatcgttcgatattttgaccaaaaactcatcttgtgtgttgtcttttgtagatgaagtcaggtgagttttgggagaacggacatcggatcaactaggacttgcttcaacttctacacgacgatcatcctcgtctttgttctagccaaccttcctctagtgaaggacattcttcaaaccctgtacccagccatagaatgatggctcgtacaaagaagaccacgcgtctggctgacgcatctgatccccaaggggctcggcacgccactttgcccagcgccgaataggatccaaccgtccaggtggagggcgatcatgaaggggacgttgaggtccaagagatcgaggagcatgatgatgtacctcctggcagttcctctgaggcggaggaagaggcagaggttgaacccccaaactacggggagtacaacgaggttggggagccagtcgatgctaacggagacgtcctggttgagggcgtggactacgtcagtgaggaacttgctgctgctgttcctcatagaattcagggcgccttgggcgccatgtgggtatgccctccgtcaagggttaccgaggcgcgccttcgaactcttgcccagggcggatacttgggcgaactggatt

SEQ ID NO: 404938 - DNA, 746 bp, Cannabis indica
aaccaagtcacccaactctaccagtatctattgggctgaagagaattaggtataaaataacccttcaaactcatcccaaggggtgattctcccttggggtagcttagtaaacaattgttgtgtcgtgtccgtgaaggttgcagggaagatttgacacttgaggtcaactttgatcccttgaaggtccatttgcattttgaagttctcaacatgtgttagggggtcttcactacccgtgtacttgtaagtgggcattttgaatttcgctagaatggggaggtcattgatcgtttgggagaaggcagaccctctcctcctttccagcgccaagtcagtgagttttggtgaagtaaggtccttgaccaatcgcgttaactcgtccaactgagcctggatcaccgaatctgtggcttcttggggttgagcaacgttaatgccaatattcgcttggtctttttgaaccggctcaggtggctttactatattggaactacggttgtccttatttctgttgagggcatcccgaaggtctctacccccttgggggcctaacggttgggagtggggcaaaagatgagaagacggctcataatgaccctcgaaaccgtacaaccgccagattcaaaggacgcgtttttccaaaaagggactataacaaaaattccctctgtaattattaagaagcactttttacaaaaaaaaaaaaaagaaactcttcaagggcaattgttatacctaaaattcgg

SEQ ID NO: 404939 - DNA, 532 bp, Cannabis indica
gttatggtgtctcttagtgattattaagcttaaccctccaaattaagtctatatgcttaatgacttaatataattttccttctaaaccttctcatggtttataataatagatgcttaatgacttattttgatataattttcctaataatgcatttgataaaatggagtaaataaataggaagaggtcggtgttttttatttttaatgtgcatttgataaaatggacacaaagaacatatacaagtagaggtcggtgttttttatttttaatgtgctttcattagttgagaacagacacttataagttttactttctttgttgtgcaacttagcaaaactgatgcaaagttaatgtgaaacgttaatatcatggagcagttgaaacttaagcttggctctattgctctccatgattatcactcaatattattggctcttgtgaagtcatacctgatggtttgtattcattgaaaatttataggttgaaactttaactaataattcttatcccctattttaagatgatattttt

SEQ ID NO: 404940 - DNA, 576 bp, Cannabis indica
gatggactatgtcaaaaatgtgagaagttccaaagatccttaaatttcccaagaactccacccaatgagatcacaatgatgtagtctctttagcctttttccatatggggaatagacctgattggtcaactcccaaagggagaaggaggggtgcagtatgtcgtagtccttgtaaacaagtgggcagaagctgaacccctagcgacaataacttccaagagattcctcgactttattgttaagaacatcatatgtcgatttggaataccacaaaagattgtgtcagacaatggaaaacagtttaatagtgacatgttcactgatttctacaactagaacaacatcatcaaaagcttctctgccgttgctcatcctcaaacgaatgggtaggtagaagctgtgaataagaacctgaaggacactttaaaaaggcgcgttgaagaggcaaaaggaaattggctagaattgctcccaaaggtcctttgtgttggaaattattttaccagaatcttagatctactcactatatttcgtgaagccttcactatctatttatagcataccacatagggttag

SEQ ID NO: 404941 - DNA, 716 bp, Cannabis indica
tcaccattaaataagctgaagatcaatacattcaaatcttcaaacaaaaagccagaacttgaagacaaaatccagaaatcaaacattaaattccaaccctaaactcaacaagaaccatctagaagcataccataccatcatactaacacaatcatacataatacaacaaaactctctcaattctcatacacatgcaatcaaaaggtcaaagaacataaagacaagttttcatggcttcaacaatcagaattcaactaatgcaaaagaaattagagagcttaccactaatttcacaagcttctactataagaactacaccaaaattccttagcttttcttccaatttaaatgaaaacaaaagagagagtgaaagagagagaggggggggtcagctaaagggtgaaccaaacccagaaattattttttcctttttttttccaaaattgcttttgttggataatagcttaagtggttaaatgaccaaaatgcccctagggctcaatatattcacacattaagcacaagggcaatatagtcatttcaatcacacatatgtaacacaagaattcaaattttctcaataatcattttaataccctaaataaatcctgaaaatgtattttgggtcccgaacccagttcggcccaaaatactcggttgtgactataccacgctgacttgtcagaaaacacttgcagatagacagaataaacata

SEQ ID NO: 404942 - DNA, 571 bp, Cannabis indica
gttccatgtgctcaatccaactcaagatcgttgttcctctaaccggccatgccttggaacatactttttagtttgtccagctgttcctgcatagctggactaacctgttcggcattttggccaatctgagtcacatcagcatctttctgagcaggaatttgaacacgggttctgggctgcacgatcggcgtgtcaagctgatcgtccactcctctcctcctattcaaattgtttctgagatcatgagtagtccccaatctatcaaatacggaaatgtcaggttgtctcagaaactagttggtctggctaacgtgctgactggcaccattaacctagttggaattattgggtatgacttctcctgatgaattactagacaaagtctacccgcctaccagtaggcccacaggcaaaacctgtgattagggatttgacgactgaccatttatagtctgggaagtattcatcgctggatcttcgtctgcttcacctaaggggatgacattcgggggttgctacccgacagattgataggcttttcgtatcagcacaatggcttgccgactacgat

SEQ ID NO: 404943 - DNA, 625 bp, Cannabis indica
ttttgtattaagaattgaagatatgtagagattattcttgagatattcttgaattataacaaaagaggtatatcaataaagtattcaaaacttttagcatgaaagatactatatcaggtaaaagacttgtagctaaaaaaaataagttgtctaagtcattgtcctaaaagaaaccttagaatttaagaaatatagaagattctaaattcatattggaatctaatttatgcttaagtatgtatatatatttttacttaatatacatattaagaatgttagatagataggtatgcagccaaataagctataagaaatttaaggagaacaaaatactatgttcacttatcaaaaatcagaaaatagaaaatttttaagatcattaagatttctgattctgatcttgttacgcagatttttgttaaccaaatttgagcctaaatagtgataaacttacatagaaaaataaaagcattaaaataataacaagaaaaggatgaaaacgaaggttcttttacgtggttttgcagttaaaattctgcatagtccacgagtcaatcttattagatttttgatattgacctagggccttttctcttggggggcaaccatgctcatacatggacta

SEQ ID NO: 404944 - DNA, 509 bp, Cannabis indica
tctttacattttgttgaatctgattgtttagcgattataaatgtattttctaaatgctcttctttcttcgatgaacttggttccttgtcagaggatttagctagtttgatgtccaattttcttggaatatccctaatccatgttcgtcgaacagctaatgggactgcacatggattaactcggcatgctcttcgagtggatagagaactagtatggtttgatgagattcatttttttattggggtttcttaagacttaaagtttgtatgagattatgatttcttttttcaatgaagttattcattagttaaaaaaaaaacaaataatattaatatttaaatcaatctaaaataaacaatattaatatttataataataataataatagaatatttcatcacaaagataatatcatacttttatttccaatatactaggtgttataaaaattaataataaacccaagatcaatttgtatataatatagaacacaataataatatataata

SEQ ID NO: 404945 - DNA, 626 bp, Cannabis indica
cccacctggcgcccaaggcacccaacctcctgtgaggaactacctcaacaatctcctcactgacgtagtcaacgccctcaaccaggacgtcctcgtcagcatcgactggttgcccagcctcattgcactccccaaaattagggggtccaatctcttcctctccctcagcagcgggaggactgtccggacgcgcctcgtccagctcctcaacctcctggacttcagcgtccccctcacggtcctcctccattgggaccgccaaatcctgttcgacgtcgggcagagtggcgagccgagccacttgagggtcagaagcgtcaactagacgcgtggttttcttcgtacgagccatcatcctatggctgggtacagaatcagaagaatttccttctttagaaggagagttagcacgaagacgaggatggacttcgtgcagaagttgaagcagctcctggtcgatttgatgctcgggctcccaagagtcacctgggttcatgtaaagcccgcttagttaatttggaaattatcagttgtttatgtttaaattatgaaattatttatagctatttaaataatttattactgtcatttatggaattcagaaatgcatgattatgtcatcagta

SEQ ID NO: 404946 - DNA, 537 bp, Cannabis indica
atctagatcctgataaaataagtaccaaaaattagtatcagagccatggtaatgatttattttcatgaaatatggatttaaaacaatattttgttgatttggatgtgttcaagttggttaatatattaattgatgattgaatgtgaattacaaaattttctatgaaaaataattttattttcgttctaaaaatattttattcggaaagttggtgaaaaattaagcaatttaagattttacatatctcagttcagattaaaattgagaagaatattaattttttgaatttggaggatggctgtcgcacacgaattaggcttttggccgagaaaaccctcatccgcgcgtggatcaaacaaattttttctaaaattctcggccaaggctcgtgcgaggatgttacatatattgtttgtttatttaaagtatctattcaaacttttttaacaaatctattatttatttgatttaaatttctatgattaacttgttgatagatccaataatctaaattaatcatagtccaattgtcaatag

SEQ ID NO: 404947 - DNA, 602 bp, Cannabis indica
catgtaatttcagacgtaaaagttaattaaaagattataatatataggaggttgtaattagtatttctcttgtttaatttcaaattttcaaatcatattagtgcaatccttttattttaggaactagtgaaaatatatatttttttttgaaaaggtgaaaatatttcttttaaactgacttttgtatttaactttaaaaaggaccatctaaatttaggattttcttttagaaaaatattttaagttaaccattctcattgtttgggataaataaataacaagaaaatacctatatacagtattttttgaaaaggaaaaatacctatatatattcatcatatacttattttcttttaaaatatataattgtgtacatgtacactcttattagattaagttgaggaaaagaaagaatatacagagcttacatttggcacacaatgtttttattattggacaccatattattattgggaaatttgacattatatacttaaaaaaagcataaggtgtttttatatgctttttaaaaaaatataaaataatacctccaaacattttaatccaacataccctcctcatttcaaactcccactctccct

SEQ ID NO: 404948 - DNA, 571 bp, Cannabis indica
cataattaagccgcttcataattattaagttcaataacattttttaaaatttagttattagactttatacaaaaaataaaataaatagtaatttgaattccaaatttgacattcattattctatctaaaattcgatttttctactcttattaaattgatcattacagacgtattgaaattattattttctgataaataaagacgtaagtttgtttaatgatcaattattatacaaacaaaagaagggcactactaagggccacaaaattacctaatttatttcaaatttaaaatatgtcattaaggatggttagcaacctaaatcacaaacataaaataatgagattccctgtatgttcatcatatatgtttttcacaattattaaggtatttctgcaaagatttattgttttaatttaaatatatattagctaatatatatatagaatattatttgatgaatattagctaataatgagattccttgtatgttcatcatcgtatgatttggcgccttacaaggctttagcacttattatatggttggacccctaattatttagggtagttt

SEQ ID NO: 404949 - DNA, 849 bp, Cannabis indica
ttcaagatgctcaagacccgaacaatgaagatgtggcctcaagagtgaatgtgggctctgaggaagaagaaggaacccacgacgacgaatatgaaggaaacttcgatgagtacgacgcctacgacgaaggcagctacacagagctggtactcttgagacgaaaggctgccaatcacgaagctgaaatcgaagcccaaaaagaacaaaaccaaaaaatgcaagaggtgatgctggccatgcaaaaagccataaaggcagcaggaatccacgtgcatcctaaagccatccctgctagaccagaagaatcctctccaagcgcccaaaagtagaagtctagggaacctagccccataaggtatcccttcgaagggaacccaaagaaaaaccctacttccactcctaaaaaaaagaaaaaggtgcaggatccgcgaaaggtcccctcagatttcccgaaagggaaaggtccgcagaggggcgaactccgaaaagggagtgttggccctcaggatcgagaggaccaaatgagcgtttccgtgcaccaagaacccggagggagaggaagaaggggccagaaatgtcctcccatcgatctgagatatcagattaacgagaaccacagtgacctccgggatcacctggaccaaaagaaatacggacccgtaatctccacgggaacgttaaacgaaggaatcatggcagagctagccatactctgaaaagaaattgcccgagtctaccgacgacaaaaaggcgatgctccgactctgactgtgaagaccgagagccttgtgccaagcacatcctggaagcggagctctccaaaaattttaagatgcttgaaatggcagc

SEQ ID NO: 404950 - DNA, 512 bp, Cannabis indica
catctagaattttaaacatttttgtaatgtttttaagacattggacaaaaatcttcatgtaaaattttgaaaataatatctatactatgtatataactaactaatatttatgttttgaaaatatatattttttatgtttcaatttgatagagattgttgaaattacattttttatatatatttatcttaaattaaatttaaatttatcatattgaacttttttatttttattatattaaattttcagaaatattaattaattaaaaaaaatcttcatctacaattttgaaaataatatatatcatgtatataattaattaatatttatattttgaaaatatatatttttttaattatgtttcaatttaatagtgattgttgaaatgatatttcaaattttaccacctttaaatatttaagtttaatttttaaaaatttataactgttgcccctgatttcgcccaatatacgtggaccaaccggacggggacacgtggatcagataatttata

SEQ ID NO: 404951 - DNA, 1219 bp, Cannabis indica
cagcattgtatgccgagtgttggccgataaccgcgaagtcagccatcgacttggccaccacaggtgcggttcccaaagtaattgggagtttgatcattcccttcaacgcaatggtgtctccagtaaaactatagatactcgacacgacgggtcgcagatccttctcttgtagtcccatctgcttaaaggcctgaaagttcaggagattcacggaacttccattgtccacaagtatgcagtggacattatctcctccaatattagtgacgatgactagtgcgtcggaatgtgggtggtggacccatctggcatcgctttccataaatgtgatatcattacattcctttttgaactgttttgctggccgctcactcagatttttcacattggtgagcggcttctctttggcttctttggcatatctctcctgcgatttcctagaatctcctgcgatgtggggtccgccaataatggtcactatattgagaggagttcttgaaccactcgcataatgattctcttctttgtcatccgcttggggatgaatttcctcattcttcttatatttgttgaacttttcccgcctgattaattcttcaatttcatcttgcaaaaaccaacattccagagtagtgtgaccaatatccttgtggtacttacagaattttttcgggtctctcttgtcgcggtttcccctgattgggggaggctttttgaagaccccgttcttctcttcaatggcatagatatggtccggagggactgccaactctgtgtaattcacaaagcgtggaccacccttcctcttcggagacgactccttctttggaggggatttggccaacttcggacttctttgtctttgtggactgcgtcttctgggactccttcccctggaattttttcctctaggactgcgggatcgtgaccgcgacactggaaacttgcgtttatcctttcttttctctaattcggctagagagttttcaatcctcttatgcagctccgccatagcgaaaaactcgactagtgattcaggtcttcgagcttgtagttccttccagaaatcggttcttggaaggacacctgttatcaacatacatacaagtgaagactcgggagccttctctacttttgttacatcagcattaaaacgcttaaaatagtcttgtagagactcaccgggttcttgcttaatattagccagagtggtataggg

SEQ ID NO: 404952 - DNA, 519 bp, Cannabis indica
ttcgctcaatgagaaaatgagtttgatcctattatacccgatttcttagttattgtgtgtaatttctttttactcatttttattgtagaatcgattctattttagttgaggagggctaaggagactctcttttgtactatcttttgcactctctctataatttagtgacaaatgtcattctttgagattactttatttgtatttaataactagacataatagtatcaccttattacaactatgccatcacaataaaattatcctactaattttttacttagggcaacttcaatgccaaaacttaaatttagtgttaaatcaaactaaaagagtactattttagcactaattttttttaattccaaccacaacactaaaaattacattaaaatttatattcttattataatgttattttattaatataataaaatatttacttcataatatttaattaaaaaagaaaagaaaattaacgcattttatggaatttaaattacactaaatataaatttttaa

SEQ ID NO: 404953 - DNA, 682 bp, Cannabis indica
tagattagtttattttttgacggtattaatacttaaattatatttaagtaaattatatttaaaaaactcttaggtacttaaccgtttagaaccaaaaatagattcaaataattatttattgcgcgtaaagtgaaaaaaataatcacatgtgaaaataaaatatttgagcctttaatttcaagatatttgtagttttttttaggactactcatattttattatttttatgattgtatatgttgcaattatttaagactatttgtaaaattttttaaaaaaattaaataattataatatcgaaaataaagttaaaaatattatttaccacacacagtcgcgtatatgaaaaaagaatcatatatacaataaaatatttgaatattatattcatattgtcaactatatataattttctaaaaatttataggtttgattggtttgtgattcaaaaattgtgttttttaaaaatgtgttttggaaacaaaaatttaaattttgtaagtgaaaatttgttcttaaatatgtgattggttgtagtgtgatttaatgtttttgagttttaaaaaattgaatatgtgattggttgggaatctcaaaataaaaaagtaagagaataattggagaatttttggattcaatgatttgaaaacacaaaaaacataaaaatggtgttttcattttt

SEQ ID NO: 404954 - DNA, 730 bp, Cannabis indica
taagttctgttgcctaggtatttgagaactgctcaattatacatgacactcatgtaataaagaaaaataaattatcattgataatttatactaatatttttttccttcttattgtagtgtttctcgaacaaacatatatatacatcatggaatggagaactacagtgctctaccgtagaacaacaagaaattaatggaggctttcagagaaaataatagtttagtagattattttttgttttggagtgctatgtatttaatagactaagaatatgtttaaatttttgtaatgttaaaatataattgtaaactttcatgattttaatgtaaacaaaatattttttgtttgtttttgaataattaaaaaaaaaaaaaagattaaattccataaaatcatttgaaataattaaataacataattttctatattaaaaaattaaattataaatttaattagaaaataataattaatttcatttgattaaattttgaaaattatttatggcaacacttttaaaggaaatgttgccatatgtgtttttaaagtaataagatatggtaacacttttttaagtgttgtttaatgctaatatttttggcaacactctaggaggcaacacttttataagtgttgtcttttaattttctttagttaaaaaaaagtgttgttaattgtattttttctagtagtatgtatatttgagaaagaaaaaggatgaggcctttggtg

SEQ ID NO: 404955 - DNA, 546 bp, Cannabis indica
aaaaaaataaaataaaaaatcactaaccatgcttaaaattttaccccacgtcaaattttaattttagtttctaaataattttaggatatttgtggcataaatatcagtttttggttttatacacttaaatactacatgtttttttcgacgaattaaatatcttaaattacattttcgttacttctgtcactactcttctgttaaatcctatcaaacatagagtatttacggtataaatacttgatgttttaaatttcatacacttatatatcacatgtttttatttctggcggattaaatacttaaattacatttacattatctttatcactacaagtctcttaaatcctattataagggattttttttaatattatacctaaaattgattttatttataaaaatacctttaacaaatttatttgcaaaaatactaacgtgtcacgtcatctaattttattggttactacaataaatattataatattgtatatttaaaaattttctagtgtctaagtaaatttactttaaataagtaacatcaac

SEQ ID NO: 404956 - DNA, 694 bp, Cannabis indica
ttacgtagaccttgtgtacacatagatagtctattgtggcacttaactgagtagttttggacgaaagtgtaaagagcaaaacagaatgtgagtttggtaagttttgctagttaaaaaattagtttttgtggttaaagtgttaaaaaatttaaagttcgagtgattttgccgtcaatatctctgataataataatttaaacattattaacaaatattcaaattgtaatagttctaatgatttttgtaaaatatggttaaaaaattatataataataattaaagttataaaataatacatataattattaattatttcattaaatgtaaaaataaaatatgaaaaaacagagtacgaatttgagtatgtatgaaaaaaatgtgctgatccgagtaaaatatagtacgaatttgagcccaacacaatacgatctatattttttaatgacactatacaacatgactcatatttttttatttatggcttaacatgtatttacaacactattataggatggggtgcaccccaaaaagagatgcaacactgcccctctcgtgttttctacatcttaataatcttagttttatttgtattaaagtaattatttgtaccttacaaaattatatgtacattctaatatttaaaaaaaataagtttaaaaatattttaaaaattactcttaatattttttttttc

SEQ ID NO: 404957 - DNA, 544 bp, Cannabis indica
cacttgaagaactgatgaaaataaaatccaaaagctctcagaaaggcttggacgtgcgaagtaatgtgggaaatgagaaaaattcgattgaaagctttcttatttataggtgagcttaatatcttaatcctaatacaattgggagtgttttaaatttaaagcttaaaagaaaacataaatgataagaaaaagatgaaaatcttttctcttctccttttggcttagtaatttcaaaattcctatgagaataggaatatggattctaaatttaaaaggtaacaacaattcctaatgctattaagatttaaggtaaatctaggatgtcatgttcagcaaggaatataatttcaattcaattaatcctactgccataaaaaatacatgaaaattttgagttttcaaagaaaaagataaaagataagtgaaaaataataagtttttcctctttttctttgcttaacaatttttgaaaattcctaaacataagagaaagtgaattaaaagtcctaattttgttaggaatgcttgaagaatagaaacaatt

SEQ ID NO: 404958 - DNA, 488 bp, Cannabis indica
tatatatggctcaatacttttacatttaatccatgtgggacaatgttctccaatatccccctcaagatggtggcaatttttgctcaccaatcttgaatcaccatatcacaggccctgccatttgctcgcttatttttgtttggatctccgccgcctttgcaccatctggatctcgtgtggttggctaaccatctggataggtgtggatcgaaagccctctagggatatggctctgataccatgttgagaatcatcaggttccatctcaaaaccaattggcaatgagtggagtagcccatgttcttatatgtggctcaatacttttacatttaatctatgtgggacaatgttcttcaagactcgatacttagttggaccaatagcgaattgacacataagagggtgttgtgcaccattagtgccatttagtatttctctatatttatatatactttttgatttgacttggatcttaatccttcaatgaa

SEQ ID NO: 404959 - DNA, 540 bp, Cannabis indica
ctctccacactccgcagccatggaagagcacacagagaatcaatcttctactaagcttccaataacataaaatgaaaatttaaataattacagaaatctcgattattttgtaacagacgaataaatatgagaaattcatttcttggaataaaatgaatattggaaagaagagtgaaaatagaagaccctctgcatcaatcaatttattatgctcatttaattataattcataaattttaaaagcagccaaacttatcgtacgatgtagtgtgaactatgaatggtagccctaaacacaaatcatgatggtgtcagcaccatcaatatccaataaacttatcattataaatcaatatagttaattctatactacttaatttaacaccaaatttaaaattcaacaacataactgctgcaaaatgagcattcctcaaatttcaggaaaacctgtacaatgaacagaatttacatttttctcatttgcagatacgatgcacatgtaaacagtcccaaacaactacatattgcataaatatgatc

SEQ ID NO: 404960 - DNA, 628 bp, Cannabis indica
attcaacccgagccacctccaagctcgcaccttcgcaccaccaattcacctgaacccgtagccacagaaattgcaccagcagctcgccattcgcaccacctccgtttgactttcaccacctcactcatcaaccacgaaccaagcaccaagccgagccattgcatagagtctcagtcgacccaccaccgtcgcaccttcactcaacctagaaaccccctttcactcgcaccacccacgacttcaccagaacacacctccgagcatcacagtccctgcacatccacgaatccagcagctcccacgaaccaactcacactcaacggatccacctgacttcgaagcaacccagccgagccattttagtcggcacttacatcaacccgagtcaagaaaccggttcgagctaagttttgattgggtaaattaatttgaaagttattttgggttgtagtgcataattggtggctgtagtggactgcgaatattttgtgaattgcataattggaagttattttgtgatttaagtgtggtagcagtgtgataattttggtttgggtggtttgaatagaaatttggtggaattgttgaagaatattgggctgagaaaaattggtgaatttgagaaaaa

SEQ ID NO: 404961 - DNA, 540 bp, Cannabis indica
gccttggtggaaaaatctatggcacctttcccttcccgccaaggtaaaacacttttcttttcgagccacaaattcaacccttcccactgccaaaaacctagctcataggaaaatcattcattcctcgggttgtgaccgttgtggaggatcggaagagtcggtctctcatgcattattttactgccggagtattagaagagtctggaaaggtacgcaattttatccttacatttttactaactcttcagagattttgtttcatgacgttactgatatgatttacacttctctaaccaaaaaagatgtagagatttttctttgtactccttggcttgtttggtttaacaggaacaaagctctaaaaggtcaagctttcgacccaaatcatgcaattctcaacttggctcaaagctttctggaagattaccaatcctcccagctaattcccacatcctccccccgccccagtcagataatggctcctccttcttggtcccccccagctgcgggtcttctcaagctaaatgtggatgcagcagt

SEQ ID NO: 404962 - DNA, 544 bp, Cannabis indica
gaatttcgaaaagaatgaacataggataacatttaagagatatctttacaaaaaaaaaattacacaaactacttttttttctgtaaatttttttacactttatatttttacacttttatgttacaaaaaataattttttatatttttacagcattctattatagtaccatagcagttaacttcctacgatgtcttctatacccaattccagatgatctttaacatttatgttcaaggtatgattaaaacattcaggctaatcatggccatttctaagtgtgactaagcaggacaacttaattgaattttaaaattgtgtaaactctggcctttagtgtgtcatgcatgtttgttttttactactttcaaaaaggtacaccaccttttattgtaaatccaaccaaatgcagcaaacacattcataaaaattaaatttaatcaacaaatgcagcaacaaattgttgtcaatttgtgtgcggcttttttaaaaaactatctgaagaaaataattcaatttttcaatctcataaaaattacacttaat

SEQ ID NO: 404963 - DNA, 504 bp, Cannabis indica
aacacaacgacatgttgttctttatgtatataaatgataaattgtattgttagagaggaaaaatgatgaaacacaacgaactgttgttcttttatgcatataatacacattgtattgttagagaggaatgtacactcttcttgggcctgtttggtacgcaggattggattggattggattgaaaaggattggactggactggacaagattagattatgctgaaagtaattctgtgtttggtttaagaatagactggactattttatttatttctttttagaaaaagaaaaacttaaattaaagtaaaaatatataataataaattaaaattaaaaatatataataataaataaataaaaataaataattcgcagtaaaaaaaaaaaataaaataaaataaaatattctatataattaagtatatcataaatatataataaattcttttatcatattttttatttgataaataattaaaataataaaataaaaatacttaaataa

SEQ ID NO: 404964 - DNA, 645 bp, Cannabis indica
gtataaaattaaaaggaataatagttgggaaactacataaattctatgattataaaaacttaaccacataaaccgatttttagttagtaaaaccctttaaatctcacttttgttaaatttttagtgaaagatattagcggcaaaattatgtgaattcgacatttaactacataattaaaccaatttgttgatggtaaagtgacacttaaccggccacacaaaaaattagtttatgtggttaagtgtcactaattataaaatattcaagtaattttaccattatcgcgaatattttttttaatttgtaaataaaaacattttaatcgtaaaattataaataaaacattaaaaaatatatatttttaccatatataataaataaaaattagagaattttattgttaaaactaggagtgttcatcaaaccgcccgcaccgcaccacaccacaaaaaaaaatacggtttgaaattctttgtggtgcggtcgcggtttgaatttttcctaaaccgcgcggtgcggtgcagtttgcggttttaaattgttaatatgcagttcaaaccgcaccgcaccgcacattataaaaataccaatttttatatttatttaaggttcaaatatgtgaaaattcaactcaaagtccacta

SEQ ID NO: 404965 - DNA, 837 bp, Cannabis indica
aataataaaataagtttacgttttttttttaattttaaaccaaaaaagataacaatatttaaacaaaaaaaacttttagccgaccaaataaataaatatacaactcaaataaaaaaaaataacacaaataactcttacgcacactttcaacccacacgatccccacttcctggaattgaaatcttcatgtgatgtaatgaggtcatcaacgatgaaaaaattccagcaggcgagaaagcaccattaattcggcgatgtcacctaagaagaagaacaaactcacgcacacaaccttcgattgaccaaccaataacccaacacaaccgaaacgaaacccaactagaaagagaactaccattaatttcttcacttgagaagacagcctgaatcaatcaaaataggggctgtttcgaattcatagaaaaaaaaagtatagaaaactgatttatgacccatttttgaagccttttttttgcaatggagatggagaagcaaaactacaagtaatggccattatatttatgaaatgaaagatatataaaaaaaactgataacggaggtagttggaagaaaaagaatggtaaaggttatggttgagagatagtttcgtgggttttgaatgtgggtttttgaaatggtagtggatggaaggtgctttaggctgacatgaatgaatatgagtaagaggtattttggtaaataaaatctcattaaagacaaattattacccacaccttataggaggtatttttgtaaataaaggggtcgagaatgagagttggattcccattctttgcaaaagttctagaactccaaacttacaaattgcgagccatt

SEQ ID NO: 404966 - DNA, 890 bp, Cannabis indica
agacgtttacaaatttttgtttttttttttttctaaagttttttaaagttagtgatagagctgaatttcgagtttaagcataagagaatacattaaggtattgtgatgctgtcatttttcgtgattgagctgtagtttggttatggcataatccttcgatactctcaaggagaattagtgagtgaataagtcgagggtaattttgctagtacgtaatttggctagaaacaagttggtaagtaaaggaagtaggttaaacgggatacaaaactcaattagtggacgaaaagtaaagttggagtacaaattacttagtggtacgtaccaaacttattacgtaaattttattatctattgttttttcgttttggggttattatagaagagtatgactaaatttttgctattttataacaacttatttttttaattaaactatttgccaatataattgctcattaattttgttataactattttgtttcttttttgttcaacaaaagtgatatgtacaaattttatttttatgtttgcttaaaaaaaaaaagaaaaaagaaaaagtataaagagatctatttagtattttaggaatatgcctcccacattgtgtaggatataaaaaagtttacaaccgcaaccacactattaaacgacatcatttggggaaaacgacactatttttgaacaaacgacattgaactacaaaaattgtgtttgagaaagaaaacacttgttgctcccaatactttgtcctatgtatgtgttggttttatgtttaaatattttttatatatatttttaaagtgttctctaataactacaaaataatataaaaattatataaaaataatatataaataacacaaatttaataataaaataaaaaaata

SEQ ID NO: 404967 - DNA, 550 bp, Cannabis indica
acggagaccaactcctaatggagtggagatttttttgtcttagaggttaatgtggcggtgataggagataatatcactacccgaagcgggaataggacaagagcggggataatactatccccaccatatccgatcccgatacaaatatatataattttctttttattcttaacatatatatagtatttatatatatatcattgataattaaaattaattttgattatcatccataatcaaaattatatattatatgcttaaattatgaaaatttaataacgatagtgaactggtgatcattattgattacaaatgtagacatattttctttttcaattcttagtttttatcttttgtttacttttttaatctgttttggagatttgagaggtatgagactatgatactatacttaagttatgatattgtttttgttttttttttttttcaaaacttttgagagagatttatttttttattcttctatttgagttgtgttgtttttttttttttttttttatttttttactttaaggtcagtatatatcaa

SEQ ID NO: 404968 - DNA, 779 bp, Cannabis indica
agagagagagagaggtgaaatgtgattttttccctttttcttattttcttgtaaaatgattaaacaaaaatggttttattgaattaataccagctaaagataattataaaaatctgattattaaatgtaactaagtccactaaaggacaaaatacatatggggcaaaatgactattttgcccttccacactaaaacaacataaaaaggtactaagggtattttgggaaattctaaaatttcgaccatcttgacatccccaatagctaactatatcgccccgctataccaaaaatactacgatgtgattctactaagccatacgccgtgttccaatgttgccgggcactaaacatgcaaaaatatgaaatttctatatatgacatataaaatacattctgaattcaaataaatcatcataaattaataatttaaaattaataactaatttccataattaaaccctaattatctgttaatttctaaattaacgctaagcggtctttacaattagtcttacgacgtttggtgtagagttaaagaagatgaagtacaatctatcttggtcgaaggaggttaaattgcacaagaaagaagagtgggggatcgaattgtttaaattgaaattaatacatgagattgctaaagggacttatggcattgtttacaaacgtgcctacgatggccaagatgttgcaggtatccaaatattgatatcttcgtgctatatatctaatgtctacattttttaaaatctaatttatattgtttacaaaggtgt

SEQ ID NO: 404969 - DNA, 585 bp, Cannabis indica
tcatttcaattttcacattcttttttattttcgtctcattatttttattctctctcctatgaaagaccacctaaacttatcactgcgctctgctcaccaccactcgccatcacgcattttttgttttcttgctctaatagatttacacattaatttttgtatttcgttgattttttgtccaaaaattaaattttgaattttctacattttttattttttaattttccaattttttgcgatataggacagtgtatttgtaataatagactaaatatatgggaaatttgattttctatacttagaaaatcttaaaattttttccctaaatacatacttaataatattggtaatatatgaccacatttcccatatcccacaaatacccctcccatttgaaaaaaatcaaaaaatgaaatcagccatggatgcctcatcccgaacctctctctcccatggctgcctcattccgaccaccacgcccggccaccgacgactacccaccaccccgactacgcaccaccgtccgaaccacgcacgacccagccccttctctcgaacccagcccctctctctctctctcttcct

SEQ ID NO: 404970 - DNA, 721 bp, Cannabis indica
aactaatctcagaaatcgaaccacaatcaaacctaactctaacaacaccaaaaacttcaaaattgcatgataaaatccaacttaaaacttaaacaacataaaggttagagttctagagtttacctttggcttgagctacttcaaaccctgctgaaaccttgctgaattttgcaaagttcagcagcaagcttctaggctctccttggtttgaaacagagtgaaagagagaatggagttcttagtttttttttttttttttttttttttttttttttttttttttttttttgctttgcctaattgactaaattaattaatcaatattaacttatacgggaaatgaagattaagaccaactatcactcccacaaccattcatctgaacaaataaatgaaattcccaaaatgccatttttactagaaacttaagcaattaatatgcttagcggtaaaataatccaaaactataatcccacctaacaccgacattttaaatatctcttatgtttgttgcgctaagaaaaagattctaaacttacccatgtgactctaacaactatccatctcattttccattgtcgccgagcaaaaaaatcataaaaattacatatttcatattaagcttaaataatattcttacagtttaataaaatctccaaaattaagaaattacaactctaatgctcatttctaaaatggggcccacaacaatatataatca

SEQ ID NO: 404971 - DNA, 749 bp, Cannabis indica
tggtcaccgggttaaacttgttgtccgaccctactgaagaaaaaggaagctctgaccggttgattatggaatatttcaacggtagtgcttcgatcagcttcggccaactgcgcagagtattttaaagctgcacagaagctgatgatgtctacaagttggggatggccttgtttcgtatgtgcgtcctcactggtaaggaggagaagattttcgttcctccttttgtgattagaatggttggtaaccttccattcttctacgagtacccttgggaaaagatttcttacaccaagctgatggaaacttgtaataaggattacttggatgtgaagaataagatgttgaaaaagattgagaagggagtcactcagaaggaggcaaaatacttagcctacggccatactgcagtattgcagtattgggcatacgaggctatattacagctgggcaacgagtatgcagtgaggaggtcgcatcactttccgagaatggtcaactgggagagtaagccgaacactacactcgggaaggatgaagtgaccagattatttgctaaaaatgtaagtttgttacgctttatgttgaattcatgttaatttccatatattatattaatatatttgttatatttttcagttgacagtgtactccatgttatgtcctcggccgaacgagattgagtttgtgagttacataaccgggggtcagcctccgttatttgttgacttggaggaacttgtgttgggtga

SEQ ID NO: 404972 - DNA, 558 bp, Cannabis indica
ctaatataactaagttagcattcgtttataactgatgttaatgcctagcgtcaatttataaccaacgctaatgagggtcttttgtcgtcaattcataatccacactccattttaatagtgtcggttctaaaaaaaactgacattctaaccgacaggaatgcctatttttcaattatagttcccacaaaccaattgttgtttccttattggacacttcttgaagaacttcaccctcaagactaagtaagattatacttaagattgcactgtgaaacctttactttgatggtatattgaactttccatcatcatcttcttcattctttactgcatgtgtagctttcagatcaatggcttcagcaagtccttcatgcactaagagtgctttcattttgattctccagagactgacgtcattttggcctatgaattcatcaacttcgaactttacaccagccattcttgaagctttcttgaattcttgcaccatgtttttgatgatttgagcactgagcccacttgtggtgtagagcactataccaatacaagaacataatt

SEQ ID NO: 404973 - DNA, 403 bp, Cannabis indica
tgacaagttctcaccgtcaacatttagatgctattttcattttatttttatgtagttttcttgttgttttgtgttgtttttatgacaaaccgtaaaaaatatatataaaaaaaatctataaatatagaaatgtatttttttttttttacaaaaaatagtaccttgtgtaattatttctttttttgtacctaatcatacttgtaccttctaaactcgtatcgatttaatgtttcactaagagcatctccaatggtaaaattttaaaagatgcttggtcaggtggacatattatgtggcaaaatattgagatgttataccattagagagaaaatgatcccattctaaagatttgcatggatgctatgttgtggcattgatgctatttatttattttttttgataa

SEQ ID NO: 404974 - DNA, 548 bp, Cannabis indica
gttccccacctcgcttgttagagtagtgagtagttggtttaacatgttcactgtcattcaataatttcctgggattagctctccacggatttcaagaagcaattttaggctgctagggatagacgacccaaagcagcctcgctaacctatataaagcagctgcctgacgaaagacttaagacatacttaagtcattttagcacagctgccgctagggttagaaacttggatgacagcatgcagcttacagcccttcaggcggggatctctactgatccattaaatgccgggggcgagttgtgggatgatctacaaggaaacccagtaagaaacatcaatgagttcaacgagagagctcaggtgtttgtctggaaggtagaagcccgaaaggaaatgaacttgttgaaaaaaagctcgagaggtaaacccagtaatgtttcaatagggactgcttccacgagaaaagaaaggacggaatcaaggaactgtcgaaggataaaaagaaacaaaagaagcatgacaaatatgtgtcagtgtatactatttat

SEQ ID NO: 404975 - DNA, 759 bp, Cannabis indica
tccatagcctccctggcttctcgcagctcacgcttggccttggctgtagcatcaccttccagcttcagctcctcccggcgcttcgcctccgcctgagcctcctcccggtgcttcgcctctgcctgagcctccctttgttgggcctcctcccagaatgccctcctctcaaccgacaagtcccgcaaaatcctcacggcctcgtccatgccccaaaattcagacatgacgaacccatagcctccctttgttgggcctcctcccagaatgccctcctctcagccgacaagtcccgtaaaatcttcacggcctcgtccatgcccccaaattcggacatgacgaacccataatcaatcaggatcttcaaaaggcagtcggtctcggcagtaatctgaaaaaagaaacaagaatgaaatcggatgccttaagacaaaatataaaagggaataaatcacaagaactcaccgcggccagagcagtgctgatgtcctgaacttggtaaaccgagttcactgaggcgcaagtagcgtatctcttggctaggaattgagtcagatgggagacaaactgcctggttatctccgaagtgaagggagcaagagtaggcccgacgaagcagttgaaccaatccgtcagagggtccatgttcaggtctcaaggattcctgaaggcgttctcccgcaaggtgttctgttgctcctcccgcaggatcttcttcaaggcctccacctcagcatgtccccggctgaactcgtccaaggc

SEQ ID NO: 404976 - DNA, 1000 bp, Cannabis indica
gtcattagtatttactatttcggcgcatgacaaaatgtggataattacttataattttgatttaatgaacaaaaaaaaaatatctgacaaaaaaaatgatacaaataaataaatattttgaattttaatatttcttatgtttatcacaaacctactaaataataaagcatttgtcttaaactttgataatgtattgaattgtgtaaattttttaaggtgataaaaattctttcaaattatagagattgttcgatttaaagacttcgtactattttaccgaaagacgtctaaagtggatgaaagttctaagagcacaatttagaatatattaaagtttagggagcacgatttcaatttggtacatatattaaagttcgagagacctgatctgtacactgtacacgtcaaagtttatggataaaaaatctaattaatcctttattaaaattatttaaggatgaaagataaagttagaggagcccttttaaatatttttttatgtttccactgtatttaataagaatgttaactacttaagcaaaatgtgtcaaagctgctgaatgaaaatgtcaatcagcagtcaaagaaaaacttgctttacaatgttaagcataaaaaaaaaaaagacaaaataaataaattcaaacaacaatattacacgcaaggcaacaataatacaaagtttaatattataatttagtagttgcacttaatttaattagagagttatgttttgagaattgagatgataataatattatagcttaggtgacgaagtgaacgatcatgtggccaacgttggatttcgatggccccctcccccttggctacgcgctcatggtaatgtgcgccacatgcatatcctatcattacccacatattcatattatcatcagctcatggattttattttaagaggaaattacactttataccctttttatattgtcctcttttattcttaccatcttttttaaaatctatcatttttacctctttt

SEQ ID NO: 404977 - DNA, 555 bp, Cannabis indica
caataaattaaaataaatataatgacaaataacaaattcaatgaaagaagaaaaatgtatgtctaaagaaatattttattttgttttaaattgtatgtatagaaaaaaattatatataagaatagaatatatatttgatctattaagttttgaaatatttttgtattatatgtattagacttttaaattatttttttctttacattaaaatattaattttatgtataattttttaaaaattttataaatatgtgaggattggataagattggttacttttacatttcaatcaacattaatttaatctgcacaagtgcagattttgaattttccaattcagtcccacccacaatttatagattagaatggattgaatcgtgcagattgaattggatcgacttgaagatccctataaaatatgtaagaaattaacgaaatctaaataagtccattgcaaacttgtgagttgagtaaaacgcattttataaattcaatgctatgccatgtttgactatttattctattcatcaagtatcagattcatagatcaggagt

SEQ ID NO: 404978 - DNA, 582 bp, Cannabis indica
tttgaacccaggtgtcgcgacatggtattaagcatgccgcggcgcgctcagttctttctgggcagatccttttgcaaactttcaatagccataactttgtgatccggactccgatttgggagttctacataccggttgaaagctcttttcaagctttatctgaatatttgcattttaaatgccatgtgaatattttatgaaagtgaaatcccaagttaaccctatttgtgaaatcccagatttgtgtgcctaggattaccggcacctgctcaggagcacccagggattttgaatctctaatattgcgggacagcaggtaagacaatgattagcacctagagtatgcgtagtggcgcttatattgaaaatgatatgtatgagggtttagtaactgggattagggttattaccctaagatgagcggttgatggcctagggttattaccctagtgatatatgtgtgtaaattccatgccatgttaaatgtaatgagatttagggattatgcgctcaaggcataatcaggttggactcggtaaccataaccgagatgagccaatctaaggccttattgtattttga

SEQ ID NO: 404979 - DNA, 581 bp, Cannabis indica
ctctttttgggcttggcaattgaaggattatttgttactgcgtattcttcccatttgggtaagcgcaccgcacgtggccttgtgaccatttccatgttattttctgaaagctcatcaaagaacattgcttccgccatgtgagcttcttctctagcaaacggtgctttggtagccgtgatatgaacatcttttccccggatgtgtgccttgacacattgatgcaacgtcgatggcacacaatgatgtgtatgaatccactgtcgtcccaataagagatggtacgaagtgtctgcttctatcacatggaatcgagtgggtcctctgattggtccaacctctagctcaacagtcacataccccatagtttttacagacttggcagcaaatccagtgagtgtaatcggttgtgggatcaacccccctttgacctctttcatagcagaatacactccaattggcatgagatttaccgaagctccgttatctactaaagcacgtttcacttttaagccattgatttttgcctcgacatataatggtcggttgtgaaggaacggagaagtttgtatgtcagcattggt

SEQ ID NO: 404980 - DNA, 830 bp, Cannabis indica
gtccagatagaagctatagattccatatctatgtttagcgctcccactcaattgtactatcatgttcccaaaatgtacgtatcaccctgaccaaaaagtaggcttaactaacaaatcaaagaacatgaataacactcctgagattgaacctaagcatgtcaggattaagatcttttgatctaagatcaaccagtgatattgacttagaaagatacaacggtaagattataatatctttaccaagatcaatatcggtcccagtccaatgtatactccatacatccgaaactagcatactttgccaatgttctggaaagaacataacacttatccaaggtgtaagtatactttatcgctgattatcacatcagtgtaaatccagtgcactgatgaatcagggacattgtcttttgaagcatataatcacaatcacattccactgtgttgacatcactgtaattgtgaataactatatgttctggacttaacagattttgtatatattaaaccataaacatgaaaactacatgtaaacataaatgacttctaatcttttattgataacaaatcagattagattgaaatgggttttatttagggcataaaatcccaacaataaccaactgtaacgaattgaaaaagaagcagataatgaaaagcccaatataaatataggaaaaattaaagcttaatataaacgtccaaacatgcacctgtagcttttaggaagtctgtgtttcgataatatcgggctttaaagatcaatgatggtaaagagtcaggttttttaagaatccgagagagtttacttgcatttggagaagtgctat

SEQ ID NO: 404981 - DNA, 661 bp, Cannabis indica
atttctgaaaattttgcaggatagcttaaaataagtgtaaatgtatataacaataaaaaacaattgactaaaaattttctgaataaaacagatagaggtgcattaatgtacccttttacgagtgtgcattgtagaattttcttttatgtgtgtatatatatatatataatatatttttttgaaaaattctacaatgcacccctaaaaggagtgcaccgatgcacccttttctgtttcggcatgttgtagtctaactgtttttcatgattgtctatgttatagttatttacgacattctgtaaaaatttgagaaattcgaaaaagtttaatacgttgaaaatagggttcaaatagtctatttcacacctgtataaaataaaagaatcactcgtgaaattttagaccctgttttcggcatgttaaatttttctgaattttttaaaattttgcaaaatattttaaataactacaacgtagacgattatgaaaaaaattctcctgaatgccgaaatagatagggggtgcattactgaacccttttaagggttcattgtagaagcaccccctatattttctttagagatatataagataggaaaattcaacaatgcacccccttaaaaaaaggaagtgtactgatgcattcctatctgttttggta

SEQ ID NO: 404982 - DNA, 568 bp, Cannabis indica
gaatataagtaaaattaaagttttaacacaaaattgttattttaaaataattagaataaaaaaaagtaaaaaataattgaaatagaaataaaaaataatttggcaaataatgaatttaaattttacatttttaaaataaagttaatctaataattaggaataatttatataaaacatgagtaaataattaactttaatcataattggtgattttaaattgaaaaaaatattgtattatttgataattagtaatgaaatatcaagaatataaattaaattgacaaattatcatttaataaaacaaaaatttaatcttaattataaaatttaattaggtaattgatagtttaaaattaattaaattaacaattagttaatattaaattaatcattgttaaattttaaaaaagaaagtaatttttaatttaaataaaattaaaagaaatggcttaagacattataagatagcataaaataaaattcttatcttgatttgatctctttgattataaaccaaagataggatagcataattgtatttgtattatcacatagtgatatttttttt

SEQ ID NO: 404983 - DNA, 534 bp, Cannabis indica
attaagatcgttgaataatatgtaggtccaaaaataataatatgccaacaactttattatttattatatattgttttgtggtaggtccaaaaatatatattatagaaattaattatatgacaatttgtgtttttgtgttgtgatatgtttacgatatatttattgtgagcaccaatacgatccaattattagttatatcaagatcctaagtaggaacgcaacatagatgatttcttaactattttcaaattatatggtcgtgttgtgtcacaaattatcaacccttatataaataagttgaaaacagttgggtctagaaaagtttgtacctttgaaaggtacgagaccttttttgacaagttcatcgaattggagataccccatgaagctacaagcagaacatgtccatagtacaacctctggaatcccaaactcccgtgcagcttctatcccaaaagtcattaccccatcagtaacgatacaagtaacaggaggcacttcacaacaatttttgagcttatgtaaaagcttttt

SEQ ID NO: 404984 - DNA, 517 bp, Cannabis indica
ctttattattaaaaacatcgtgtgttgatacgacttgcctcagaaaatagtctcagacaatgaaaagtagtttgactgcgaagaattcacaaacttccgtaaccaacacagagtcgtcaaaagcttctccgtggttgcaaggccgcaaacaaatggaccggcagaggccgtcattaaaatactaaaagttaccctaaagaaaaagttgttggcctacaaaaacaactatcctgaagaactgccacgagtattatgggcctaccggactactccaggaaccacgaccagacactccccattgtctatggtgtacggaggtgaagctatggtacccgtggaaaccttgttcccatctcatagaagggcaacatatgatctggcaacgaacaaagccttattacaagaagcgttggatcaaatggacgagctccgagatgagtctcaagtacggaggtggctaaatacttcaacgccaaggtcaaagatagaaaattcaccattggcaaactagtccatg

SEQ ID NO: 404985 - DNA, 963 bp, Cannabis indica
caagctctttggcatgagctcaatgagtacgaaccaaatatcccctgcacctatggctgtacttgcggtacgatgcaaaaagttcaagattattacacaagaaccagatcattcagttctttattagtctcaatgagtctttttagggtattcgggctcagattatactctatgatccattcccctcactgtccaaggtgttctccatggtttttcaacaagagcgccaatgctgtcttggcaatactagcgttgttgctgctactttggccaaaaaaatcccaaacaactatatcggagtaagaaaccacagccaacttgttctaactgccttaaactcggtcaccttgttgataaatgctacttcctccacgattttcctcccgaatatggagacaggaaaaagaccaccaccactgcttgggaaaatcatgcctcggtgactcccactccaaacccctttggaactagctcttcccaacttcagctcagccaacaactgatctccctactcaatcaacaaatccaaggcactccttccaccagtgaaaatctccctgtggtttctaacgtcttcggtaatgacaattttttcctctttttttacggattgtagatagtggtgcaactcatcacatatgtcactctctttattgctttaaatctttaaacaaaaataatgttgctaacttggttacattacctaatggtcattagattcatatcaacaaatctgaaaccgttaaaatttctgaccaacttgtcttaacgattgtcttgtatattcctaaattcaaattcaatttattttctattaatgcttatcttgaacattgtgttaataaacttactttcacttttgaccagtgtttgatttagaatccctccctgactactacgattgggacatctaagaaagttggacaactatttttctttgaataggatcatcatcttcatact

SEQ ID NO: 404986 - DNA, 500 bp, Cannabis indica
ccatttccactcaagaatctttacaggttaaagtaatctcgctggtctttgtcgctctgccttaacttgttgacaagttagagattttgacacgtattccactatatcacccttcataccgggccaacagtacaatgctttcacatcttgatacattttaattgttcccgagtgtaatgagtatgtgtggtatgagactcatagcatcgtctgcaacacaaaccctatctttataccacaataacccatttgatgaaattgagaaatcctttactgatccagcctcaaacttttctttgtactcttgtaacactagatcacttagtaaagcagtcttgattctctctagtaaattagattgtaacgtaatgttggctatttcccaatcataaactcaattcttgctctattcatatccttagccaatttcgatgaaatcttcttcagttcataaacttgtcccggactttttcaacttagagtatgttgggttttatgcc

SEQ ID NO: 404987 - DNA, 504 bp, Cannabis indica
aagaactccaaatgatagatctaatcttcatccaaaacactccaaaacatttcttttattcatttctagctgtcaaaagttaagcctccacactccaagtcgcaatgaacctaagcaaattaaactcataacttaaaatgagttaaaactcaattatcagctctcaaattcaaaaattacaaatatgcttagacatttttttagtactaaatcaaatattttgttagatagtctaatgttggatatcttttctattttattaaaaaacaaataattgtatatgtttggttttatttggttatatggtgcaggttcattgaaaagttttagtctacaaagttgtttaaaagtttcattgtccagattctttaaaatatatatctttttatgttagttcaaaatttaatgttaagatttacagattagcaaatcatctctaagagtaaacttttttaatgatgcttctgttttttcaatcaattcaaaaagaaaaaagaaagaaaa

SEQ ID NO: 404988 - DNA, 604 bp, Cannabis indica
tatattataaagtttattaattaatataaaagttttaatttgacacgtttttcaagaaactcttcgattagcgagatgcactgaattgaaaaagcactgtagcgtgccttagcattagggcgttacatgtaccccttaaccccctctggatagcccaagaaaacacactttctggcccattgttccaatttatcaagtctgatgtgagcatatgctaggcatccaaaggttttcaacctgtcatagtctccagttttccatgtccataattctattagagtcttgaagtctattgcagatgatggacacatgtttatcaagtggcaagttgtcatgacagcctctgcccataagtcctttagccttgagtgaattagcaggcatctagctctctccagaatggtcttgttcatcctcttagcaaggccattctgttgagggtttcttagaactgttttatgccttgctattccattctttctgcaaagattggtgaagtcatctgctaaaaactctaggccattatcagatctcagtttcttaatttttcttccagtttgtgtctcaagtaacgttctctaatctttgaaagtattgaatgcat

SEQ ID NO: 404989 - DNA, 736 bp, Cannabis indica
ctaggctgaccaaaggcttggtgcgttgggttctgcttatccaattttgatgccgttttgaccataaatctagtttttcataataacaaagatccataaagttagagaagtcaaattcacagctttgcatttcttatttccaactctttcaaaaataagagtttcgagtctctcatttctacagaacagcaacatctctgagactagtgactagcctcgctaaaacacaaaaatatgctaagtgatgtcaaaataatacttagaaaccgtaaagtacatcccttggacgtttatacacttacccaacatcaaggctcacatcatatgtcaacctcggtgctaggatgttaacttgggcgctggatgtcaacctaggcgctaggtcatgaactgcctttagtaaaacaacaataactcactcaatttttattagattgacgcgattcaaattgtattttgaagctaattcaatgctctatcatgtgaatttttgaaacttcaatcgtaatcctaattctatcgtcatcaaatcttacccccaagagagttacaaaaataagctctgggttacctgcagcaaaacctattgggctcaaaaaaatggccatcaccaccaacaactagtttttaccgtttagattatcatatacggtcagaaacaatccaattttaatgtttcttattttttaggtcctccttcacctctaaaaaagagaagctccactaagctcatttt

SEQ ID NO: 404990 - DNA, 530 bp, Cannabis indica
aataaaaaaaaaaaaaagagatgcccttaaaaaattagataataaaattttaatatcataaaagcaaaaatgtattcctatttcactaacatatctaaaaaaaattaaataagtatcaaatcaaagtgaataataataataataatttggatatatattgaataaataggctcatcaaagcatataaggtcaaatatttgacaatattagcgatatgaatagcagtatatatatgataattaagcaaacctcacgtacgcatggactttatagttattgttatatttaattcttggtgtaataattaatatatcagaaaatatatatccatagatatttatatattcttttcattattccagtctaattataatatggtttcctattttgattgaccaacaatagtactttctattaattcttttaaatgacatgtcgcgactatataataatatattgatataaatatatatttattatatattttcattcatgatattaatatgtatttttatgatgtcaaaaaaaaa

SEQ ID NO: 404991 - DNA, 544 bp, Cannabis indica
atcgactgccaatactgcgtactttgtccctcctcgccctgtggccaatgccccaatcaaattgattccccatattgcaaacaggtacggcgaggtcatcattcttagttctattggtgttacgcgaggtatatgtgaaaatctctgacatttatcgcacctcttaacaaattcgtgtgtgtctttatttattgttggccaatagtatccctgtcaaattattttctttgacaagctttgccgacctgcttggtctccactaaagctttcgtgaatctctttgattatctcgcttgcttctgcgaggaggacaccccgtaggagaggcaatgaataacccctcctatacaatttgccttctactatcgtgtagtgaggtattgaatacaagatttttcgtgcctcattttttcggttggaagttatccgttgagtagatagttaactatgcccgtcatccctgtaggcaaggcattgatcatctcaacttcttccttttcacatatacttggtgttgggtttcgtgccctaaataaaactcatt

SEQ ID NO: 404992 - DNA, 775 bp, Cannabis indica
ctatcttccacacaaatggatagaaccatcgcagcactacgagaacacccaaaaaaactaaaaaaataaacacagtatactgcaatatgaaatttaataaaaatacacaagtaaaaaagtaaaaaataccgcttgacagtaattaaatgacaaaagttagtatacgatgtaaattttccttaaaaaagtagtatttattgttagctaaatttgactatggtatcttttgtgtcaaatttgacataatttttagtttgaaccaaatttaatatatattttacataacatgagagttattttagtaaaatacttaaaaaataataatatatcatatttatagctctctgaaaatgtattaggaaattgaatgaaatataactgaaggggaaacttatttccaaaattcttagagaagtttttacaaaaagataaagacaatattcttctctatatgtgatatagagtaaaaatcctatttatatgctgtagatatcttttactatttcattttaaatttgcaaaattataaataattataaaccctaaaattcacaataaaaaattacaccatatattattttttaatttttttttgaacttttatagtttaagttgttctcatagtttttatgtaagttgctatgtagatttaggttgttctattagttgcttatatgaatttccgtaaaaataattttaaaaaattgttttaaaatataaaaataaaaaacaaaatacaatgcacaaaactaaatgaaacatacaaaaaattatt

SEQ ID NO: 404993 - DNA, 1102 bp, Cannabis indica
aaaaataaataaatattgaatttcggttgctagttgcaatattaatagtaaataaaagtacttgtcattatagtattatagtggattgtgttattattattatcattacacttagatttttattcgtgggtaaatattattttggatcttatgttttataaaagttattaattaaacattttattttgttaaatgataaaatagattctgtattttataaaattatacaaataggatcctgaattatctttttatcaaaataaaacttaataagaatatgatttagagatgttatgacaaaatatttatttgtattagaaattatcttaaaagttagttttaattaaaaaaaaaaaaattattaaaaattgagttcatagtcctatttttatcattttaaaagatataaggtccattttgtcatttaacaaaagttaattataatttttcccctgaacgttgacatgtactaaatcatgtccctgaacttttaaggtcgttaaaaatgccccctgaactattaagattgttggatttaaagacttttgtctaattttattcaatttcaatatttcagtgattgtttatatactaaactatgctcctcagactttgatatataccaaatattatacctcgcgaactttgaaatatactaaatcatgtcccctgaactttcatccatgttagacttttttactaaaattggacaaaagtccttcaattcaacaatctcaatagttcagtggacatttttaacaactttaaaagttcatggggcataatttagtacatatcaaagttcaagggacaaaatttctaattactctttaacaaaatagaaaatttaatgaataacttttacaaaatactagatctaaaatggtatttacccttatttttatttatttatttacttatttctgtttttatttaattataagttgccatatctaactcataagggacaatttaacttagttggacgtcactttgagcaaatatagataacacgtatccagctataaaaattaaaactaatggactcaagtgaatattgtgacgatttttttaatttatatatttttttatttttttttac

SEQ ID NO: 404994 - DNA, 591 bp, Cannabis indica
ttgtcggttaattagttacccatcatcttttttctatatatataatagattgatgttacgtgcaatgcacgcataattatatttttctaattaggtttaattaagtaatattaaatgcaattcatgtacgttaattgttttttttaattaggtgatgaattttacttttttaattttttaatttttgaaatagaatttgagattttaatttttgagaattttttttagctatcgcggctacattggtgtgctctttagatataattatatatatatattatatatacaataaaagaatgaatttcattgttataagtattttatattaatctctctatagataaggattatattagaaaatattttgacaaaatttgaatttgattagagaattaattactttcaaaatgcattttataatatatattatgtcaaaacatatatttaaaaaaataatgataatgatatatacattcttaatttgtagttagaagactataattataataaagcgtacaaattattacaatcgtatatatatcattaatcaatttttttttaacaatatcattaatcatttttaaaataaaa

SEQ ID NO: 404995 - DNA, 1228 bp, Cannabis indica
attatgaactaaaatttaacacatactattttttgtactaaattttatataatttttaacttgaatttagtacatattttatatcactacgaaaattaatttttaataaaatattctaaaaaataacaatgaaccgtatttatagctctccacgtatatatatatataaatatatatatatatattcttaattaatcaaacaagggcttacaaacagagccaatattacatcataattaaacaatagcaataaaaccatcgagtaatacagaatgtacggcacttaattaattataagtttatgagataattaagcaatgagcatgcatgttaaatcaattttattaattatacatactgaatttgttgttatcatcgtaatataatagatattaattaatttaaaaataaaattataataataataataatatttacagggatatacacttttactggtgcaagcccatcgaagtgaactaaggcccccaaaatgcgtagataatattaatcaccaatgcgtagaagcaaccacaggagaggcctcaatcctatacgtggggctctaccttgttgctctggggactggaggaatcaaagcagcactcccatcattgggtgctgaccagttcgatgagagggatccaaaggagtcgagtcaattgtcgagtttcttcaactggttcttgttcagcctcaccattggagcaatctttggtgtaacggtggtggtttggataagcaccaataagggatgggatcgtggctttgctgtttgccttgtagctgtcttctttgcccttctttctcttactttcggcaaatctttgtatcgccataacgttcccaaaggaagcccactcctccgttttataagagtaagtacccactacttagtatatgagcatttctattagttaaggccactaagtattgccttgagttgtcttcttgcaaatgaataacgatatttagttactaattgggagggattcgatatttaattataggctaaataggatttttgattcccgaactttgacatgtaccaaatcatcatgcctcttgaatttttctaatcgttaaaattttttcctgagttattaaaattgttgaatttaagaatttttgtttaattttattaaggaaagtctaacaaggatgaaagttcagggcatgatttgatagattttaaagtctaaggagtatgatttagtacataaacaat

SEQ ID NO: 404996 - DNA, 535 bp, Cannabis indica
tatatatgctggtaggaatatgtcaactgtaattaaacaaaagatatctagtcctagatctttattcgaattcttcctcatatataattgcttaaattaagaagaagaagaacaatatcaatctcaatatctatccaatgatatctcataaattatatatggcactgttgtttggctgtggggctacgtcgttaggttcttatttgacttttatttttttgaaattagttcttattagacttattattcctctgaactttaaccaattatttataataatatatgggtaaatatcttaattaaactctctattttattaaatgataaaatagactttatatttttttaaattaaaaaaatagaatcctgaccttaattttcaacaattttactttttaatataactaattttaagacaaatatttctaacacgaatagatacagaaaaatgtaaccagttttgtcataatatttttagattagattattattaagttttattatgataaaaaaatcagttcatggtcctatttgt

SEQ ID NO: 404997 - DNA, 1396 bp, Cannabis indica
tggaatttagggttcattagttgctgttggcgttttggtttgttttctgagttgaatttgaggttatttaagttagattgtagtgttttggtggctgtttatgtgggttattcaaggtttgagcttaagagctcaaactttgctctctcatggtgaaatttgatttggaggttctttagttgttttgttgctttagatatgttgtgtatggtctaaataacaggtctgggaagtttgtcttgaattggggttgaaaagatatgaaaattttggtctttcctgcactgaaccggaattccggttcagaggggcctgtacgaactggaatttcggttggctcccaggaatccccacagaatcggaattccggttgggaaattggtctaccggttggggcaattttgggaaccctagtttttcccatttttgtgttgtttaagatattgccatgttatttatcgatagggaaacttatagtttcaattttaagaccccagaaagtgatttagcgtatcactcacctatgttctgattgatgtgatttaggagcctgtaattcgccgagcagttgttccacttaggttggccggcacacctgaattcgaaatcaaggtaagattagtataatgtcatgcatatgtttatacatgtttagcgtacatgttagtttctgatagaataacatattagatatatgttaggtaaatatatatagccatcagattagcatatcagggcaacagtgaggtgtacatatcgttgcaccgagatgccatcagatatatgctaggctatcagatagtatggattaactgctaccacatcaatgcgattagagtactgagtataggctggattcgcggttagccatactttgtcaagatcgatcctgatttagttagggttatggttaggtgtataggcgcttgattataacccaggattttagtatgtttattattactatgcttttcttactgagtctgtcgactcacagtgctattgctatgtgtaggtaagggcaaggctaaagctgaggagccatgagagcgagcaggggaaggttgtacatatcggggcgattaggcctagagcgtacgatcctctgaacaccagggtttttgtattttttcgctaggcgacaagttttttgtaattatgtagtaaactttcgtaacagtattttgtaaacgggatcccggaagtttataaaagttatttgttatatttaattaaataagcaaaattttaattattcatattttccaataacctcgttgattagcaacgagctgcatagtatgttaaaaatcacgctaacacacctatgctagttagggtgttacaatttggtatcagagtcgccaggttgtcttccgaagatcgtcacgacatg

SEQ ID NO: 404998 - DNA, 526 bp, Cannabis indica
tgttgtacatgtaaagtataaattatttgttttattttttcacatatattttagtatgtaggtgattgattatttagctaatattttttttttaacacagagttttggtgaaatcctacatttttacattctattttaaaaattttgtgagttttaatttgtttaaaagaaaactataagttctatttagaaaaacaaactacacatataaaactatatgaacattgtttcttctacaaataaattaaatctaaaaagttcacatggtttaaaaactatgtcattttgatctgtcaaaaaaaaaaaaaatagcatttttttatgggtgattgattaatattttatccaataagaattttttttttaaaaaaaataatatacaacatattatttatatttttttgaagtaataatttttttaaaataatatctacttagactaaatttatttataaataaatattaattatcttcattattatttatatattatattgatagattaaattcttttttaaaattattt

SEQ ID NO: 404999 - DNA, 936 bp, Cannabis indica
tcaactttatatttatccactataataaagttcgaaaaaaaccaactacaaataatgacttaaaaattaagtatatactattgctttattaggcacaaataaaaaatcattacagaacaaatcaaaaaatcattaacaaattttttacaaccaaaatgaaaattttaaaactaataataataataataataataaaaagatttactaaattagaaataaattagctagactttaactaaaaataaacatatgaaaattaagcatatttttattttgtattgtttgtatttttattttttcagttttaactaaaaaaaagtaacaatattacaaaaatactttcagttgaccaaataaataaatatacaaaccaaataaaaaaatacgcaaataccatttacacacaccttcaacccaggatccatgattcttgggcaactatctcgcaaccatcgcgcaactacgcagcaacccaacgcaaccaaaacgaaaattcaaccagaaagagaccaccattaatctcggtgacttcacctgagaacacgaccagaatcaatcaaaacaggggttgtttcgaattcataaaaaaagtgtagaaaaactactacgaaactaaaattcaaccgaaaatccagtttaatttgcataaaactaatgtcatgacttcaatttttagatccatgaaaggtagatctcaaaaagttgaactggagttcccaaacaatccaactcaagtataatccaaaaaaaaattacatcatgttatagtaaaatatttatcctggtgtatttttattgttctccaaatttctaatagtgaatttgttcatattaaatcataaatagacatgtagatagagttacatacgtgttaaacactgttctgatttttaatgtttcacaacagttgcattacagttgcataaacattttgct

SEQ ID NO: 405000 - DNA, 1033 bp, Cannabis indica
taaatagttaaaaaaaaattgcaaaactatactagtggggcccacatacatggccgactacaagtcttatttttggtatcattttatcattttttactccatataattaaatcctaaccctacgtgaattagtataaaaagaataggatggtctcacaatccaactaatgactcataacctagtttacaacttgtcagacaactagagagttctggagacttcttcttcttcttccttctaatttcaaaatctcttagtgttcttcaacaaatttcaagccttatattgagtgagtgcatgcccacacataggaattgtagtactcaatcatagtgtgtaagattgtgaagaatttaacacatgaaggagaatcaggcttagatcttgataatactctgcgacagaaaggaacgagggttagagatctgagtggaaggagtcatttaattccgctgcaatcaatgtaagatttcttaaatttatatgtttttaaatttcattattttaaaaattcatatttatgatgctaaacaacaaacatggtagtaaatttaaatcctgctaaaataatacccaacaatcgtatactcttaattctcttgtacatccttacaagattatactttctctatatgaataagaaattttcagatatataataattatacttctatagttaatatcatttatcttatattttatttcatatattttgtaatatattatccattaattacctgcttttagggtataaatccaaacaatctcattcaactattcaggctaagtcttgtgaacgagaccctccatatagtgtagttctaggagaccaccacatcatcattggataaatatatagaatttgattctgctatatttagtttattcattcttttatttccttcaggttcatgttgtttaattaatcattaatattcttaatattaaatatttttttattcaaaactgttgttttggaattgattaatctagaaccctccattagtcacatctaattgattctatcaatta

SEQ ID NO: 405001 - DNA, 677 bp, Cannabis indica
agtgtcattttatagtacgaggaatcaatttccaattcttacttttcagttattttttttctttttaaaaatattaaatgtgtgattattaaggattcaacctccaaacttaactttacaagttttatcagtacaccataatattagaaatattattttaataatatgctgaaattatttatatagatatccgaaaatttaattagctactagattctatttattctttgatagaccggatataacgaggatctaagaacctgtacgcctgtcaatgaagggacaaactagtacctccgagaccctactaaagaattccagattagaggagatcattttccaattaaagcacatattatgctaacatgttttggtttgtttagaggaatgttgttattgggtatcagtagtgttttaacacttttagaaatatcgcttaatgatttactagtaatattttttaaaataattatattaaagtatatgagactcatacttaggtacaccaataacaatattaatacttagaaggttggttgataccactaagtatcctttaacattgttttttattagtcacggcactaaaagtattcataaaaaagtaatgataattatgggttattcttgaagtgagtggcctatgttagggtttataaaacactcaagaaaatata

SEQ ID NO: 405002 - DNA, 876 bp, Cannabis indica
cctggtgaaatctatgggcaccacatcaccaacaaatttagacagttgatcaaactccagagtatactcggccacagacatctttccctgagttaacttcacaaagtcttcctgatctgaagtcctcacagcaacattataaaacttttcttcgaatagtttcttgaattcttcccatgtcattacactgacatcccgggtctgacccactatgtcccaccagacgcgggcatggtcttgtaacatgaaggctgtacaatttactctctcagttcccgtcacccccatattttcgaggatacgggtaatagtgctcatccactgctcagcctttataatgtcaatacctcccagaaaagttggaggttgcagcttcacaaactgctcgaacacagaatctcggtgtggcataataaacccctggttacccaccactggcacaggtgctggtggtaaccctagatcaactagggcagccagttgccttaaacgttgcaactcttcttcttgacaaagtatgatacttcgcatttcttgaaacatctgctgccagtcagtaggaagattagcattaccatcccccgcattatcccccgggtcctgcggaggtggaggcggtgccggtggatcggttcgggcagcctcgggctctacttgctcgccatgtggtctagatgattgtggagggtccattattagtacccctgtaatcaacaaccccagcgagttaagcaacaataccacacttacgcacttatggcctgaaacccaaactcatctatttacctcatataatattcacttaaacaaatagcatttaaagcatggcatcacataacgcatacatactctagatgcttgcatactgcctaaaat

SEQ ID NO: 405003 - DNA, 570 bp, Cannabis indica
gcatatatagtatatattatatagcattcatgcatattaaagtgtaaataaatgttatatatgtgtgaggtatgtagcatatataattgtgtaattaatatatatattatgtgtatatgatatatgatatttacatgtgtatatagttatatgtatatgagatatataacatatatgtttatataattaatattatgtatattacatacatattatattaattgacatgaaattattatttgagagttataattcatgtatgagagttatatattaattttgtacattaatatacaaattatataatatatatgataataatattgatagtaatataatagtatttattactattgatgtggagattattatcatatatattgtgaataaagagaatttgaaattcttttttcaatagtaattttgagaaaagaaattgtaacttgtgagaagttacattatttgagaatttaaagtgattaatatctcattttatgagataagaaaaatgaactatgagagttacacttatgagaattgtcttgtcatagcaagaacaaatggatcaaa

SEQ ID NO: 405004 - DNA, 1081 bp, Cannabis indica
ctccaaccgaacagcttcggcttcccctctggcttcttcagcttccttcttggccaagtctgtctccgccttcaaggtgtcgaacagagccacgttcttggaagcaacagacttagcccaggagtaagtataggccaacttcagactggccagcacagaggaaaaactttagcatattgagctaagtgtggaaaattaaagggaagtatcaaagaagacttaccctggtgaactccttcaagactccgcccactagcacatccaaagacgagtcattgtcagcaccagcaagttgctcactgacctcaggaacgagctggttcatgtaatgggccagcatctccttgccctttttggcctctggaagcactagcaaaggtggagttggtgcctgcacccattcaggatcactcctgaccagttcagacccagccgttggtggtctagactccttggaaagatcaataacctcattggaagatctcttttcctttgaagaggacccctcaccgcccttagacttcttggccggtggataggcgctagagcttccgcccattctcttccttagagcgtcgatcatttgccgagacatgtctgcacagaacaaaaacagtatggttagaagacagccatctgaaacacaaggcatgaaaatcaagaagctcaagaacaaaataaagtaaaatgcaaggtaacagcccacacaagactcagaagttcatcatcacttgacatcgatcttatcttagacatgacggctttcccttttccgaacacgggaggagatggccgagcaggtgaaatgggctcccttatgcgaattgcatgttcaacaggcctgggcgaggccgggagtttcttcttcctcttcagtggagtcaactgctcttcctcagcttcatcttcaggattcaaaggctcctgagcatatttcttggccccccagatttcctcttcttccctgttacggacttaggagtaaagtcctcaggataaagcctgtacctcacaagattatcatcggaggtcaactggataatgttccagtcgacccccggcaaccgggcaagtttttgag

SEQ ID NO: 405005 - DNA, 618 bp, Cannabis indica
aattaacttggcaatataattgctctcgtgattgttttgatttcttttaaggctcgttaagtacactatatcacgttgtattgtataagtattgtattgggatgtaatgtactgtatagtattacttaatacaatattatatttggtattggcttgaattaataggctatgcaaaacaatactttttttcaccataaacccgaccctgattggggccttgaccatagccccacaccccgatctcaatcccataccctgacccaaccccaacttggcctcgaagtcaaacccggaccctagccccaactccaaacctcaactctggccccaaatctgaacccacattaccacctcgaccctaaccagaccccaactcgaaccctgaaccctaacttgtcctcagccctgaaccccgactaagattttgaaccccgaaccccggtcctggagccgaacccgggtaatttaatcctattacatagtgttttacgtagcaaaatttaattagtgagtagtagtgtatagtcatatatataaaaaaatttctactcatgatataacaatttatatttatccaagataacaactctcattaatatatcacatagataatcatgc

SEQ ID NO: 405006 - DNA, 664 bp, Cannabis indica
catttaggattagttctatatgctaagcgatttgggattgaagcaccaggaataaaatcaatttgatgtcttttcctcaaataggtggcacaccatgtggtacctcctcaagaaacacatcctcgaattcctacaaaataaaaacatcaacactagacaaacataattattggttgttttgtacgccaagctcacataatctcacttttttgggcataaaaattattttttttttctctattttaatctcattgatagaactcttctctttcttttctctctcacttgcttcgactattttctctctttggctctctttttttctcactcaagttctttttatcactcaatttatttttatcactcaaattctgttgatcacccaaattttcaatctcacttggtcatcatagacttgctttggtgtcaaaggagctagagtgactgttcgctgatggaagtgaatgaatacttgttggtgaagtcatcatgctggactcaccgatcaaattgccaaggttttcctagaagaaggtgtccagcttgcattgggaccacatcgcgcaataccttgtcctcatatttaccaattcagaaagattacaaaacttgtttggtaactctcacttcacaactatcattaaaccattgcaacttgtaagga

SEQ ID NO: 405007 - DNA, 875 bp, Cannabis indica
ttacccaatatatatttagataaacataaaaacagtaaatatggtctaataaacacctctaatagttgagatgacattgcataggggcagggccggcccaagcattgggcagcttggccattgcacaagcccctattttctaagcctaattttttttttaaaaaaagcctattttttcatttttttcctattatttatacataaataaaaaaattaattaaaaatttatgaagctaagttttttttttttttaaaaaaaaagctactaataaaattgtagttttaatatatatggtttttttttaaagggcccaattttaaaattttgcacgaggcccccaaaatgctggggccggccctgcatagggggcaaaattgctacaacttttgagaggtgtatcccgagcaagatttcctccatttaagaagcaattgttattcatgactctagcaatattgtagtaaatcacatatggagaaaccgaaataacttggaccataccagcattaatttcgtgtattaaacaggaaataatgagaattaggatacaatttattttaccgagaaaaaattgaaataaaaggatttagaatggatatatttttataaaagaaaaaaaattgacatgtttttatagcatgcatgaaaataaaatgtagagatagcaagcctttttggcgctgctagtttgtaatataatcacattgatagaattatatttaaatttccataaaaattaatactatatatataatatataaaaatattatataaattataatttaatataatattatatggaagaggtttcaatggttacatttttattgtaaccatcatagttacattttttttaagccattggattactatt

SEQ ID NO: 405008 - DNA, 627 bp, Cannabis indica
ccatccaaaattgaatttgtgggttcaatgtagctaaggttgcatttggttagaagtaataaactaaaatgaaatagaaaagaaacaatcttcattgtattcatttgtttggttaaataataaagtattgtaacagagagcacaaattgaaacaaaatcacacggtggtattattccttacccccaaccaagattcagttagttagttagtctttcactaacttaactgtcaaatatgaaagcaactatagtgagcctcttggtctatataaagaagactactcatctcatttcagaaagggggaagaaacataagaataagggcaagaactgagacacaacaaagtagagagaaatcggagtgagcaatggagagagatatctgagagagagagagctgggattaggaaattgtattgagcaacattgtcgattatgctggctcggattagtgagttaatgagtgttgagagattgcatcatggatgacttactttgattatttccttgtagctcttgagattgatatctcttattctcattatcaataaagattggtggcaatgctttcaaacttaagtattttttttcaagacttcggcaagaccaagttcacattgaacttag

SEQ ID NO: 405009 - DNA, 502 bp, Cannabis indica
tctggtctgtggcaggcacattactgacacgaatttgttgttgaaggaccttgtctcgcacaaagtaaaggtcgatttcgatgtgcttggtgcgggcatggagtactgggttggcagtaagaagggcagtactttgattgtcacaccagacggtgggaattcttggttgagaaatatgcagctcattgagaagagattgtatccatgacatttcagacagtggtagctaagcttctgaactcagcttcagttgaagatctcgagatagtgacttgcttttgagacttccaagctactagatttccaccaagatagatgcaatatccagttgatgaccttctatcatccaaatcaaaggcccaatctgcatcacaaaatgcttcaagggtaaactctgaaactggtttcagaagcaggtcgtgatcaagggtgccggctatatatcgaagaatccatttcactgctatccaatgttgtttcagtggcttgtgcatgtatttgt

SEQ ID NO: 405010 - DNA, 673 bp, Cannabis indica
actaagggatattttgggaaaacgataaattcccgacttatcccgacattcccaatgtctaaataaaccgtcccactatactgaaataataaattgtgattttactgagccatacaccgcgttccttgttgccgggcaccgaaaatacaaaattatgaagtttcactatatgacataaaaatacattcagaattcaaatataaatgcataaataattatttaaatatctataaataattttcataattaattctcaattaattgttaattttcaaattaaactaagcggtatttacactcaaattgatcatttgtgatgaatcttaaccatgaagaatattaaaattttgactatgaaaactttaagtattttgaaaatatttacattcttgagatgtttgatattgttggagaactcttttttacataattatttttttacttattttgaaaatggtcgcgtataatacaatatgatcattataggactttaataagatttttttaaaagaaaatgtagtgttgaattaattgatttaataaatattatattttattaaattatttttagattttaaatttttacgaatagttttgaatatataattcttactaattatttaataaattagttattttttattattaatgtaaataatataaaatgcgagat

SEQ ID NO: 405011 - DNA, 565 bp, Cannabis indica
gaaagattccccacggggacgagcgccacatgtgataagtaaaattgcattgcagaaacaagtgctcagtcaattcttcatccgtttcacaaattggacaatgtgtgtcctcaataaggaaccgcttactaagagccgacttggttgggagcgcatcacagagaatgctccaccacaaaaccttatgacactcaagtatatattgttattctatagcttgttccaaaaaactggagccacattacaatgggggttcctcttgaggccttggataagataggccgacttacaagagaatcgaccattttaccttccttcgtccaaatccaataatcttttccttgccctgtaggactaccacctttaagatggcctcaattgtttcattatcaaacaggttatgcaatttttagagatcctagtttccctatatgtcaatagatcagccacttttccagacaaaggaaccagccccccgagcttttggaaaaagattcttaccgtgagtgatccaagggtcatcccaaatatttgtatctttcccatcaatgattactttgcaagc

SEQ ID NO: 405012 - DNA, 557 bp, Cannabis indica
acaacagacaaaaatctaatcgaatttttttgatttaataaaatttattttattttatataaataaaaagtaacctatgaatttctcataaatcattttatttttaataataaatcattttattttttatataaataaaaagtcacccataaatttctcataaaccaaaaattctattgttatatagccacattatatgaaatacatataaatttctataataatttttttaagtattagtagtacttgtaattatattttctctttcatccgagaatttattttctaactatctttttcaatttatgataagtacgcttttacttttaaaaaaaattaataaaattttaaataatcatatattattaaacaacttgacttttcaaaaaaactattttattatttttttttttgtaaaagggaaattttattaatcaacttgaaaagctatcatcccttacaatcgaaagtaaatcagatggagcagaaagctcatcataaatacaatctgacataaaacaagaccgcctcgcaatacagtgagccgccctatttgc

SEQ ID NO: 405013 - DNA, 1273 bp, Cannabis indica
attgaatcgtcatcaaggcggtaaaaacgtatgagtgcccgtctcacacccattaatgcgtcgtatcaataaatggacaagaaacaaatcgaccctacaaaaagtgaataactgtagtaataattgtcattaaatacaccatcacgcgcccaaagcacgtgccaggaaaccgaggaggcaatcgaaggcatctaagcaagccttgttcacttcataattaaacaaggcttggggggtaaatgttccccctgattttgcctaaaatacgtggaccaaccggatgatgacacgtggatgggaaagggttagcatttaaataaaacagctaagtcttcttaaagcaaaggatcaccttagacatgcctctcggagaaggcatgtaagtctcatatgctcccggagagcaagatggcaacaaagcatctccaggtggtgtcagattccgtctgaacagtcatctcgcatttaatgccgcatgggaggaggcgtattgaaactgccacacgcaataaagtctgacgacacaacccccaatctgtacctactaggctatgatcaataaagtctagtgacggctactctgtgaggaatcacatcagtcaaaaaggattaaggactgccctcataaaatccctacagaacctagggattagaccatgcattacccatgatatattcattgggaatgtgtaactttactaatagttacagaaatgcatgtaccttaattctagggatcaccccacaaaaaacactataaataccccccaaagctcattaaagaggggtcgagaattctgggtttcataagaactagaagagtaaaaactcaccaagaacattctctgtattaaatactatcataaatacacagactcgtgaacaaagcccaataaacgccccaaccacgtaaaaatctctctcttaatttcttacaactctccaaattataattattttattggttgccgaaaacctcggttaacagttataatttcacattaaaaaaaataatatttttaatttctagtttttgtagtatacattcttccatttttattttattttacttttgatattttcttttaagaagagagaataagtttgtattaaaagttctttaggaccattattaaattgtgttaaatataaatgaattatgttagattttatcgcctatcgttaacaaaatacttttcaatggaaaatataaaaggggaattaccacatatactattttttaactttttttttctttttaaatttatagttt

SEQ ID NO: 405014 - DNA, 466 bp, Cannabis indica
gaataatagatctaaggtatataaagttgcatttcggttgatttttgatttccaatatggaatatatttatttataaacacaataagaaaagcaaattcgaataaatctacggccagttacgtataagtattgttttttttttttggttgttttgtagttgcattatcgttttataatagtatttatcaaatttgtaagaatttcatttgatggtgaaaagggaagatcaactttaaaaaaaactgcttctacatggtaagttttatgaaaataattgcatattcgttttataatagttgcaaaaatattttgatacaaacaaaaatattaaaaaaaaaatagggttacacaattggcaacaaatgacttgaaataacaaaaattaggagctccaatcaatccaaatcaggcataatgcaaaatacaaggaaaaaagacataaacaatatagctaaggtatattca

SEQ ID NO: 405015 - DNA, 693 bp, Cannabis indica
ttcttgaatctcttctatgataactccagaagccatgtttcatggacaattatatctcttgctcaattagtgttcagattgtgtagttttttggtgttagttcataatatttaagcccaatcttcttatttaattgtttaagtgcttttttcattatcgtttgacaatacaatatagattaaaatttttctctttttaatggatattgaatgcaactctttttggtggagtagcattaggcgttgctgataaatattttctctaaaagtttaacacatttgggatatttattgtgtgatcaggttagaatttcacccttattgagtttgaagcttcattataatgactaaatgaacaatataaagtgtcaagttcagacatgttacatcacctattttattttttatgaaacattcttgttggtttttttagatggagaaatatctaatacaacacttagatgaagaattgaggcgtttacaaagtgtgacccaacagatggaagagtgtattcattcaaagaatcacaaggttgatagattgctggaggtaattttgagggcagaggagggtagaaaaaattcaacgaatcaaattttgtctggtttagcaacagtaattgataaaataaatagttttgaaggtcaatgttcaaagggacatgtgcaaaccggtttggcagagagtaacatg

SEQ ID NO: 405016 - DNA, 547 bp, Cannabis indica
ttgacaagttgaattaaacatgcttgcttgttcgatcaatgttcaaattcgtgctttactttttcatttttttttttacaattctaaactatatatgtatattttataactttagttatatttatataaacttctaaaaaatattttacagattaccatatatatacaaaaattactaatattattagaatttaaatatttatttatatatactcaattttttttattatatcatgtactctataaataaattgatacatatttatagttttaaatgttttaatagttttaatataaaatataatatttagtattatacttaaattttattattattttaattcatttataattgataaatacatattaataataataaattttagaattttttaatatgtcgtgctgtattttttgggcttgtcgtgtgccgtattttttagactagtctattcgtgtgtgcttacgtgtcgtgcatttcgtgcttctcgtcctgtgtcgtgcatttcgtgcttctcgtcccctgtcgtgcttaagcacatatttt

SEQ ID NO: 405017 - DNA, 503 bp, Cannabis indica
atgcgatgaattggggattaagaaagtattttcagcggtcgcatatccacaaagtaatggaaaaacagaggcagtgaataagatcattaagcataccatcaagggtaagctcgaagaacgcaaaggtacatggtcagaagaacttccccaagttctatggtcatataatacaactcctcgatccacgactagtgaaactcccttcttgctctcttacgagggcgaagccatggtgccagttgaggttggggtaggatctctacggagagatgtttttaaccttaatggtaacacataagatcagttgcttcaacttgatcttctagaagaaaagcgcgatcaagctcattttaagaatgcgacctatcaacaacgaactcctcgctatttcaactccaaggtcaaagaatgcactttgcgagtaggtgatttggttatgcggaaggtcatgctaaacacaagaaactcaacacatgaagtttttggtgacaattgggaaggac

SEQ ID NO: 405018 - DNA, 1158 bp, Cannabis indica
catctcgattcattttatccttattgaaaaatttgttcaaatatgttagttttagatttgttacatggtgatcataattgtaatttttttctttaatttttaatgtttgtgcggtcttggaccgacgcatgatgcacgtgcaacaaaatgtgtttttataattgtttgcatctgtggggaactaacgcaaacaatagcataaatagatatatattttttttgcgtcaataaaatatacgttaattattgaaaccgacacaattaacgtaaatgtcagttcaaaattgctgtaaataagtttttttgtaatagtgtaaatttaacattaaagaacttaaattaattaaaattaaaattaatttgttgtattttaattttggataaataagttttgttttttatttcgaaccattttcactttcaaattgtgcgagtattttctttttttttgaaaatacaagtgagatacggtattgtaaaatcatataatgagttttaatggattttaaaaaaaaaattccttaagatttctaaattgtatgataattcaatctctaattttttttactataacttatgatatattaatttattatccctgaataaaatacaactgtatgcgaagagcggtttgttttttagttatttaatacaatattatatttggtattgacttgtattaatagattgtgcaaaccccaacaccaactacgggttcgggtcccgggtcctgagttcaggtcttgggtagcaggtctcacgtcgtacgtcatggtccggatttagggtctgagttcgggttcaagtctcgggtcttgtgtgtaggccacataccggctccaaatttggatttaaggttcgagtcccgagtctgggtctcgggtccgagtttgggtctcgggtctgagtttgggtctcgggtccgagtcagggtcccgggtccgggtctcaagtcccaggtccaagtcccgagtctaggtccgggtcccaagtttgggtcctgagtcaaggtccgggtcccaagttcgggtccggggtccaggttgggtctgaggtccgggtcggagattggtccggaatcctttgtatatattataatacaagctaatactaaccatttgttatgtattaaaaaatacaacatatattgtattaaaa

SEQ ID NO: 405019 - DNA, 580 bp, Cannabis indica
cgttgtactgaaattcattgttgttgcaattcttgtttttttgcattttttcctttgtgcaacacccagttggaactaaccccctctccagacacgatttcggagtatactgctttctatcattattttgtttttccttgttcgtacaggaatggagatgttcagaggaggaggatccacatcacgacccccaatgctggaaggtgccaattacccatactgcaaaaccaaaatgcgagcattcttgagggctgtgaatgaaagagtttggatgcccatagaaaatggttagacttgcccaacagtgatggatatgttggaattattttactaggatcttagatctactcacaagtatgttatttaacatcctaaatatgaactttctaaaacaataataaacacgtataaagttaagaaaaccttacattggttgcagcggaataatatctctccttccactcagatctctaacccttgtatcctttctgttgcagagtattatcaagatttgagtccgaatgtccttctttttgatttggatccttcacgatcttccaaactataattgaggtaccac

SEQ ID NO: 405020 - DNA, 520 bp, Cannabis indica
atattaaatgataatagttattatacaatttaattattacaatattctctaagtaaataattacaatgtcttaatataacaaaaatacaaaaattaatcactagtctcgttcataatcactccaaaatatataaggttaattgtgattgttgtggctataattgtggtcgatagagaagatcgagctccccaaactaatctcaaaactgtgggtgtattggggtagataaaaatgttactcctgttaacaagccaataaactcatcattattattattaaacatttaaatctaatacaatagtcataaaatatttttaaatttatcatacatcataacatataacattagtattatgacatacattatatctaagttactattttattttaacaaaagtaatgtacaaacacatcacaattaaatttttaataattcattactaaataattattttcaaatttaaaaattatatacctaaattcgattattagactgagaaaagaaaatcttatattgtt

SEQ ID NO: 405021 - DNA, 778 bp, Cannabis indica
caatactatcgaccataatattatcctattcttattatgctagtcatactctagacatactgatgcaatagtatcgatcagtatctgagccaaacatacatctatcagtatcaaatataactctatgtatattgataccgatatcgatataatctaacaggcataaataatatgtacgcaaaacatgtaatcacatatgcatatcattatactaatcttacctcattatcaaatttaggtgtgtcagccaacctgagtggaatagctgccatcaaattataggcccctaaatcacattattcgtaaaactaataagtgacatgctaaatcacttctagggacttaaacttgaaattaaaagtttttcaatcgataaacaacaaggcagtaccctaaataagcaaggaatcaaccaaccaaagttctgaaactaacacaacttgacaacacaaaaaattcgagaagccaattaatgatcaggttaaccagttttacaaggcctgtaaaactggttaaccaatttgcatcaagtacccaaaaaatttcaataccttgtttagttcgtatccaaacaataccaaaccttctagacctgcttaatgtaccccaaagaacatatttcaagcaacaaaacaacctaacatgctcaaaataaaaaatttccattaatgaccaatgtttgagttctaaaactcaaaatttgtctaaaaaaacaacaaagccctgaaataacttcaaacaagcttattaaacaatcaacataactccaggatacttc

SEQ ID NO: 405022 - DNA, 531 bp, Cannabis indica
cggcccaataattaaaaggcccagatatctgggaaccttttatctcggttcatatgtaaaaatgggataaaaagtctcacttaaaatgctaagttgtgtttggcaaatgcataagaatagccttttcaacaatgttttttgtccattttccaaacaaggcccttttgttccaaacttttatttaaggctccaaatgtaaaagtgggatcaaaagtttttatcccactttttatttttcaagtgtaaaaagtgggataaatagtctcatttgttgtagtgcgggctttagagttgaatttttaccactttatttcaactaatgaaactaaaatatcttttctaattttaccacttatatatctcatctaattatttaaataacaattttattttaataattataaataattattaaaaaaaaatatagttttaataaatttattaattaaacccacaaaatgtactaattaataaataaatccttatttctcttttcttctcaaaattgcccaaacttggtgaaaattctca

SEQ ID NO: 405023 - DNA, 768 bp, Cannabis indica
cgcaaatggtgaaactcaccaaggtgtgtggggtctccaatggcctctcactctctcacgttctatggctgtgtttgagccactgtgactgtggtggagcttgtggccaccaatttttcagtactttgttatttattttatttttaatggaaaattgagattttttttaacagctgggagagcctgacatgagagctgacaaatcaaatttgtataactgtctcgtaataaactgaacttttgactttgtttgctgttgggaccaaataacattttatccaagcctttgatttgggtcaaactagtgctaacgtagctgctagataaacgagagatgcagaatatctatgtgatcttaagttttttttttttttttctgttattctttagttttttttaaaaaaaaaataaataaataaataaaatcaatagataaacaaaatatccaaaggaatctttttttttttttttaaaaaagtttgctacatagaaaatgtttacaccttaggattattacaaaataagtgagcgagaagtagctagtaaacaattatattgctagtagataaaagtccactttgtggctataaaattacatgatttattaatattagaaaaaaatacaactaacaaaagagagagatcccattacaaaaagaagagtaattctccaacaacttattagaaaattagctttttgttataaaataatataaagttgatgagagaaaagaagaagaagatgaagagagaaagagaaagtgaatg

SEQ ID NO: 405024 - DNA, 632 bp, Cannabis indica
atcttcctccgagaatacaattacaggttcttgaagcttagctttcttggaatgtttcggagcaaaattagattgctcgttcttcccttcctttacatatctcttttaggcattcgttactttccccccgcaatatgtggccctcccgagataaccaggatatcctctccttcaagaggaggaggttgtaatccttggttgcctaggttattaggaagatttggctagttttgtccattaccttctcttttcacatattgccaaaaatgacctcgcgcgatgagactctctatctcatctttcagctgacgacactcctctgttgtatgcctaatttccttgtgatacttacaaaatttggttgcctctctcttatgtctcgcatgcttcatgggctcagatttatgaaatgtgaccctgtgccatgttcgagatagatgttttcttgagtttcattaagcttggtataaacaatacagattggcacgtacttgttatgcttctttttctttttctttttcttgtccttggctgactccttagagttatctttcctctttgacctagaggctcctggattgtcaaatttggtcaagacggtgcttgttaagacagtgctaggtttacctcct

SEQ ID NO: 405025 - DNA, 598 bp, Cannabis indica
cacctcgcactactcccacacccgttgttgtctgaaacttcaaagataagtgcttaattgaactaacttcccctagtccaattaatgacagtcgacccagcgctatgttgtaggctgacggcaggtcgacaaccaaaaagtcttgcattatagtggtggataaaggctcttcgcctaatgttgatggaatctcgattattccttgactggcaacactgtcgactataaatccacacagatttaccatgtaaggtttcagtttctctttttcaagccccattttcctcagtttatccttataaaggatgttcactgaacttttattatccaccaacaccctttttatcctcttatttgtgagctagatggtaattacttgtgcgtcaatgtgaggatatctcacgtgttttttatcttcctccgagaatacaattacaggttcttgaagcttagctttcttggaatgtttcggagcaaaagtagattgctcgttcttcccttcctttacatatctcttttaggcattgttactttccccccgcaatatgtggccctcccgagataaccaggatatcctctccttcaagaggaggagatt

SEQ ID NO: 405026 - DNA, 1372 bp, Cannabis indica
  modified_base (1312)..(1312): a, c, t, g, unknown or other
tatatatatatatatgtaacatgtatgattaattattgatattaattgttttgataatgtatgtttttagatgagtcggagattgagtaagtgtggagtgtgtggtgatgagattggatacaaagagaatggagaggtgtttgtggcttgccatttctgtaatttccctgtttgtcgaccttgttacgattatgagaggagtgatggtaaccagtcttgtcctcaatgcaacactcgttataaacgtcacaaaggtatatttatttatacatttataagtaattttagtattgaatacatatgaatcaagaaatttataagaaatttagaataagtattatactgtacatgtgtttgttttggattaggctaattaaaatttttacttcttgaattttgatatgtaataaattatgctccctaaactttaaggttgttaaaaatgatcatgaactattaagattgttggatgtaaggatttttgtccaattttagtaaaaaaattctaacatggatgaaagttcaaggggcataatttaatacatgtaatagttgcggggtatggatgggtatatatcaaagtttggggaggttttagtacataaacaatcactaaaatagtaaaaattgatgtaaagtgactaatcatttgaataactaataaagtggtgtactaatagtgtcaaacactttatttatatatagaataagtattatacatgttgtttgcatgttattgcactataatgtttttatgctctttttataaaatgtaaaagaagtaaatattagaatctaaaaaatgctaagttccaccaaacatacttattctaatatcatattcacatattttaatttagtatattgtatggtaaatggttaatcaattatcaataattatgaaaattggctaatcttatttgtttaataataacaagtattttccttaaaaaaaattatgaaaattcaggtaccaacaaaagatgacttgaatatgaacgtattattcatattaacagaataattcgaacaaatttgtatttatgtatgtataggttgtccaaggagtggcgggtgatgacgatgaaagcttcgacggagaagatattgaagatgaattcaggaagaacatttataacactcaggatgattctgatgatcctaaacttgttaatcacttcgctaattcggtataattacacatataaatcatatttgtataatcaagatatatgtatatataaatgcaattgacacatatatgttttgaatttttgcaggataaatgaaagataacaatctaaacaatagngaaaaaaagcaaatggacagctcaaagctttgtctgttgcaggaagtggtaagttaaata

SEQ ID NO: 405027 - DNA, 600 bp, Cannabis indica
ggttatattacatgcatgatcatcatgtgaatccatgtgatcatataaatattcttatagcataaatttcaataatttaacaatcacagtattctcaatatatatttactttaaaactacaaagaaacactctacaactaagtcccaatttactttatttatttttaaccttttactttaaaagtaaaaaaagaaagtaatatttgtcacaaatataactctacatcgctacctgaaaagttactgtcatgaccccgagccctacgccgtggtagatatgtaatatccataacttgagtggtcaaatgtcacactttgacccttgtaggaagataaaacttataaatgatccttttatttatatcacaaaatactaatttaaaagtaatagattaactcctatattaataagaaaatattaataacaaaatcaggaccactcatcaatataaagaacagtaatatccccacagttatgtaatcaccaaatagatagatttaataagtcaataaaataccaaaataatacctagcatccatcattccttatttctaactagtacatagctaatttaagtcatgcagaccatccattttagc

SEQ ID NO: 405028 - DNA, 646 bp, Cannabis indica
ctcaacttaatgttagggcaataagagaaaaatggtcttacttcgtctaatggagtaactaagacaagaaccatgactgatatcttcatggtggaggctatgatctctgtaagatgagagcaagaggagatgggggaaccttgtcacctagctagggacaacacttaatcacttgagacgacagagtgagattaggaaagtatttttttggctttaatagaataaatgacctagaaatgctctcatgagtaaaaacgaggcaaatttctatcatctccgattctgtgatatggtagcataattaagaatttaagtgctaaatttgagggtaatgtatatatgaatgggaaaatataatgtgggtttgggagtgaaaaatgattcgaaagatatatatactatatgagattttattttggagtttttacataattttctatttgtttccatgttcttatatatggctcaattctctaccatttattccatgtgggacatatgaaccgcatcagagtggacatgatcactatctgtataagtgcggatcgaatatgatcactttttgcccgcaagggatatggctctgaaaccatgttgagaatcatggggttccatctcaaaaccaattggcaatgagtggagtagc

SEQ ID NO: 405029 - DNA, 512 bp, Cannabis indica
aaaataaaaacaacaatggggaaggactttagtgaatgtaagacatataataagatatatatataaggaaaattatcaaagtagtgcctataaaaataggacttactattttatgtttttcgggacatatagttataattttttcagaatttaaaaaatttcttcacatttaaaaaatttttatctaatttcatttatttttattaattcagtaattatttatgtactaaatcatgctccttaaattttaatatctacctacactataaaaaactgttacttttagtaataattttttactcacaacataatttttttgtgattaaatgtgacttttagtcacaacaaaaaattatttatgactaaaacatagtatttagacataaattatcactaatttagttttagtcactagtattatgactaaaaatacatttagttacaataaattgtaatttttgtaactaaatacatttagctacacggacattttagtcataacataggaataa

SEQ ID NO: 405030 - DNA, 1028 bp, Cannabis indica
ccacataattgtcgccttcaattcacctaggattctaaacaatactcataaattgtcccacctttaataacactagatcactttgaaacaaaaagattcatttctctaaatcaattaggtggatgcctccattagttactcatgtcctatattctgcttgaaaataccaacaaatttaactcatattgttatttctctaatttatctgccatgtcagatgagttaccgctaaataacatacatgtacagtccattcagattattgatgtctctaattgaatgtacaatatataacatcaatatcaatcggaatagcaaatataatattgcccataaattttaacctgattcgattgaaggaccgatactcgagtccacttgagtcatgaccggcacttggggaaaaacaaaaaactcttaattacgggtaggttcttttcagatggctcactactccatataaaaataagatttggctctacattggcccaaatggtgtcttctacatcttggacactcaagatatggttgttatttcttgttctcaccatgagcgctatcccggtcaccctggaactttttgttctatcccataattggtggtttatttagttttatttccttcctgattttcttgtaagtggttccatatgtttcaccatatccagtggcataacaagaagtgttagtggtacaggaatagacacaagacgagcatgttgttctttcaggtctcagatctgttcaccttgttgtctaatcgtatcttgcatagtagcaattacttgttcccagtgtttaggtggtagaggattctcttaccatccatcccgagcccaaacagctcgctagtcagactgttcgattgtcctggttgcataacttatcacacctgtagtccacatcttctaaccatttagaactcaaacaaacattaatatcaatatgcgtatgccatgcacatattcttattataatcatcactatgctacttttcccaacatactttataatagtctaggtaggta

SEQ ID NO: 405031 - DNA, 843 bp, Cannabis indica
aaaaaaggcataagtgaacaagaagtttttctctatgcatcgctgatcgtggacacaatatggcggactcggaatgataaggtacataataattgtccagcagatatagttaaatgtattgacactattcagttttcttttgcagatcatcgtgctcacttgctcccttgccccataccatatccgacggaagcttggcgccctcccccgaaggattggttgaaactaaattgcgacgtcagagtggggttggacagcatgtgcgcggctgtggttgcaagggatcacgttggcaaggtgatctgggtggttacttctaagctggaattttctaatgctctctgtggggaagcgatggcgtgctgtctggcccttcgggaagcaaaagttcgtggcatcaagtttcttattttggagagtgattcgagggtggtcatcaatgctcttaatgggaaggagtcccggtgggagcttgataactacgtctccttttgtaaactcacctcccctttttttattggttgtatgtttgaatctgttagtagacgatgtaattttatggcccataatgtggccaagtgggcattttcccatcagaggttcggctctttgcctctttcctctatgcctgaaactatattctgtaatgaccacgaggtctgactatttttattctaatgcatgaacgcttttcttcaaaaaaaaaaacacctattaaaacaattccaataatctaaattgagtccttaccgtcttaggatcttcaaactttctccaaaacgagatgcttttaagcccttgattcttaagctccaaactagcttagcaactacaaaagtaacc

SEQ ID NO: 405032 - DNA, 1080 bp, Cannabis indica
taagaatgaaaccaaatccaattaaaaaaaatgattttgtttgttttattagtttgtataattaaataataaggaatgtaaaattgtggagttgttaaacacaaacaaatttttattcaaaagaaatatattctagaaatattctcgtcaatttattaagtaatacaaatataacctaacaataaattatgagaaaaatcatcttatacactaagttttgccaataaattgagcattattctctaaattatacaggacataataataacaagtatttttttctctctaaaaaaaatacaattaattgtgggacataaattgacgtgaactaaaaaatttaccaaatagacaaaatgttttttttggatatttctaacgataattacatcatttacagaattattaggctaatgcttaattagctttaagataatcactctcaagggagtggacactaatcttctttctataaccaatggagaacatctaatatatataaattaaatcaattactactatatttattataaaatagctagtaatcatatatataattacttgttaaatttttgtcgtttttttttttttttttttttccttttttatttacattattaagtattttattattggtccactgatagataatagcaggacatgataaattttcaaaatatactttgagacatactgtcaatttcttggttaaattaaaattctattttcttattcaatatctaatcaaaactacacaattacatttatatataaactttgatattaactacaaattactaataacttcttacactattttcataatgtaatatatatccacaatagggagattttgttttattattatttttattggaaaaggataaccttcatttaaatttaatcagcaaatcaactgcatttgtctacagctaattaacatgctcatttattccctttacaaagaaaaaagttcatattatgttcatcttttactcgatccacctttgatatcaataatgttgcaaattaattaagattcaacaatttttatttagggttctattatatatatatatatat

SEQ ID NO: 405033 - DNA, 872 bp, Cannabis indica
ggattggatcagttcggctcaatcagattggattggatgatgcccacccctactattttgtatttgctgggaatatgtgcccctattaagcctgtacagaaagacaagtgattcattcctagggatcaccctagaaaaacactataaataccccacaagcgcactgaggcaggggtcaaggattctgggtccagaggaatcaaagagagaaaataggagagaaattcaccaagaacattctctgtaaataaatactatcattaataacaaagactcgtggactaaggctcattaatgccccaaccacgtaaaaatctcatgatttaaacttcatacagcctttcctacatattatttaattggttgccgaaaacctcggtcaacaagattgaattgaatcgtgcgaattggattaactattttatgaacaccactactaaaaagaccttcagaacatatcaagaatagatatcgagatggaggatcttcctctctcaaacttcttttggctgaacatcacccacaatatcgccatttataaatttgaagtaggttcttactgctaattgctctatttaatatatatatatatatatatatttatatgttaacacagattttcgttaaagattatgagcttattttcgtaatagattcagcacagaaattataagtgatctaagaaagaatgatagaaacagaaataacaccaagtttttacgtagttttgcagttaactctgcatagtcgacgaattaatcttattcaaattttttttgatacagaactaaggttctttacaatcagtgtatcctaatttctctctaaggattttccctttcatcttttttctgtatattctacccctattt

SEQ ID NO: 405034 - DNA, 582 bp, Cannabis indica
caatggtaatcattaagatatgagggcctttttatctctctgcctaacctgttaacaggaacagtaggtgtgggatttaaaatagaatgatcatgagtaggagaaggacaaatagattcaccaacatcagtaacaacatgatcatgcacaatatttggaggcacgcgaaatgagctggctggagtgttagaatgctgagtacattcagcatttgaaggtggaaaaaaaatatcagtaggcacatgtggaatttcactatcaggactatgtgaacaactgtactgaggcttatcagaaaaaaaaactctggtgggcagcaggaattagaccagaattaacaaagggaaatatttgctcataaaaatacacatccctagaattgaaaatattattagtattcatgtcaagaagcttataagctttcataccaataggataaccaagaaaaacacaagggatggatctaggactaaatttagacctagaatgactaagagtagaggcatatgcaagacatccaaaggcctttaaatggtcataacaggtggcttagaatgtaagacttcataaggacttttgttc

SEQ ID NO: 405035 - DNA, 515 bp, Cannabis indica
aatacaaaagaacattttttttgtggatatgatctcagaagagagagagagatataaaaactttttgtgcattatttttgatttcgctattagagaatttttgaatctcaacctctatttttatttaaaagaaaatattaaaattcttttttttttttgtgaaaagaaatatcaaaatctttagttttagttacagttgggttctttgaggagcaacttttaaaaaattttagaaagagagggagaagaagaagaaagaagtggcgagaaaaataaacagtatttctaacaaataattatatatataaaaaaaataaagaaataatattaaatatatgtatatagaaaaataagaattatttgcatagaaaatacatgcatttgaaagtaattatataaatgcgctttggtattttattattcaaaatactgctagttttgaataaagctaattaggatttttgccacctgaactttgacatgtactatatcatgcctcatgaacttttaaggtc

SEQ ID NO: 405036 - DNA, 573 bp, Cannabis indica
aaggcattctttgtaaaaaaataaaattcactttttgcatttaccttaacaccaaaagagcccccttccctctctctctatctctctttgtattttgttgaaaaatttgtgatttgcttggtgttcaagcttgaaattgaaaattgcttgaaaattgtcttgggttatgcttgattttgaggagttgtggcttgatcattgcattgaagcttgaggtagttttctattgctgaaatttaatgaaattgctgctgtgattttatggttgaaaagcatgaaataggtttggatggtcttgagatgtatgttggtgttttcttgttgatatgagcatgtttgtacttggatattttgaatttatgtttggttagggttagacataatttaaaaggaattttattgtgtttttattctgttattgaactttgaaattaattgttgaagttcaagttcttggttattttgctcaagttggagctttaaattttatattgtttaatctgaattttcggggtttttaccattggatttttaatgcgtgaattgtgttttaagctcttgatttaattattg

SEQ ID NO: 405037 - DNA, 547 bp, Cannabis indica
tgtcaaattaaaactttagtattcactttaaaactttataaactttacataactattcacaatagtcgggatcccgtttcgaaacatttttacaaaatgttccaaaatacattaatcaggtcgcacatcgactacaaaatgacaacctcagatatccaaagaccgaacactcaaggtcgcaccaccgtgacatgtacaatcccatccaagctcaagctcactcctgttcagcgtttgcctttcctctacctacacatgaaagtagaactgtgagtcaacagactcagtaagaaaagcatataacatatcacataataacgacctgtatctaggcacctatacacctatttacaaggctgaaaagacgagtaagaacgttccatactagggtaaagccactgtacctcatttgacgagtgttggtagggtttgattcgtaccctgagtaccactgagtgatataccacacacaccctgtactttcccgtagttgtgctgttaacaccataatgtactctttaaaccacatacactataccaatgcact

SEQ ID NO: 405038 - DNA, 623 bp, Cannabis indica
cttccatcgggagtaactgatggaaaacatctctttaaatgacggtttataaccattgagaaaacccattttaaatgacagtttataactgttggaaaaagcttcactcagactataactaacaaaatacaccacttaaaatgacggttataaactgatggacaataaaaggtaagggagaaattgcaaatgttcatacaattctctccctgcatttttataatttaaatttccaatatacaataatgaaaaaatataataacattaataatatttttataaaagaaaattcatacatttgttaagttagataatatatattaaaaaaaacatttatacattggtcaagttagagtgtatatctcaaaaaaaacaatcattcatgtccacctatgaataactatgtatgttgctcaatcgctgaaaaagcaaagctacacgctcgttgtaccataagccatgagtagacgccacagtcgcaggatttataaatgcataaacaccgttcaactcatttttgtttagttcacgctgcattacactggtaaacaataaaaaattaataacaaaaactgcaaaatatatattaaattaattatcaactatcatacctgcaccataca

SEQ ID NO: 405039 - DNA, 1075 bp, Cannabis indica
aggttcccgacagtttgtcgaaatggcaaatgactttgcatttccaatcatgattgagatgtcttttagactaaaaaaaaaaaaaaaagacaaattcttggccatgttatctttgcatttctcgatttttggtcgtatagttttttgaatggtgtgtatagttgtgttttcagactttctggtcccatgttattgatgatttctcgatatgttatcgactggtttttgaatggtgtgtttaattttttaaagttgcagatggcagcactgttcaatataaggcaaggcttgttgctaaagggtttcatcaacaaaatggctttgatttcaatgaaacttttagtcctgttgtcaaactagaaactataagagttgttctcactttggcagtaagcaaaggatggaaaataaggaattacatcaacaatgccttcctaaatggagagcttgagggagaagtatacatgactcaaccacctggttttgttgacctcaatatccaaatcatgtgtgcaaactcaagaaagctttgtatgggctcaagcaggggcggaacccctaaaaaaaaaaatcgagaaaaaatgtatatgtattttaattagttacaacatatatttgtattaaaagatgatatttataggcataatagtaaccttggtgtaatggttaaggtaattggtaaataggttagagggtaaaggttcaaaccccactaactacactttatattttctttttaaatttatttacgccccccctcactttaaattctgggtccgccactgggctcaagcaagctccaagagcttggtttgccaagctgtcaacagtactcactcagtttggtttctagtcatcaaaaacagatacttcacttttcattcgatcttgtacaactcatatcacctacatcttggtctatgtagatgacatcctaatacttggcaacagtgatgttcaagtcacaaaaataatttcagatctgaatgctgagtttgccttaaacgatttgggggaacttaactactttttgggcatccaagtcactcacactgatttgggcattcatctcttt

SEQ ID NO: 405040 - DNA, 314 bp, Cannabis indica
atagcacacgtgtatgtgcatgaaatgatgactaagtggtatttttgtaataaaacaaacatggtaagtaaaaaagttgatataggagtgtaggggtttttttgtaataaattgtgtaaaatggatttttcatgtaaaaattgataaaataaattaaatattaatttctaaaaaatgaataaagaaaaaaaatgagattgtttttttttagtgtgtgccaagtgttattaacgtggcattatatttcaaaaaaaaaaaattgtgactgtatcttagggtaaaagtacttcagctttttttttttttttttatta

SEQ ID NO: 405041 - DNA, 714 bp, Cannabis indica
gtctttggtttttaaagaattcatctaactctttttatttaatctctgacatatttaattttcatgttttagcatttggatgtggcatttcatttgatgaggaggcgacaacacttttatccggaggtgtacccaaatagacgtgtcatcatgccatgtattttcccagcaggagttattgctcggtgggaggctgcgggtgatgaccaggctaactatcagtgggatgagggcatattagatttgattcgaggggatgaaagtcaattcctagccagttggaagaataaggagagaatatatatggccctctacttcgatagtgcaaggtgggtgacgctagaggtagatctggatcattggttgttgaacatatttgactcgagcctcggatcgatttccccgaatgaattcgagagtcacttggcaatgtgggaaaaattactaccaactttgatgctgcaggctggcctattcgagactcatgacatgatcctcgtgcctcaattgaccgccttagagagccaggttagaagttttactttaaaagtcatggaccggagcattgttcgacagacagctccagaactagtgcagaaccggaggaagagaaagcggcctaggtggtttgatgagtacactgaaatgaaaaagatgtccagggcttcgaagacacttgtgaatgcggacccacttagagtggttgatcggaag

SEQ ID NO: 405042 - DNA, 646 bp, Cannabis indica
agttcaatgaatattaatttatgactacaacattataatgaaaataatttaattaactcaatagtcacaatatataattgtgaataaaaaataaaaaaatattaaattatttctcatttgtaaaatagttctaatttattagtaaatcgaaaataataaattattaaattcaaaactaagaaagaatgagatcatcaattaattcaaataagtaacataaggaaaactaactaaagtattcatcaatatataataaaaattatcaattaattaaaaaatgaaatggaaaataataatatatctagcaccattataatattagtgacttcaaatttaaaagagtgtcaacatacattaagaaaaaaattacgtgtactcgtgttataactctcctataaataatatgtaaactttataaaatttataatttacaaaaatacataattaattgtagtttttgtttaactgatgaaaaagctaaacaattaaaaatatacttattctactataaaaaagaaattgctaaattggtagaataatagaacaatttaattagaatgacacaaatgtaattaagttataatgttaagactaattattaggtagaataagtattaggggtgggcatcatccaatctaatccaat

SEQ ID NO: 405043 - DNA, 667 bp, Cannabis indica
agataaaatgttaaacctaacatattcctaatcttataattttaattaataaaatatattttgaaaataacaaaatttaaaaaagatatgatatggttagcaaattttgaaattagtacaagattattcttaaaagataatattttaatatcaaagtaagatcatttaaaatttaataaaaaaaataatatctgatcttataattaaaataaataaaataatctaaaatttcaaaattaaccataaggctcctttgtgagaaatcaaattttcaaaattcaaagcctactaatatcagaaactaattttaattaattaaaaaattaataaaagtttatgttattctgacaattagatttttaattgaaaattcagattctacacaaattctaccaaaaatggcttttgtttcaatgaaaacgatttttgaatcaaagttatgacgaaacaagtttgaggcacaggggtatgcaatgcatacccctgcgcgcggaaggaggttttggccgaggaagaggctgctagcagcctcatttgaccaagcgacacaggcgcaagctgcccttcagacaggggccttgtccgagtaaacttggtcagcgccttgtctgaatgggtgctgtccgagcgtccgcgcgcacgtatgtgtttcaaatcctgatatttt

SEQ ID NO: 405044 - DNA, 458 bp, Cannabis indica
tccttccttcttcctcctcaccatgagagctaactctctgtctagttttcttcactggatcttggagcagaagtcactagatcctagatcgggccctctaccttcacatataccaaataagtacttgaacatatgtaagtaattaatttataaccgaatatggttcacttacgtataaaagtaagtacttacccattattattaaatatattttatgtacaaaaaaaaattattgggaatgatattaatgatgaccacaagtgagatattgatgacatcaactttaaatgcagtagtagttacaagtgagatacagtaagaacatttgtttaaaaattatatgatgagtattctataaatttattgtcttctttttatattagatcgctattttgtgtgaaaaaatttaatttctaattttttttactataacatacatttagagatatttttgtgtg

SEQ ID NO: 405045 - DNA, 1372 bp, Cannabis indica
cgagctaggtcctagattcaagtctgagtctggagtcgggtctaggtccaagtcctagctctgttgcctaggtccctatcccgtttttgggttcaggtctcggttcttgtttaggtttcggtcccaatctaggtttgagtttgagtcctattctttgttcgggtctaggtctcagtcttggtttttatctaggcttgggttcgagtttaggtccttttgctggtcctagtccaagtctggttctaggtccagttgtgattctgagttcgagtttgggttcgacttcgggtcggtgttcgtgtcctggtctgagtttgggttcaagctcagatttcggtctaggtcgagatcaggctctgggtctagatgcgggtccgagtcccatgttccgatcccgatcacagtccgagttcagttccgggtctgagtcctgggttttgatcccgatctgggtttgagttctggtctgggtccaagtctaggtttaggtctgatgagtatgggtttttcgaatcctgggctgggtccaggtctgagttcgggtaccaggttcagatttgggtctgcgtctgggtctgagtcctcatcccgtgtttcgatcccagtctgggtctgggtcaatatttagttttgggtttgggttggtgtccaagtctaggtctgaatcccagtcttggtcaagggcttggtctgggtcccggatcgagttttggatttgggtttgggttcgagttcatgtctcagtcctagtctgggtccgagattgggttcgggacttggtttgagctcgagtttttgggcttggttatggtctagttctcggtgccggtccaggtccaggtcctggtcacggtcttggtcctattccagggtcctggtcacgttctagttcaagtttcagtttcgggtcccatgtcatggtctgggtccatgtcctggtccagcttcgcgtccttgtccgactcccaaatcaagacacagactatgggtcttttccaagccccagttctcggatcccagaataagatctggatctcaatcacgagtcctagtcttgtctcggttcatgtcccaggtcccagactgggtctcggtctaggtccaagaccgacactagagtgcagttctgggtctcgatccctattctaggtctcgagtcctattccatgttcgggtcttagtttaggtgtgggttcgggtcctgagtcacgattcgggtttggattcaagtttgggacccaatcccggggtgggtttgtgtctgagtctggtcacagttttgggtctgggtcgaggtcctagtccggggtcccgatccgcttctagtttcggttccagtttcaagtgtatgggttcttgttaagtttgggtc

SEQ ID NO: 405046 - DNA, 1045 bp, Cannabis indica
gtctcggtctcggtctaggtccgagaccgagacatgggtccagtttcgggtctcgatcctaattctgggtcccgagtcctgttccatgtttgggtctgagtgtaggtcttggttcggctcctgagtcccggttcgggtttggattcatgtttgggaacaaatccaaaggtgggtccatgtccgagtccggatcctggtccggttacagttttgggtctggatcgaggtcatggtcgtggtcctattcctcggtccagatcagcttctagttttggttctagtttcaagtcacggggtacgggttcgggtcgagtttgggtctgagtttgggttcgggtcctgatttttgtccaaggagaggtttaggtccgagtttcagtctcggttagggttcgaggttgggtccggttccgagtttgggtccgagtccaggtcctggtcccgttctaagatcccagtccggttccagttagtttcagtttttgttcccgagtctaggtttgggtttgggtatgtgtctgggtcctaatttgagtttgagtttgggttcgggttctggtctaagtcccaaatccagacaccgactactggttcgatccaagccccgggtccagatccggatcttgatctcgggtcctggtctgattccatttcgggtgccaggtgacgagctaggtcctagattcaagtccgagtctgaggtcgggtactaggtcccagtcctagttctgttgcctaggtccctatcccgttttcgggttcaggtcccggttcttgtttaggtttgggtcccaatctaggttcgagtttcagtcctattctttgttcgggtataggtctcagtcttggtttttatctaggctcgggttcgagtttaggtccttgtcctagtcctagtccaagtccggttccaggtccagttgtgattcagagttcgagtttgcgttcgagttcgggtcggtgttcatgtcctggtccgagtttgggttcaagctcagatttcgatctaggtcgagatcaggctctgagtttgggttagggtcct

SEQ ID NO: 405047 - DNA, 462 bp, Cannabis indica
gaaaattttaagaattacaaataaaattgttaaattgggtatctacggactataaccataatttttttgagattacgacttatctgcatcaaattaattttttttaagaacttatgtttcaatttaatatcaacacgtgacattttaggaagaaattaacagattcgttaaaaagatgaccaacagacttacaagaatctcaagcttagaaactattgccgttattttttgaaaatgaaaacttatttgtaccaaagtgaactttttatgaacttttgtcataattttctgtttgtttttagtttcttactactaattaaatagaaactgatttttttaaatgattaccgaacattacttaaacgagtcacgtaatatgatattgttgttttgaatttctataaggactttttttttacattttaaagttagatttttttttttattttttgtttatattta

SEQ ID NO: 405048 - DNA, 555 bp, Cannabis indica
aaacctacttgtgtttgagtctggcctagatccactaaaggcagagcacttgatgagtatgattacctctatctttgactttatgcgggttgaggagaatgattgagtttgatattatgtaaatatgttgagagatgatgcccaaatatggtgggagattgtatcggttggaacttattttaccaggatctagatttaccaacatgtatgttaattagaatttataatctaacattttaaatatgaatttcctaatatgatgaaataaacacatataaagtttagaaaaccttagattgatggcaacataatataatgtctcattccgttcagatttcaagcccttgattcctttctgtaggagagtgttatcaagatctgatcatggatctgtctctctctctctcagtttggttaaccatcgtcttctacactatgattgagtacttgacttgctttgagtgggcatggtactctatcactaaaggcttgaatttaatgatgaaaaacaagaagggtcgaaatcactatgaatggtgtaatgaccgctctagt

SEQ ID NO: 405049 - DNA, 832 bp, Cannabis indica
ccacgtcagagtaccaaaattgggataacaattattattattataattttttgtaaaaaaaaaagcaaaaaaacgtttaaggtatatatgttgattgatattttatgtatgtatataaaaaaaaattatgattaattatatttgatttaagtttaatattcctttttggaattttttttttttaactttttttaaatattttatatttttatagaaaaaattattaaaaaatatagtaaaatatcaattcgtagatttatgatttttatagaaaaaattattaaaaaaaaaaataggtaatagtcaatttatagatttatgctttaataaaatattaaaattgaaagaattaaggagagaagagaaaaatagtttagtgtgattttagaatgccatgttcccgcttcatacttctcatttatatacatttttatatatatatatatatattatatatatatatattgataaatagatataaagagtttagtagtaattgataaaaaaaatgaattattttttaaatatcttaaaaaaagccaaaaagtcaaaaatatgatgatagattttagagttagtcaattgtttaaaacatgttattttaaatatcttaattttttttttaaaaaaaaaaagctaaaagcacaaaattgttatagccaaaaatcttagagttatcatttttaaaaaatattatttttaaatatcttaattaaaaaaaaaaggccgaaaacacaaaaaaaaaataaaataaataaatacatcactcacgtgtgattaaaaaaaacgaaaagttaaaaaaaatacaaaaaaaagagaaaattttgagaaa

SEQ ID NO: 405050 - DNA, 700 bp, Cannabis indica
taaaaattgttccatatatatattatatttacaattttaacacttaaagtttttatttacaaaaatacatttatagagttaaaattattaaaatactgctcagcaaaaataactaaaaaataactaaaaaataactataaaacaatcagaaaaacagtttattatttttactaaaatacttttgtaaataaaaaaaaattaaaatgtaaaaatgaaaatttttccatgttaaaatattttttgtaattttttcttctacaaatttttggtctattatttaaatttttcaaatatcaatcagtgtaataagacttgtgaaacgaaatggttttagcattttgattattttgttcaaactcaaaaataacattagaatctcaactttttttctctccaaagtcaaaggaggctaagattcttttgttatttgaatgatttgataataattaggtatgtcaaaaagatctatttagatggagcaggtcggagcactgattcgacagatctgttggattaaaatcttattgtgggcacatatgtataatgtatatgttattacaaagtgtaatacaaaattaagtgaataattatgttatgggtatcaaaaggatattaaattgttatgaaaataatatgtagataccataagttaatttataatttgttgaggggccaaattataaacacccaaaactcatta

SEQ ID NO: 405051 - DNA, 597 bp, Cannabis indica
cacatgctcgaacaccctgattcgggaaatccaaacccacgactttaggttctgttatactctctatgaatcacactaactcaggaaacagggaaacacccaactacggcactgaaatggacgagaattgagaaaactgattttttggggaaccctgccaaaactggtttaccggttttacaggtaaaatcggtaagccggtttttatatgagtctccccaagaactcatcaattagctcaaaacttgtccaattgccaccaaactttccagagtacctaaacaatgcacatataatatattccaaccagaaaatcacaaaaaaacccaatgaaactcaacttgccattaaagatcaaagctttgagttcaaaactcaaatttgcataaatccaaccccatacactaaaaccagatgcaagaaacttaaaccaactcaaatgaaccttaaaattcgaaccctaaacacttctaaccctaacagccatcaattcttaaaatcataattgaagtgatcctcctctggtttttaccccagccgaaagagagaaagagagagagagttgtattctttggtttttctttaattttcctttat

SEQ ID NO: 405052 - DNA, 552 bp, Cannabis indica
tacaatctaaataattaattatcccttatagatggtctacaatgaatagggactaaattactgttttacccttcaatgtattttgtccttaaaacacttagctacttgtaaataatatttcgggaaactaatataattactgagatgaaacctcaatcatttaaacgtgtttagccaagctctaaggaaactatcctttcacttctaagtacttataaaagctatagattccatatctatgattaacgatcccactcatttgacataccgagtttccaagatgtaagtattggactatatccaattggtcagctttaacaaacaagtgaaagaacccatatagtacaattaagctagaacgtaaccatctcgggattgagatcaattgacctaagatcaactaagtgacattgacttagaacagacataacagttagtttatgaaatctttttctctgtcaatattggtccagtccgatgcacagctgatacatccgatactagtttactttgctaataacctggaaaggacattccacttatacaagtgta

SEQ ID NO: 405053 - DNA, 993 bp, Cannabis indica
tatatatattttttttatgtattagaataatatccacgcctatctttgctacctaattcagctatacttaattcttccagctaagattatatatataataaacagcccatattctgtcacttgaaactttaaatttatttgtattttaatcaagaatccatgacttaattttgatagcacattttcgattagtgcatacaatcatacattattttgataaatatgatacagattacaaatcttatatatttaattttcataattaacagaatatataattttattgcacaatatttcaataaatggaaaatttatactatatatactttgacatttttacaattttacttggggaattacttcatataccatttttttaacttttttttttctttaaatttacggttttggttgctccaatagtttcaatgtgggttgatgtatggatttaggttgcaattaatttaatttgctccgttagttactatatgagtttctatgtgaattttcgtaaaaatctaaaaaaaaaatgattgaaaatgtaaaataaaaactcttttatactttcctacttaattttttcttttttttcttcacgttaactttcttttcgttttgtcttttgtatttttttcagtcatggatgactgactttttttatctcctctctctctacggacttaggatttaattttaagatggacttagttatacatttaatataatccaaaacaataaatgactagctaaatttaagtggaatagcaagttttcttgacttgttgtatagtaggttaccaatactgaattaaattaattataattaattatttttttaaaaataattaattttttatttaaatatttaacaagatcttttttagcaattaatatttacaaataatatttttattttaatatttaagtccatatttttagcaagatctttctcggcgtgatagggattcagacaacccatgtctgaggaacctc

SEQ ID NO: 405054 - DNA, 597 bp, Cannabis indica
gaaataggcggtattatgagagatgcacaaaaaaagaggcgatttttttccaaataaaaaaaaataccgccaactcaaaaagaatactattaatgtatattttctcactctcttgtattttaataaaaaataaaaaataaattttataaaattatatgccctccttggacacagatttttttccattacttgtaagaagaaattggtcaccaaagataaagcccaaataagtaaaggccaaaaaatataaagcccaacgaaataatggagagtagatgtgaaacaaatgacatttgggagtttacatatatctataataataaagataaataatactaaatttattagagaaaaattaatacacccaaatacaataataattattataaataacaaatttaatttatgttataaaaaaaaatacatttttcctagcgtacaactataataactttctttagataactttgggtgattctacaatgcacccccttaaaaagggatgtattgatacaccctagacttgtttcagcatccagaaaaatttttagtccaattttttttttctatgtacgttatagctatttaagataacct

SEQ ID NO: 405055 - DNA, 332 bp, Cannabis indica
tttatatattttttcaacaaattttcacataaaattatataaaagattcattacaactattaaaatttcaatatttactaataaatattcaaattattattcttatgttatcaaatatgagatttttaacatgttgcgctttcaaaatagattatttgtgcttacatgtcatgatttttaagtttgtcgtgtcgtgttatgagttcatattttttcgtgtcgtgtcgtgctaatttatagtatcatgtcttatacccaagcttaggggtgttcgcagtgcaagtggtgctgttttgactattttttcaaaccaatccgcacatgcagttttt

SEQ ID NO: 405056 - DNA, 1065 bp, Cannabis indica
gaatgatgctgtaactatatataacgaaaatagaagttgactaagagattggaataggagattgacggtagcactactcaaaaaattttgtttgagtattgttattttgtgctcaacaccagtctgatgtggcatcctatagtaaagtgagaaatttacatttggcacctttaattggatctaatttacaatattgacgttggtctttttttataatcatgtgtattagatgtttgccaatattttcatttatttttttctctttctcttttctctctcttctctcaaatttaaaaaataatttctagtgacattgttactcagttcaccctaaaatatactattgtgatttattgttcaatgtgaacatttcaagatgtgggaatcatatttgttttgctatttcatatagtgattagttattattatatatatatatatataatattttaatcttcattaatatttattttagaatttagttaagtgaattatattatatgataattaattagtttccacaataaattaggattaccaaaaatatatcttaaatgatattaaaataccacagtatgttttaaactaattatttggtaattactaatttagatatttaaaaaatttgctaacaaaatatgtgatttattaagagtatatatgtttttttatgatagtaacttaaatgtatgttaaacaatataatataatctaaatatgaacatatactttaaaagtaattaacaaaaaggcaaactaattagtttgttaccatcttagtaaattttagataaaataatataatactttataataacttcagaaatatgattggtatattaaacttttttaagtagtttagttactcaatctttagttaaccaaatataataatttctacttattttttaatttacctaataaaattataaaatctataactatatataagagtgagaatgttatttttgactttttacaataaattacaaaattattcttatttactttgttaataaccattaaatccaaactaatgttgtagtgagttattagtaaaaaaaa

SEQ ID NO: 405057 - DNA, 680 bp, Cannabis indica
atcattttaaaattcccatacataaaccattggaaattatcaagtggtctcctttggttttgcagtggggtggaaaagttataatcctacataacaaacatgttacaactcactcaaatagaaaaacatataacaaaaatctaataaatttttaaataatacataattcaaacgagctagttattgcacatatgcttattttattttttttttcattctcacgtgaataaggaatttacccttcccttttgtacaataaattatttttctaatataggccaatggaaaaattaaatttcgttttttatattgaaggaatacatgggtatagtaggcaccacaatttttttttaaaaaaaaaaacataaaaagaaaaaaaatcaaattatttatgattttttttttgtacatagtaataatttatgatgttgaatctaaatattttacatacatatattaaaatacatgtgtaatggactatttgaattatgattttaatactataaattattaaaagaaattaatcagatacattctataactttaatataatatacatcatctaataaagaatttggatacaatttctccatataccaataataaaaatgaccttcaacgttatggcaaaacttattatatatacatgtgaaataaattattttaggagaattacccca

SEQ ID NO: 405058 - DNA, 965 bp, Cannabis indica
gttcccaaatcggtggagggtcattctcgatgcctccacatggcccgagctaagccctaaatttttttgtagctcgtcgagcacatgtttgctcgcagcatgcacacaaaagtgctcaaacgcgagtttgtagtctgggatgtacggtttcttagttgtggcaggagatagcgatggtcggggatgaggagagctacccttttcggcggatgtggtagccctaccgccgaaaaggtgggtccaaaggagagtggcaaaaagaggagttgttccgataaaggaaggactagtgggcccaatgttgtgatgttggttttgatggcatcacctcctatttccattatgtctttgcttatttttagacctttttgtcttttctcatcttcttcttggtaaatagccctataataatcaaggttaattatacacattttaaattgttaaaaaaataccctaatataaaataatgtacatttttttttaaaaaaaggttaaggtgactagcaaaaataaataataataaattttcaactacgcgtgacattctcctcctaaaaaaaaaaaaaaaaaacatgtgtgacatacatgacaaatattgatgtattaattaagaggtaaattgaaaactactattttttattatatatttatcaaatatagttgtaaaacaattttaattaataaatattttttttaaaaaatccaaatattatatataacctcacaatcacataagagacataataggaatgtgacctataaaactgaatataaagtaataaaaggtaaaaattaaaataaaaaatggaaaaaaaaatatatagtgtaatttactcatttattaattaaaaacatatgcgtccttacagtgggatggatgggccaagactcaaggtttcaaggcctaagacccaaggtcctgtaattttattttttttattgtataaacacttaaataaaaaaaa

SEQ ID NO: 405059 - DNA, 661 bp, Cannabis indica
tccctagattcgttcaaagcacgccgaatgtcactttcttggttccagtcctgggatccagccgggaggctctgaatacaattgagcttctgttctagctcttttataaccacatccaactttccgaactgggaacggttccaattaataagtgccaccctggtagcaccaaccttcttgaagatacgagcaggggcccaagcatgactgaccgatttccaagcatgggctacaacgaggttactacgagcatctcgggtccaaccttcttcgaagttaaaacatctcttaaatttgggatccaaatccctcgagaggagacaaagcggtctatggtccgagttactagtttggtcagagcagagaatagcccgttgaaataaattaatccaagccccattcactaagcctttatccagcgcagatttcacatgatgcctcccaggcctatggttatcccaagtcagtttgtccccttggataggcatattgataagacctctactctcaatcagattagaaataatcagaataaagggatcccggcctgaagagccctctctttcagagtcactaaggacaaaattggtatctcacaaaataagccagggcccgccaaaccgatcgccaattttcaaaaactcagaccagaactttttct

SEQ ID NO: 405060 - DNA, 585 bp, Cannabis indica
aataaagcatacaacaacaacaaactccatatcaacaaaattaacaccaatccactcaacatgcaacaaagaacaaccaaaacttaaaacatgcttttacctaagaatttcagcaagaattcaacaatcaattccaaataatttcagcaagaaactacctcaatctcatgcacaatcaagcctcaagcttccaacactcttttccaacaaacaagcttcaaatcaagctagattctcacaaattcaaattgaaaattgagagggtttgagaaagggagagagggtcggttgagaggggaaacacaaggtgaaatctcaatcaatttcctcaaaaatcaacttttccaaacataacaattagaggtcaaatgaccaaaatgcccttagggcccaaagcacacatattcacccacacaagggtaattttgtcatttcatgcataaataactcacaaataatttcagattatcacttatcaaataaaatgccaagtaaatcaatcccatttgcatttcgggcccgaacccagttcggcccgaaattcccaattgtgactataccgcaccaacctgtcagaacacacct

SEQ ID NO: 405061 - DNA, 779 bp, Cannabis indica
tttatgaaaaattaaatgatattgacttagaataaatattaactgttaagtttataattatttttttatactatcaatatcgacaaagtttaatgtaaacatcatacattcgatacaagtcaactttactaatgtcttgaaaaggatattctacttgcttaagtgtaggtacaccacataaccgattattacgtcaatgtaaatctggtgtactgataaatcttgggactaagtaagttcgaagcatataatcacaattattttctactataatgacatcactataattgtgagtaactttatgtttaaaatttaatagaatttaagtattaaacaaataatcacgtaaaacaaaatgaaattctgtttttatgattaccgaattaattattcaaattaattactgtacttttacagagatgtttaaaccaaaaaaaaaaataatttgaacaaaaataaaatatgtttaaacagataactaacataaagtaaaaatgaacataaagtaaaaaacacacgaaattatacgttgtatcaacaatcttcttagattgctattagtccatggggtcacacccagaaaatgaaatttattagaagaatctcaaaattattataaaactaaattgacttatacaaataaagactctctttttaaatttatctcaactgttgtaatctaagctcttcatcaagtttctgaagtgctaaatcttgaactctcttcaaatggtaactgattaatatacgaaaatacacattttaaagcattgatcatg

SEQ ID NO: 405062 - DNA, 649 bp, Cannabis indica
caaaaacgactttcatcggccctactacacctacatcatattatatcaaccctgtctcaagcttaccactaaggttttaagagaaactttagaaaattaaattaaatatttttacaaaattattaatttaatcaagaattttttaaaatttattttcagttaaaaaacatattaattaaattcttattattacgatttttcttttttatattatttatcacatattttattaataattatcatacttgcacaactaatttatttttatctttcataaaaatataaactaacaatcataaaaataatcacaataaaaataagtataattataaaggaaaattatattatttagagatgatttataaataaaatttctcattaaaaatattattaattattaattgatagttctaaattttagattaattgaaatgtaagttgatctttagtaataaatattaataatattaaaatttattgaatcacccatattattaaaaaaaatacatatattatacccttaaaatataggccttaaatttgtgtaagacctaataagacaattaagttgtcttataattaaacggaccctaatatatatatatatatatatatatatatactagctgaatgtacgtgccgagccacg

SEQ ID NO: 405063 - DNA, 695 bp, Cannabis indica
tcaacgctactattcattgcgttggccaacgtatatagtataggggaacattggggcgtcacttctaaactgtcacaaaaaagtattaattagcgtcgattatatattagacgctaatacaacacccgatgctaatagagaattttttttaaaaatatatttattttttagcgtcagttgaaaaggctagctgaccttttttgcttcattttaaaattgaagcttaaaactatagcttctattatccaccgacacaaatcttattaatttattctaacccccaattgaattcacgcaaatcttcatttcactttgtcttcaaccttgatcctaagcctcctcctcgtcccatccgcctcctctaattcaggatcaaaattcctaaacccttcttcccccaattcctccctactatttgccccatcgtctagttgcttagaatttgaattcaaaacccaattcgatcggaccattttaaccgctgtttctcgcttcgacgtcactcttcggatcccaaatttgaaattaagagtgtctccattctgattcctctcttccgcctctgcaatttcttgggaatcaccgtcgttgatgaggtttgttaaagacagggcctttacggacttagacgtagccccaacagcggaagagtctctggagaacctccagttggaagttattttaccaggatctta

SEQ ID NO: 405064 - DNA, 578 bp, Cannabis indica
gccataccatctctttggctgtatgtctcaaactgtataatattttcaattgaggagtcaacagtaaagtagcgcatcaccttatgtgtctacttttttccgcttgtgttctcattaatccatcactttttttccagtttctcttagcctcatgctgtgttggaggaattttatctccttcagaaatgcaaacttcagcaacttgaacaattcatcaaagatataatttggtactttttccaaatttttcgtgtgcatcaactttgctataaagttgagggaggatatccaatcgcaacaaaggtacaactctgcctcaatctcctcaaatatatcatcataatattgacccctctgaatgccatcatcaatagctctttcctcatcatcatttataagagggaaaaaatcttcaacgacatcaaccatttcatccgcatcgacattgatgttagcctcgacaggttcattcggctctccatggtaaatctacctctcataaatgttttcaaaaccctttgtaaagatatgtgcctccacagtattcaaaggatacaatctggtattcttgcatttaa

SEQ ID NO: 405065 - DNA, 1005 bp, Cannabis indica
gcctcttttagttatgggaggagggagagacagtcatatttttagattagtccctgcccttcaaagtttctgaggaaggtattgggaatattttaccagtatctagatttactaacaagtatatagaattaacatcttaaaatatgaatatctctaagacgatgaaattaaacacataagagtttagaaaaccttacattgattggagcagagcattatcaagatctaaacctggatatctttctctccttcaggtttggttaccactgttttccgcagtatgattgagtacttgacttgctatgtgtgggcatggcactctatcactataggacaaataggtgaagaacaataaaggatgcaaaatcactatagaaaggagctctctcatctactagttgtatgacaaagaaaactagatttgatttggttgaaggcaatggttaagttggatgaaatgagagcatcatgtttcttttatagtgtttcaactagggcttaggtttgaattatatggattaaaataataataaaatattaggcaaaaattcactagaatggccagccactaaaggacccttctctagttcaaattttgccacgttatttcaaccacttattcttctttcaataataccatattttccaattgaatcctataaatgccaaaactatttatttaataattaaaattaattctcaaataaaattgtcatttatattatttattcattagaccatatgaagtcttttaattaataaaataaccccaaaacctctattgttcacaattaagcccttgcttattgaaaattcataaataagtctaattttagaattataattgattaattaaaactaattaactgattccgcaagcagtattatctcaactagtgagtggaccatgggcctatataatcgagcttctaataagtagatctagaatttaccaagcaaattccctaacttattacttcctccttgtgccactatagattcaaa

SEQ ID NO: 405066 - DNA, 619 bp, Cannabis indica
ctaagaagggtaaaccaaaagttattattgctattaatgttgtttttaatgagttagaatatgctcacttgacctccaagaaaggtagtgtgtctctgtgtgttacagggaaaataggaaacaaagacaccgcaagcgtagaagtggactacgaaactaagctctcagaataaggttcacaggcagaagatagtgtgaaactggaagacaatccgcagatggaagccattttggagccgaaagaacaagataacaaagacccaacagaagtgtcgaaagggttcggacagataggtctagaaggttatcagttggctcgtgatagaactcgaaaaatgatttatcctctagtaagatttgtgaaagcagacataatagcatttgcactgccagttgttcaacaaactgaaattaaagagcccacaagttatgaagaggcaatttttggtggaaacaagtctaaatggctccagggcatggatgaggagatggaacgtatgccgaagccagaaaacaagaagattttcaaggtgaaagagggaatcaatgagaatgaacatgtgagattcaaagccatgttagtggctaagggttttactcaagtggaaggtatagacta

SEQ ID NO: 405067 - DNA, 693 bp, Cannabis indica
gaagttatacttgttttcaatgatcttgctcggtaaaagcgaacaaaatatatacttcctacatattaaaatgtaagttgatattgtataattcttgagtccaaataattaataatgtggctgaaaaaggtttttaaagttttaagtaaaaaaaaaaaaataaaaaaaaaaaaaaaaaaaaaagaaaggaagagagagaatgtgtgcataaatggacgttacaaaaaaagaaaagaaaaaaaaaagaagtgaatgatctctcggtattcttgaggattaatagattattataaaatgattgttattttacaataattaaatgttaccggtcatttgtaataaaaaaaaaaaaaattattttcgttagtgggtgtaaattcccccttttttttttgtaatgttgaagttaggtgaagaagttaaatgaagagagagattgttaatttgagtactttatgtaagtaaattaagtattgaaacttaataaggaagcatgggctactcaaattacttctctagtatgagaagtcatgattcatggaataaaaatgcatttgagatacaacaccaatatataaggaaaaacttacaaaaatattgtttttctaccaaatgttttcaaaaatactgggacacggcaaattttacatttttactgtccaaacccatttttatttcttttatactgcccag

SEQ ID NO: 405068 - DNA, 989 bp, Cannabis indica
aaaatcttaaaataatattgtaatggggcacctagtaaggtccataaaaccaaatctcatatagtcaattagctatttttcataatatttaataaaataaaataactaagattcaattttaaattatactaagataataatattagcgataatataaaacataatattgaattatagtagtaataataatataatatgatacagcattaaattacacattttacataaatactataaacattaacatttctctaaaataattgactgtctcctctcctcgtggtagggagggaagccaatctattctaccgcacaattaggacttattttttttttttttttttaaagggttaattgttttacagcttcctcttctcaatattcttttttcttgtttacctgtaagggtgtattaattatttattccataagttattattttcttacaataaattttacaaagtacgttaaaaaaaaaatcatattatcattttaatattcatgaccacactccaaacaattttaattagtttaatattctcatgttttcttctttcttttaaatagatatatatatatatagtatttgaaatgagtaaatatttttataatatatataacattcaaattatactaaattaaaaattaatatgatagcttagataaacaaaaaggtgattaatatagaaacaaggaaggaggggcacgcttagaaatcaatattattattcttaatagcagaagaaattaatagatattcattcattgaatcatgcatgcaagcaagcaatcacattatattttatattctccctcacctccaacttgtgcctacctagctagtaaaattaaaccaataattaacaataacacccattgttcatttttttcaatgtttccaactcattcaatacaacatatatataaccctagcctacacttgcatgtgtatatatataatttatatatatatatatatataaatgatc

SEQ ID NO: 405069 - DNA, 855 bp, Cannabis indica
attaagtcaaaactaataaaaataatgataaatgtatctttcaaattttcatcttcaacaaaataaaatgatactattgacaaaaataaaataaaatattgtcaatggtattattttattttttaataaagtattattttttttattatttgtattggactacttttaaaatgggcttgattaaaataagagtggactcatcaatcatgattaagatattgagtgaggacttttgtgaattggattttaataaattgaacaaagtgaattaatatatgtatatatctatatataaaaaatttgatgtatatatttgagtgagggctttagcctacgtatgggctaaagtccctccgtccctggtcctacactcacattttttgtaattttgttagtccttattttaactagtccattaacttattcaaaattatcacatgttgaagcgttattaaaaattaggaactaatgtgcatcaaatttttcctaataatataatccatccatttgtaatatgccttctaattaaagtttatttatgttaaagtagctgtggtatagttctattaaataaaaagatctccattagtattattcttggaaagttgttcttgaaaagttaggtgtctcccggatgttattccagatagctaacttgtccattgtgaaaggaatcttgtggaatgatagctgagtatagaagggagttcctggataactagctgagtggaatgaaagctagcctcactgtgggatggagttctagttaggtagttgtctctcctggaatggtagttccggataatcgactctagcaggctcaatcctatccgaaagcgtcagcgagtgtcatta

SEQ ID NO: 405070 - DNA, 540 bp, Cannabis indica
caaacatacaagggcataattgttaattcactcatttatttccaaataaaattaagatttcttatcatcaaataaaatgccaatcaattcaattcaaattgcatttcgggccctaacccggttcggcccgaaatacccagttgtgactatacctcgccaacctgtcagaacacacctgaaaaagacagcacatgcatactatataataatatagtcccataagcacgttagtaaattaatttcataattttacccttctcgggtcaaaatcactaaaatgcccctggctcaacaacgaggtcttaccatgttataaatcatgttaattcacatatattgaactatataataatataattcatcaattattcataattatctaattagggttttgctaatctatttcttaattctatggtattacagcatattaacaattaaaaaccacaaaccgcacctgtaacgccctaaataattaggcatgctacccaaaaatgcttatgaaaccctaatcccctaatcgggattactaattaaaat

SEQ ID NO: 405071 - DNA, 587 bp, Cannabis indica
aattaaatctctaaaacaaaagttaatagcctcattttacaaagagatcttaataaatgaattaaaaattcaattaacatggataggagttcatgaacacttagcatttaggttgatctataaacgatcatttgttatgatacgaatactagtctttattattaaatgactttgtataaagactttgattcatatgggccttgtcatatataatcattttatgatactcactaaatcacacttaaaactctaattaaaaaatttaaaaactttaattacttgttgactattttattcattcatgtcatcttaattctcttgtgctaataaaagatcacattctcaataatgaatatagaatttttttgatatttacataaattattgaatcaataatttaacaattcaaatataataataataaatcattgtaattatttattcatgttaaaataataaatatccttacatgcttttaggatacactgctaacaatgcttatggcacgtttactaaactgtaattggaattagaataatcaatggaagaaatgaattaggttaaaatataaaataatcggaaacaat

SEQ ID NO: 405072 - DNA, 699 bp, Cannabis indica
taatatattctatataatcaagtatatattataaatatataataaaatagtttttcattatttttattaataaataattaaaataataaaataaaatacttgaataatataaaattatttatattaaacactaatttaatataaatattaattttgaaaatatttatacaaattttctagtaatttaaaaataatatataattttattgttatattatttctcttagaactaatttaagtaactattgtttaattaataatattttaaattttaaaagcttatgtatgataattcaaaattatatattttcactaattttaataaataagtttttgataaaaaaaaattataaataaatttgtgataattctttcatttaaattctttttaaaattcaaaatatattaataaaatcaaaattaaaaaaaatgataaaaaaaaaagctcacatgcatgagattatttgtcccaccctgctggatgggataaataatcacagacaggtgagattagctgttttagttatccagacttctaacatgcccaaacgttggactggacaaattagtttgtctaattcagtctagtcctgcataccaaatgagcccttggtgtactcttttacagcagatttttaaatgagaaaattacactttataccttttttatattgtcctcttttatttttatcctctttt

SEQ ID NO: 405073 - DNA, 510 bp, Cannabis indica
ttgttctattgttagaacattttcacaaaatgagacagttttagtgtgtctaaagaatcagtctcacatgagatacacgagtccttatttataagggtatataaaatatgattttagcattcaacttaagggtatttaattttgtgtgaatgagtgaggacacacaattccatgatcaatgtttttcttctcgttactaccttctatgcattcttgttattgtccgaccgtgtcgagttggtgtggtgtgacacactactacaaaacaagtctttagaggcgtttatttttagcttaataataaataactaacgacatagagttagaaatctgttgacgggaattgtacgcctcttatggcgtcggttatttagaaataaccaaggacatagggtgtgcccccgtcagttatttcaaaataactgacgccaaaaggagcaccaccacgaccccaaccacaaccacatcccgactgctaactccggccagccctaaccccactccagcccc

SEQ ID NO: 405074 - DNA, 739 bp, Cannabis indica
atatatatattaatatatattacgtgcataaagaagttatttattttttatttttaaaaccttattccaatatcactcatatttttcaatttttgattagtaatatcttttaataaaaatttcaagttagctatatttatttatctatatattataaagctgagtcataaggcagtaacgtggcaatacggtgatgacatcaactttaaatgtagtggtgactataagtgagatacgataatgatagttcttttgaaattatctgaatgagtttttaataaatttacgatcttcttttttgttttattatatctatattttttttttagtattgttcaatttttaattcttttcacaatgtatatttgaagatattttttgtatataagaaattgtatggatagttttttttttaaacaaaaaaaattgtttagagttctttatataattgtttttaataaatatatattttaaattttacataaaaataaatttaaaattatttgatatgattttattatttgataaatattcatatatataatttaaaatttctataagcagcgcacgataggggtgttcgcggtgcgggtggtgcggtttttaatcattttttcaaaccaacccgcacatgcagtttttctaattttccaaaccgtacccgaaccgcgatactaaaaaatcgcaaaaaccgcactgcaaaaaattatgcggtgcggtgcgatttttgcggtttatg

SEQ ID NO: 405075 - DNA, 608 bp, Cannabis indica
gaagttggctgggagaaaaaataacataacaaatatagtaaaatatgggaagctgagacacaacaagagaacgtacaagagaagacatcaaaaaaaaagaagaagcagaacaattaaaaatcaatagtggaacaatacggaggaaaactgaatatatattggagcataggatactgaaaaaaagataacttacacacaaattttattattttcctatttatattaaatatagagtagtacaataatatttggaaaaatgtgagaaagaaatgaaagaaacaatagtaaaacaacattaaacaataataaaataaagtagtaacagaaaatggtaggttggagaaagagggtggacttagaagtacgatagagatggagccaacattttgagactaaagagactgaagaacatgaacttagttggagtttctgagagatttctactaagaagctcatcacaaagtaggctctccatttctctctcacacacacaaaactacacccttatctttctcaaatcttcttcttcttcttcctactttacatactctttttttttagttacctactacaaaaagagagggttagctttgttggaaattatttta

SEQ ID NO: 405076 - DNA, 511 bp, Cannabis indica
tcacaatattgttattgtatgttattatggcagtaatttggtttgttttatttaaagagaaaatttaatggaagggatagtgatgactacaagtgaaatagaatgatgagaacatcttcaaatatgatcaactgacgactataagtgagatacggtgataatatcggttttgaatcttataattttctaaatttatcaattgtgtttttttttttttttatatatagatctctattttgtgtgataattctttaatttctaatattttcttcactataacctttgataaagaacttaatatctaattagttacaattctttctttttcctcattataattaattgatgaattttatttggtatatttcttctataataaaattttaaattcatttatgtataaaagtgaatagttattcattgtttgatttgttttatatacacaaaatatgttgggaatgatagttaactacaagttagatatgatgatatataacaacacacttgaatg

SEQ ID NO: 405077 - DNA, 698 bp, Cannabis indica
agaaggtattaatattgttaagttactttagaaatgagaatacactaagtgagtttagagttccatcaactaaaatagaatattggttccaattttgaaaaggattatatttacaccacgtattaaattttttaatttttttacatttttatggtggggcagaatttttttcaaaaatataattgtgtaagttttatattgtgtactgtgttcagttttcaatgttgttatacggttattttttagttattatgtttagtgttctactgttgttttataaaaatacagtatttttgaaaaaatttccatgtggcagtatttttgtaaatgttaacctaaattctaatatttttgtaagttttccttttaaaaattagtgaatatgcattaatgtttgggaaaatattatgtagaacattgtattttgcaacaatcactgattgaattttcaattttttaaaatgaaaaattgaaccatatatattttttaaagggatattggcggctaaaccacctgaacttttcggtttgtaacacttaaccacaaaaattgaatttttggcggctaaactacctaaaccctggttccgttttggtctgcacacctccgtccaaaaatcacagttaaatgctacggtggactgtccacgtgtacacacttgtacacgtggcacctttttagtggtccacgtaatatt

SEQ ID NO: 405078 - DNA, 500 bp, Cannabis indica
cacctcaaggaaggtgcctcccgaaaaagagcataagccccatctttatgctccgggaggctagagccatgctaaggcagttacgggaggtaaagagattactcgtacaatcacttcgcatttaatgtcgcatgtgtaaagacgtattgaagcctccataaacgacatgacagatggcttaaccctccttttacgacgattacactacaattgatgagtctagtgacaactacattatgaggaatcacatcagtcaagaggggataaaagattatatccacctaactcctaagatacctaccgtataggtcatgtatttcctattttgtatctactaggaacatgtgcccttatgaagctaacacagaaagacaagcgatctatttctatggattcccccaaaaaaatactataaataccccacaaatagattgaaaaggtgtcaaactattttgtttaaggaattgaagagagaaaataggagagaaatccaccaaaaa

SEQ ID NO: 405079 - DNA, 761 bp, Cannabis indica
tacgttgagttttatcaaaccaaacttgccgacttccactactttccaccaaaatatgctaaaatctcaccaaaaaaatctaaatgcatgattagtctttaaaatattcaaaacaattaaaattactctaaaaaataatttaaagaattaatttaagaatattaatgcataaattgatcatatttataagacaaatatggactcatcaaatacctccacacttgactcttgctcgtcctcaagtaagttaatgataaaatgaatgaagcttcaacaaatcttttattttatttaagcgtttatatattacaactatgtttaactcgaactcaggacctccaacactcacacacccacctatggccacttgagctagccttaagtgaagcttaaacaaatcggtctttatgaaaaataattttagttttaaaaattatatatccacttataatttcaagaaaatccaaactcttttaatcactagttgaggtctccgtgcttcgcacgtgaatcttagtttaaatatttttttaaaaaatttgtaacatgttgattcttgttttgatcttcaatatttttttttagtattttctaaaactaaattcgaatctatctctcaaaaatttataagtagactaagattccaaaataacaaaacgatatatacaagtaaataagttatgtgactttgactattattaattatattttctttaagaatagtcatttcattatatttttatcaagtaaaataaagatta

SEQ ID NO: 405080 - DNA, 627 bp, Cannabis indica
aaaaaaaaaagattttgttgttaaaatgcgcaaatatcttaaaaatataatattttttttgacgtggtgaacagagtcacacatgattaacaaagcagcaaaccacaatcagcctcctcgaaccaggatagctcatcgtctaaccgaagggcatgttttgccgaccatgagctgtagaaatcaaatcgcgagccacatgggacaaaactgcccccggaaatatagacaacaaagctataacgtcttcaaacagcaaacaccttctcataattaaaagttgtcgccagagctagcaaatatgaaaaacatcgcaacactaaaccaaaaaatacagttatattagaataacaatcttcaaaataaaaattaaaatacaaaaataaaattaacacacaacccatgtcactagttcaacattacaaaaaactaaaacaccaacaaaatttctaagtaaaactagccaaaggtattaccctttggctcgtaacaacatacgaacatcctaattaaaaactgctgaaaatcaatgtcaaacagattatatttaaaaataaatttatcggtaaatgctcttgaagtgtaggctcttcacaaaataacctataaaataagaaaaataaactctat

SEQ ID NO: 405081 - DNA, 470 bp, Cannabis indica
acgattataatacatatgtattctgagcattacaattattgtgtgtggtatttcaacggttctctatcgtgaagtatagcttcgatacaataacgacgagattgatagtgttgttccacagttctgggcagcgccgcggagtctaaaagagggcaacctattcgcgactcaatcgatattttaattcgataaatttgttcctttaatatttagtacttaacatttaaaaatgaaatttttccgtaattatactcttaaatttttatagacaacatatgagaattagaaagtgtaattaaaaatttaaaacttcaaattatatactaatttatataaggagtacattgttagacttttatttgggcttacattaaattttattggttttattaaaacttgggttgattggatagttctttgctgtgttagcccatgttgttggtgatcaattgttaatgggcttagcatct

SEQ ID NO: 405082 - DNA, 712 bp, Cannabis indica
tgaccgtttttgggaaagtttttttcaaaaaagcgtgtgagtgaggacaaagcacgctggaaaatctcatgttagttttagggtcaggaagcaactagattgacgtactcgtgtgtaagagcatatatttgtaagagaaggtctaatagaagcttgaaatgaaggcttatgtaacacacaatttccgccctatgtagcacacaatttttttttaaaatagatttgcctaaactaaataatatgcctgaaccctattacaaatattttagaacattttatatcaataacaatttatcatctaagacttatcatataatgatatgatgtgttggtgtaataaaattaatcaaaaaaacactggttatattatatttgtagtcttggattttgataaattttagctcaaaacaaactggactaaaatccacattttttcatccattaaaatatgttgatttagtgaacatttcttaaaaatcatcctttagaagtaaaaattaaaagatcattctttttataggtgttttggcttcattatttcttcccaacaacctataagtaacattattaaagtgtttgtttagttggattcttatttgtaattatacctttattttattactttttttattatatatatatactagcaaaaaactacgtgcgaggtacgtatactaaattttatgctagtttttttctatgttatttgaaa

SEQ ID NO: 405083 - DNA, 534 bp, Cannabis indica
aataaccacagccacaaaatcatcaaacatgcaaaaattcacctttcttaaacttcaaaaaattaaagaggaggttgcttaaaggttaccttagcttgaattacacttagaattgctgaaaacttgctgaattgaagaacaaataaatcaaaccctagcagcccctaggattttcgagagagagagaaagagagcttgagagaggaaaaaatgtgattttcttcctaacttttctaattttataaaatgagttaatttaagagaacataaatgattttgtttaaaattactttcagccactaaatccatttactaactaataaattaagtccactaaaggacaaaaagtatatggggcaaaatgaccgttttacccttccacactaaaagctataaagtggcactaaaggatattttgggaaattctattcctgaccatccgacattcacaatgtctaaatatactgtcccgctatactaaactactaggatgtgattctactgagtcatacaccgcgttcaatgttgccgagc

SEQ ID NO: 405084 - DNA, 887 bp, Cannabis indica
tttatgaaaacccctatatataaaagtgtaaggcccacctaagcactccctcatacatcatactccaaaagttgttgatcatgaaccatagagcatgaaaaatgatactaaaaaacacaatcacaaatagggcatcatgtattggatgacaccccatgctttgccaacttagtcgtagttggtatccaatgcaaactagctttcaaagcaaggattttaatttttggtggtaaaagagcattgttattggacattaatggtgtccaacacttttcatatgggacctacgattggttagcgatactttctaaaagttatttttttttttaaattatatgggacctgctacttaattataccaataacagtatgacaccaacaaaaatcttaaacatcaataatatttttttagcaattctcgtggtaaaaaaaagctttaaaaatatttttcaccacccttttattgtccatctaatatccttttttttttttacttgtataagcatcatagactcaatatgatgctcactgagctaatcaggttgttgaagagaattaggaataacaatacaaagaatatatatatatatatatatatatatttaaaattattaaatacaaaaatatataattttcctttcaatatatatatttaaaaataattgaatatgataaaattgtgtgtttataaactatataagaaagtttagttttatattaatagggggttgataacatctaatccaatctaattaaattgaactaatttaatccaatcaaactacaaaaaattagatattcatttacaatttgattagattggatattaaaagttagattctaattggattagatcaattattggatgtcattctcaaaatccaatt

SEQ ID NO: 405085 - DNA, 527 bp, Cannabis indica
tatcaaagaacgaaaaccttcagaggtcttttcttctagaaaggaaattaggaacatcaagaggaagaatgaggaagaaattgttaaattacccagaaccataaggatattgggcacagagaaattttactagcatttctatagcaacacaactatttcccagaagtttctaagactaaaactcaaaagcaatagaatttttcatatttataaactaccagcaatattggtcacatgcctaaaaaaattcaaaattcatttgaagaaaaagcatgcaagccctaatttctatagtgaatttaaaaaaatacaattaaaggtgaatagatgaacaaacccatgcctggtggtgaagcgaatgcacctaaataatcttcgttggttttggatagtgcaagcaagcacacctttcaaaaaaaaaagtttgctaaggtaatcaatgagtcgatttgaaaattaaagtctatatgcgccaattcactcctctaaaaaatgctcaatcactgggggtggacagtttggaagag

SEQ ID NO: 405086 - DNA, 511 bp, Cannabis indica
ctgtgacatagttttaagtatttcagtcatattctgtgtggcatgattttatttagtttttttttttcgttgttggttcttttttgtctttcgatggctcgccatcaaattgatgttagtgatttatagtaacaagttctttgcgactgaaagagttagtagtgcagttacttaccttgcacaaaattgagtgatcaagctacaaggttgtatgaacctgctgtaacagtttctattgttctgtcttctaagcgatagataaaactgaaaataggttttttttaaggttaactatgatgatgcaatcatttgtatcttattatatttttagtttgtttgtcaaatgatctcgaaattaggtggttgattattgactcgtttttcaattctaatcatggttgtgtctctaacaagagagatgtctgttgggttttatgccataaataaaactcatttcatataatcagatttacttattaaaaaagattagaaataacatttatgttgcatg

SEQ ID NO: 405087 - DNA, 494 bp, Cannabis indica
tacataaaaggtatgagaaaccttacattagttgcagcaaaattaaatgactcatttcgctcagatctctttcctttctgtagcagagtataatcaagatctgagcccgacactccttcagttgtttggattcttcacagtcttacacactatgattgaggactaacttgctataggtgggcatgcactcaatcactaaggcttgaatttgatggtgaagaagactatagaattcgaattagaagggagaaaagaaaaagaagaagtctcaaactctctagttatctgacaagaagaaaattaggtcaagagtcattatttggataatgagacctttcttttctttttatactaattcacttagggttaggattgaattatttggaataaaaaaataataaaataatagcagctgaaataggacttagtggccgcccctatgtgggtccatcattagttagatttttgtcatttttctcaaccatttatctatt

SEQ ID NO: 405088 - DNA, 681 bp, Cannabis indica
gcatgtgattgcatgtgatgtgactcatcacactaataaactgccaaatagctaccgactgaagagaaagataaaagtaatacttgaaaaaataaatattagtctatcataacgttggtttccacagctggtctttggaattaaacaacaaataagcagccccacactaccaacccacttccacttctcctccaagtatataactttacctttccgctgacaccactttcaaagtctctattagaatatttatagtagcatcctctaaaaaaaaaatctaaaaatataatattttattttttatattatttttagtactattacttttaaaaatatttcaataatataatactctttaaaaatatattattatttaatatattacttttttaattataaatacattattacattaaatttaaataaattatatattaatataaatatacataacataaagtttaaatttgttaaaaaaattacactaactttttaaataataaagataaattaaaattaaaaataactcattaaataataataagagcattaatttattaaaagtatatacaaattttattaaatctataaataaagtataaaaacttaggtggcgtttggtaacacttttttaattagttttctgtttttaaaagtggaaaagtgaaatatttttcaaaa

SEQ ID NO: 405089 - DNA, 590 bp, Cannabis indica
tgtcataggttaaaacgtttcatcttaaaagtttgtattaagttagttatgtatgagttacatatatgaaagaattgatgtgtaatatatgtgaaactaaaataaatatataattattttttttgtaattatttttctttgtttttgttcttaaatgaaaataaattttgataagtataaaaatttagaataataacaaaaaagataaaacacattagagaaatcttatgatgccacataaccttgcttaacattaggattatatagatatatagattttattttaatcacataattataaaatttacgattaaaagtaaaaaaagttacgactataattatatattattattcttatgttgttattaaaatgttcacatctaaaaatattaatcacaaaaatcacaatttgttgtgactaaatatgttttagttcacaatatttgttgtaactaaaactaaattagtgacaacttgtatctaaatactagattataatcacaagtaactttttgttgtgactaaaaatcacagttaggcacaaaatattaatattgtgactaaaatatatataaaatacaattacacaa

SEQ ID NO: 405090 - DNA, 781 bp, Cannabis indica
acacgtagtttcgagagtaggaatcatgggtgggcgactagttgttgagaggccaaagtgtagatggcatctctgggggttggggaggtgatgattaatgtcgacgctggagttagtaagactgatggttacttactactggtggggtggtttgaaattatttggggaaggttatcgcagcgcaaggtattttcttgagtagacctttttattatagtattgctgaattgttagctattaaacatgggattgaactgactggtcttttatttttggaccgatgtataatttcttctgactgtagcttggttgtagctatgttaggaaggtggcttgagttggctagtgaatgggatttgcttattgtagatattagtcacttgattatggaatttggtatcatagatgtgtcttttcgatcaaatacttcgaatgaagtggcacattctatagttaaggatcgatgttttatgttgtaaaacttctagcttttgggatggacatgttcctccaatggttgcctctgctgtgttagaagatttgcctctccttatgtaatgtttggtggtgatatactgttttggttaaaaaaaaaaaaaaaagaataatatccttttggtaattaaggtagggtgtagttataaaaaatatattaataaggtaattaataatgaggtgtagttatagttttaggagtgtaaatataatctctcttattttatactaaggaacaaaccgcgcttcgtgcggtgtgtccaatttttataatatttttatattt

SEQ ID NO: 405091 - DNA, 654 bp, Cannabis indica
gcctttctgtgctctataattagttaagaaagaactaatgaaccattctcacttgattcatttataaaaaataataattaaggtccgtttgacataatttttaaaaaactaaaattaatttttaaataaatttgataaattaaaaggtatttagtaagtaattaaaaataacttaataaaaaaataaaaaatttatgaaaaagctacaactaaaatttaaagataatacaacttgttatacctgaaattcggttgtacttcagaaagtaacacgtgtcaattaagtggcactacaataaaatggactttttatcccacttcttacacttgaaaaaataaaaagtgggataaaaacttttgatcccacttttatttttggagccttaaataaaagtttagaacaaaagccttgtttggaaaacggataaaaaatagtgttagaaaggctatttttatgcatttgccaaacacaacttagcattttaagtgggactttttatcccgatttttagataataaccaggataaaaggtcctcatacttttggactttttaattgttaagccaactatacatataaaagcatatattaacttttagggttttatttttattagagttactattatttcctcccacccgatctctctctct

SEQ ID NO: 405092 - DNA, 882 bp, Cannabis indica
taaacaagaccccgaaatatgattacacgagcaagagatacattacaaaactaaagccccgacttccatagccaaaataataccacccgcagtgccaatagaaggaacacaaatgttaaagtaaaagtgtaaagactttagaatacgtaccagaggattaacatccactttgagctcgattagaaaaacaaagtccagagagcgagagtaaaaattatggtaaagttatttttatgccaaataataataaaaaaaatgaatgtaaaagtagataatcaataatataaaaaaaaaaaaatgtaagcaaataggttggacctcgtgaaaagatggatcttttattgattttttaccttgaaatttgaaatttgcatgtgtggaatgccgttcaaaacttttaacttattcaataatcacgtgtctaactctaacaatacttagagcatctttaatagtgtgtcaaaaaaaacattatattattacattttagtacacttaaaaaatactaattaattttgttccttaaattttgacatgtatcaaatcatgtccttgaatttttaaggtcgttaaaaatgctctctgaactattgagattgttggattaaaggacttgtgtctaatttcattcaattttactatttcagtgatagtttatgtactaaaccatgcttttcagactttgatatctaccaaatcatgtccctcgaactttgacatgtactaaattatgtcccttgaactttcatccatgttagacttttttactaaaattagaaaagagtctttaaatccaacaatctcaatagttcaaggggtatttttaacgaccttaaaagttcaggaggcataatttggtacatgtcaaagttcaggaggcga

SEQ ID NO: 405093 - DNA, 532 bp, Cannabis indica
acaaagcaacccggctgtagttggattgcatcataacactatgaagaaattttgaagggtttctttgaactaacttcttttgtgcaaatatcctttttttagggtgattttgtgtaaatatctaaaggtgatcacataagcaagatggatatccacaaaagtgattcataatagaacttaattttgaaagagaaattatgagggaaccatcattgactgtgccaatgcaagagtagctacatatgattgaaaatcgttaaagtcttgtatatgtgtacccactggtttctagaaaataaaatcttaaaaagaaaatactttagacaattttacataatttttatataagaaaagaaaataataaatacaagtcctgttgttgagttcttttgctcatccaaggtggggtttcttttcttgggactttttttctcaaaaaagaaaacatatttaaaataaatatttatgtttttttttttaaaaaaagaataatattttggtaacaaacatgttatcggcataaatttaccct

SEQ ID NO: 405094 - DNA, 701 bp, Cannabis indica
attacaatgagaaaatgataaattgctagagattttatatatcgatagaagataaattacaactcaattgtaaaaataatacaaagactaaaataaaagatttattacataaatattacaacacatttataatatatatatatgtatacactatatatatatattatatataagaaaggtaaaaaagatcaattataatacatgtaatatacaacatatacaatgtaatatgaagaagaagatatatattgttgggaattcaaataaagtcccacattggctagaaatgggaaagatcatgagtatgtaaggatggacatatctctattggtatgagaccttttaagaaggtgacaatatcgtacttggagtagagatgggtggtgtccaatgtgatgtacctcaatgtactttcatgatgttcgtggatgtgctcagttaggcagtgtgctttgattctattcggagttgtgtcgaaagtcttcctgacaatgaaggtcagggcgtgtttcgattgatgatagcgacgatgccaaaatggaagatcgtttgatgggaggattgttgggaatgcaaacaaaatcccttattggctataaatgagaaggatcatgagtatataggaatggacatatctctattgatatgacattttgagaaagtgcctgttgctatatttttaaacgctacgcaagtatacg

SEQ ID NO: 405095 - DNA, 690 bp, Cannabis indica
agaatattaagttttaaaataaaataaaaacaaatgtaatgcatctgaacccttcacttgtccatatttatgagttaacgaaagtggcatctgaacccttcacttgtccatatttatgagttaacgaaagtggtagtaacagtgtaagagaattgaaacattaggtatttttgcctccaaaaataaacaataggtatttaagtgtataaaatctgaaacattattaggtatttatgccgcaatttaccctatatatattcaatatatagaaattttgatagtattattggtgagaatagcaacattatcatatttgatctaattttttaatctataaccaatctaacccaaataaaagttcaatgttagctgaaaatttagtttattagtttcaaaatccaattcagtcattagagatttttaatgaagaaccctaaactatggaaatggtgcttagaaaattaatcaaaataaataaaatatagtggtgttggataccactaatacctataatattaaaggtactttacggtcaaatttcataaatttttgtagtttgacacgatcaatcccccttcttgaattttaggggtaaactcccaaacaattcgattttattttgttctctacttttcgttccactttgatctattaagtgctaagataaactgtcataagtgtacatatgtc

SEQ ID NO: 405096 - DNA, 843 bp, Cannabis indica
ggtatcgtgtttttgtttactcttttgggctccattgtacgcctaataaaattgtgttatatatattaaataataaatatatagaaaaaaaaaataaatttatatatatgacataaaaatttaattgtacaaaatataatacttttctaagaaaaattattattatataaaaagaaatgacataaataaactttaaaattatgttttttacaaaaaaaaaaataaaataacacactaaaataaaaaaaaatgatttgattgcaatttttttaattttttataaagcaatattaaaataattttattgaaacaataaattaataaaccaatttattctatataattcaaaattgttttcttaatgaaaaaaatctattataaacaataaaattcatataaattttacatgcttattagaatagctccaagacttaattatcaacccactgtcaaaactaaaaccaacataagaccattattaaaaactagttacaaattttcgagaagctcctagactcgaccattgacacactatacagaacagagactatccattaaaataaaatattagccgtaataaaagtagaaaatagaatgagaatatttgacaaaattgctatcatcgtcaaaaaagttgtcgctagtactgaaagtcaccgcgtagtttgacatcgaagttggacgctggaattgtcatcgaagttggaccttggaatttaacaaagagaaatcagtaatatttatcagctagtgatacttagaaactagttatgtagattaaccaaattaaaaactaaatcttagaacgagttacgtataataacaaacactactacaatatag

SEQ ID NO: 405097 - DNA, 848 bp, Cannabis indica
ctctctctctcgttcttctctctctctctctctctctctctctctctctctctcattgcaatgtatataatcgagctctttgagctcagtgtagtaatgaatcaattctttcagattcttcatttctttgtttcttctttcttctttttctctgttcttttctttcatcgttttcatcatgtccagaaggaattttaatattctttgaaggagttttgtcccattgaattttctcgaccatattttaatgaaacagttattatagacatctaaggaggaatattataaatattgaaaatttctatagtatacactattgttttgcacgtatagaataaggacgttttttagaccattaatgaagatgactttggaaggtatattttaattattatgtgattgtttacattgtattaaagccaattctttgaactataaaagtcttctctccagtgacaaaggctgattttttctagaaaaaaaattaattggcaggtttttatttggcttatggttcctttgtcattctatcaacttcatggttactctttcttctacacctgatcattgaactcgatcatcgatttacctgaaatcccaacaaacccagaaaccaaaaccatataaaaatgaatatgtattgacataaagataaagaaaccacattaaaaatgaagaactagcacacatacaaggtaaatcccaaggttcaaaggcgcagaaatctattgtggccaagacagggtcgaggacatcattctttccctgatacttttgtgagactgaatctgatccaacaagcgcatttgtaggcaatactattacgctgcatgtaaagcccgcttagt

SEQ ID NO: 405098 - DNA, 797 bp, Cannabis indica
gacttgtgaagtgacgaggagaaaagagagtcaaatgccttagtgcttctgagctcttaagtgtgtgtgaagaatcaatgaaagaatgtccatttttacatagggttaaggtcctttatatagtgttacgattttacaacttatgatttgaaatataaaaaagataacaaactaattctagaaaatagggttgttacttgcggtgaagaattcctattttcatgggtggcttgaactgttccaaatttgtaggagtgttggggacgacttgaagtagtctagaaggcccatgaaaaaaaccccagcccattcaggcggtcagggcttaaagtgtgagttggccctgcccaacgtgtgggtcttcatccttggccgaccaggtaggggtctggccagggtcttgattatttgtattgttctctttcttcattgatgaaattgtttaagattcccatatctttgctagagattctgatatcaagatgaacttgtctcagaaccttgaagttgtagatattgtaagtctccacgctcttctagtttgaatccatcttgcaaccctgagatcttgagggtcagggagctacacgaaactgttgggctttgtgccctaaataaaactttatttcaatgtaatctctattatttaattatcaataaagagacagaagtattttcatcacttatttaatgtggcatttggttcatgttatcatttatatgtttatttgatttataaattcatccaaacccttattacattaatattttgttttattgtgtcgtcagcacagtgg

SEQ ID NO: 405099 - DNA, 749 bp, Cannabis indica
ttacagtaccaaaaacagagttcgtgatattggtttattaccacgagtgttcaaaaagttacaaacgtattttttgtactataactattcaaaaaaattcaaaaatttaccgagatgatggtgtaagcataacgaacaccgtcatgaaaataaatttgaaaaaaaaaatattttgacatgtattttcgggcacaaaaattgactaaaaaattataataggaggttagacggtagtagcactcctcttaaatttgtcgtagcagtgctgtaacctagaggtgttcaacaaaatttacaaaccgcctaacccgaataaaccgcccaaaccaaactgaataaactgacaaaaaatataacctgaaataatacaatgaaaattcaaaccgcccaatgaatatattaggtagtttacaaattattctaaaccgcccaattaacccgaataaaccgaattaaaccgatttatatatttttatagaagtgtatatattatatcacataaattacatttattagttaaactattttgtatttaaagcttagacattttagtgtttaacttaaaacttagattttatagttaataatttttattgtatttggatattgaagtgaaagtttaaaatctctaccatattttattattttttttaattattttatttcaattattttatgtttacttcaattatatttatcttatattaaggttcttaaaattaatttaaactatagtattttttaacttg

SEQ ID NO: 405100 - DNA, 764 bp, Cannabis indica
taccacatatagttttacaataaaaaatattgcaataaatacaatacaatacaatacaatacgacctaatgcgatgtctaaacgagtccttgaagtttatgcatattgattactttgttaattagtattattattttgaaaattagagttttgtgtggttacatccaacttggcaaaacgttatattattggagaaggaaaagtactaaaacttatatttatttaaaagattttgaatatcttggatattcatccacaagaaacgaggtggtgttaagaaagtggagaagatatggaaaaagagttgggccaccaacttactacaacaatagatgtaacttgtggatcaaattacaaactaacaagaagggcaagcttgatggccctgcacaaaaggttgcgaaaaggattgtaagtttcatttaccattcatgttctttaaattctaaataacatttttatgttcttcaaattcttactaataattatttttaatgtagtatgtgttacggaagcatgataaagatgggatggtaatagtggaaggaaaaaaatcaacatcagaaaagaaagagatctagtgataacgatcgcatcggtgagatggagaagtgacttcacgagtcagaggaaatgggtaggtggactgacaaatttttaaaacaactccaccaactagtccaaggccaacaaagcggtgttgttggcacctcatgttgggttttataccctaaataaaactctttacaatctgattagttatc

SEQ ID NO: 405101 - DNA, 743 bp, Cannabis indica
tcgaacagcacatacagaacaataaaacatacatttaataaaatcataaagtgatgaacaaaatcctaaattgatatctgagactgaacatgtacaaaaaaaactaaaaaagaagcttaagaagctgaagtaaattttgaagatgatggagatgagaagaacaagaacttatggtaactataattaaaaaaaaatgtggatcaatctttgaaacaagaagaagaaaattttgaagatgatagagatgagaagatcagtaagtaatgaatttggggtataacatgtattagtacttttttttttttaaaaaaaaaaaaaaaaacttaacctacaaaataataagccagaacaataataaaacaaccgttaaaaaatattaaaactatgaatacaatataaaacaaaaaatacaaaatacataacaacaacaaaaaattaaaataaaatgcgtacaacacatagatcagagattaagggcccagaacatcaacatcaaaaaagaaaaagaaaatcctaaaataactgaaaaacaacataaatactttcaatactttgagtatcttacaatcttcatcatcaaattcgaaattagagtttgaatcttaaatgatcggtttcgaacgttttaattttctcttttttagagaatgaacaactaatttctttttggaagctatagaagatgtagggctatggggttttctttgaaatttttgttacccattgctaatttactaacaaaa

SEQ ID NO: 405102 - DNA, 511 bp, Cannabis indica
cttaagctgtgggcaatctctttataatgccctggcaattcacactaaaagcacccttgcccactacactcacacagatgatgctttttacaattggggcattcttggtaagtgtatcgggtttcagaaccacactgacggttgcctcaaccctggttcccttagaacctcttgttctaacctgagccaccgggtgcagttggtgcttttcttttctgattagtggtcgagccactaccccccctaccataaccagaggtaggagcccaccaatgacctgagtccctcgagactcctgagtgcactccactgcgccctcaactcgtaatgccatccccaccatgtcagcataggtggtattatcgtcagtagtaatcataagatcatgtcttatcttcaaatttaatccatccatgtacttttctttcttactgaaattggttagcaaattcttaaggccaacctagccaatcgatcaactaaattatgtattcagtaacactcatattct

SEQ ID NO: 405103 - DNA, 568 bp, Cannabis indica
atggctggctggttttgggccctgggttagagtgggccttaggcacgggcctagtccgcctaggcccagggccagccctgctcggaccccaacctcaaacaaaacttaaacccgattccagactcgaactcagatttggacccgaacttggaccctaacttcagacctcggaccccaaacctatcctggggcgggtccaagtccatatttaggtctggggttcgattttggattgggatccgtggtccaagtcgggtcagagtctgaggtttggggtttggagtccgtggtttgggtctagggcctgggtctgggtctaggtcttggtctgagtctaggccttggttcggagaacggtaaatttatccctattcaatgcagatcatctatataggatctttgactattgaattaaaacaataggttattcaggttgcatctatttttggtaatagtgcattctatgtaattaagagttcaattccaaatctatagtggagtcaggaggaattaataagttaggaaatttacttggtaaatttcacatctacttattgtaagcttgatt

SEQ ID NO: 405104 - DNA, 524 bp, Cannabis indica
ctacaagcctatcaccttgtatagtatctttcatcccaaaaattttgaatactttattgatatatctcttttgttataattcaagaatatctcaagaacattctcaacaaatcttgaattcctaatacaaaatgagtatatcattaatagcaagcaatctttcaccaatataataccaggatcatattcttactcccactgaacctgtgatatatacacaatcatcaaaagcttatatctcaaaaccaaatgagaatacttaataaaaattgtgttattattgacgagaagcttacttgagtctatacatggattttcctaattatttgtaaactatattctttggatctttggatacaaagttttctggttgcaccacataacttttgtcatcaaaattaccattgataaatgacactttaataatctatttgatataactcaagaccataatgagcagtcagtgtcatgcttttcctgaaataactttcaattaaaccaaagaaagtctatttaaaatgaat

SEQ ID NO: 405105 - DNA, 1212 bp, Cannabis indica
aaatatcatcctataaatacgtgtacttaaacaaaactacaaaatatactatatataatataaactctaaaattaatctaattaatttactacgatttctctctctctctctcttagctataataaaaactcaactcaatgttttctcaccaaaagacaattatttgaggtcttccctcttctctcttttgatatctttgtatgaacttatgatgagaggctccagattagacaccataatcagacttttcttaattgcatacaacacactttgtttagactatttttttcttcatctatgtttgtgttgtcgagcaaaatttgcaacaccaaaagtatgtaataatattaataacaagaagaaattgtttgaagaacaattgcgagtattcaatctaaaatggcgagtactcgagctgggaacgtgtatgcttaacagaaaactggaaataacaagaagacaaaggattatagtggttcagtcagatcacagtctgcttagtccactgtagcaagagtgtcgtcggttccatttcatggtggatcactcttttatacacaaagccagtgtccaattagttacaaagattgtattcattatcaatccgtttgcacattgatttacaataattaaactaaaaacgtaaacattaataaatgaataacactttctattcactaaatacagcaacgtatgcgtcttctaatatgagagttgactgttcatattctagggtaaggttgcgggcttaagatagacctaacatttaattaagtttaggacatctacgttcttatatagtcgcatatatggacatcgtatgatgagctgatagaacttagacacgcgagtctatattggtttatcgaggttgttaggtcattgagtccagctcgcactatagagaatcgatctctatgctttagcatgagtatagaaaggatacccgcacatatcttgatacatgcgagttggatccgttctctggtcccacataatgcgagttacagttatgcgatcagactttggtcatactcgcatcatctcgctgattctagctcaggcgaggtttaaactcgaggagtctctcatggacatctcaactttccttggaaatctgaatacacgtgtcctccaaacaggagtctggtctcgagtttctaggtgagagaaatctcactataacagtttgtatgttattggttagtaaa

SEQ ID NO: 405106 - DNA, 494 bp, Cannabis indica
aatttagcacataatttatattagcttaaaaaatataatacaaatatcattcataaaaataggtatatcttaaaaaatataaaaataaaagtaaaaaattaaaataaataaagtaaagtgggtatgtaaggtaattttctcgtaatatttctatataacgaagtattgttattgcgcataagtagtgtcttacacattctagacatgtcacattacaattagttaatgatattctctaaaaattattacattaaatatacatatatatatatgagactagatacataattgcaacaagagtaatttacggtcaaactccctatacttttatgtttgttacggtttaaccctcttactcaaaaattatggctatattccgtgaactcgacaatcgtttagctctgtagccctaccgtccattttggtctgttaagtgccaaagtggactgccacgatgtacataagcgtacacatggtaaattttcattagtcca

SEQ ID NO: 405107 - DNA, 490 bp, Cannabis indica
gggggatctgccgagaaaactcgacgcaaggcccccttgcatgatttccgcgcgcgtgggaagggtgatcactaccctgattttttccgattttcaaaaattcataactaattcaaataaaatcgaaattgagttctgtaaaaaagtgaattgcttaatttttctaaactatccaataaaaataattccagaaacgaaaattcaattattttttccagaatttcacaagcatcaatcaatcatcaatacaacacaaaaaacaacatgtaccatccaaatcatcctttctgttgcagagtattgtcaagatttgagtccgaatgttcttctcttggatttgatccttcacaatcttccaaactatgattgaggtattgtttgctctgtgtgggcactactatttcgctagggtcattcgaaattgtatctctcttgtgtttgaagaaggagatgggcggctatatatagagaaaagaaaaagctcaacttt

SEQ ID NO: 405108 - DNA, 593 bp, Cannabis indica
agttatttatttttatacagagtttgattgtgtttttctctaagtgtgtatgttttgtaactttaaaacataattttttgagatggattgagatctttgaccacattttttaacaatattttcatcatttttctcgtaaaaagcttaatcgaaaaccaaaatgatagagctcgtctcagcttttacaaaacatattgaatcatctcagtttggagtccggacgtgaaagtttatgcataatttattgaacaaggtcgaagtagtaaaagagcaaggaaaaatgatctgtagtgctatggccaaaagtgtggcgcttttttatgctaaaatgaagtttcggggagtatagcatggtgctatagcgtcgtgtcttcgacgctatacggcgctatagcgccatacatgtatttttgaatttaaatcctaattataaatggattctttctatcttttttggacttatataaaaaaaaatgatgtaatttgacttttgggacgattggagagatagaaacaagcaattttgaaatttgaaaacacattgaagagcaagagagaagagattcgaagcaatcatcatcaactatcatcat

SEQ ID NO: 405109 - DNA, 596 bp, Cannabis indica
ctatttcttttttgtgctgaggcattgtcaaccatgattcggcaagctgaggttagtggtgagttgatgggatttcagtgctcccgatatgggcctcgtgtgtctcatcttttctttgcagatgatagtttaatttttggtagagccaatggaagagaggcggagtctatccgtcggatccttcagtgttatgagcatgcttctggtcaacaagtcaattttgataaatctgctatcacattcagtccaaatgttttacctgcggatcgtacgagtgtattggatgtattaggcttgggttcagtcgccactcatgacaagtatttgggtttgccaacagttattggaaggaataagaagcgcacatttgcaagcatttgtgataaagttcagaaacgggttcgagggtggaaacggagcttcttctctacgggtggtcgagagattttaatcaaggcagttctacaggcagttccaaactatttgatgagtatattccagcttctggtggcaaaatgtgatcaacttcggtcaattattttacagttttggtggggtacgaagaatgataagcggaagattgcttgggtgaaatg

SEQ ID NO: 405110 - DNA, 531 bp, Cannabis indica
caggggagtgtaccaacataaccagaaatactgctgcaataataggactcgttttaggcttttgaagctccataacactataattagatttgtaataagcttcagttttatagatctcaatttttatttttacttttattttttaatagaaaaaggtaaacgctaatagcttctcaaaaaaaaaaatgagaaaaaatttcagaagccgaaccaattagacgaatataactttcaggatttatataatatatataaataaataaatatataggaggctccttttccttgccaattatattgtagaaaagaattttagtttatatataaataatattttatttatatatatacttaaaattctaataatgtaatagatacatgggtatatagctagtctacttcacttcacgattttcctcaatatatataatatatattaaacaaattaagagaagtatgcgattggtagggtagctaataataaggatgcacaacatgatagccacggtttagctactgctgcctttgaga

SEQ ID NO: 405111 - DNA, 566 bp, Cannabis indica
ctctagtaaagtttgtattttatctaaatataagtttggtaccctgtatttttaataaacttatttggtactttgtattttacaatcatatctatttggtaccataaattcaatttttttagataaaatttaatcaatacaataaatagtctaaaattttatgaattctgaattcaaatttatttatttgattacatataattgagaactgtttggttaaattaataaaactgtattgattaaattttattttaggataccaaatatgtacaattaaaaaatatgaggtaccaattaagtattattgaaaacataaggtaccaaatatgtttttcataaaaacacaaggtactaaatgactatattcctaaatttaaatttagtgttaaatcaacataaaaaaaaattactatttcaacattatttttttttttaaattccaatcattatacttaaaattacactaaattttatatgatttattattctattattttattaatataataagaatactttattactaaatatatataattctttttttttcttaaaaaatattattt

SEQ ID NO: 405112 - DNA, 515 bp, Cannabis indica
tctagtaagataacacaaaaactgacaaaaaccatacataataaaataaaataaacatatgaacattttccaattttgaataaaatattaaaaaagtcctaacaatagtcgattttgtataatagtattttaacttcaagaatctcttcatctccatcgataaatatgtcttttttctccatgtttttgagtctaaatagaagcttcgccattgtcgatataagcacttcactatctattcttaccatctatttaatctacatgtaaatataaaactattcataaaattcctaaaacaaaataacaattacaagactattagaatgaaccaaaagagattccaatcattacaatattatgtagattaggaatacaatgatcaaatgtggagaaggaaatctcaagttataggatctaggctcactgagttgggtaaaagagtctaatatatgggggcgacaattaatccttacaaaatactaattactaaagggcctactttaaataatgatgca

SEQ ID NO: 405113 - DNA, 702 bp, Cannabis indica
acttataaacttaaaactttagatactcgtgagtttgggttgtacctctaagctaattaatctcctgtgttcatttcaacagtctatgcttattgcatacaacgtacctttactatagcctttatgcataaataaaaatgttaagagcattgcctttgattttaaatcagcaagtttatgttgggcaaaaaatgttcactcatgttgtgttcaatctttactccttaaaaaacgaaaataacaaaatatggtgtatatttcaataaattcaaaattttgccttttttaaaaaataaaaaaaaaatctcattttaatctctttaaaaatggggtaaaagatgattaatgtgacaatttagcaacctaaagattgctcttaaatgacaattttgaattttgtatttttaaaatggcacaaataatactttagtgattttttttggtataatcaacttgaagctcatttctaataccaaaaatgcaaaaaaataactaacatgtttataatatctccaattgaaattatcattatgttctattttgaagaaaaaattaaaattaaagtattattttatatcatttaaaaaaatatatatggtttgaattattacttaacaatataaaaaaaaatccaataaataatttttataaaatatggtaatatccaaaatagtatttatattttaacctcaataaatatag

SEQ ID NO: 405114 - DNA, 658 bp, Cannabis indica
atatcacctgatacaaacatatatattaattcatgtgatctgtctgtctatacataaattatgtctcttccaccttaaagtagtttttctaaaataaataaataaaaagtgtgataggaaccttctaactacactcctttcttgcatgtgtatacttttacatttagtacaccataaggaaagaatttgagatatttccttaatctaagtaattttccttattgattagggtgggtcattgttcaaggcccctagaggtcttttattttttaaaaacaatatttaaacttgccttttattattattattattattattatttaaatgaaatgagtttgttttggggctccaaaaggcagtgaaacctttgaggttgggaatgaaattttgtattagatcatatgggtcttagggaaaccatatgggcatatgaagctcactttccaaataaaaaataagaaacttacaaaaatattggaatttaagttaatttttataaaaatactgctacctggaaaatttttcaaaaaattgtgtttttataaaacaatagtagaacacaaaatagaacaactaaaaataacagtggaacaactagaaaacaaccgtagaacaacagtgaaaatttaacacagtacacattatttttttaaaaaaa

SEQ ID NO: 405115 - DNA, 610 bp, Cannabis indica
gggaaaaccttacaaaaactctattaggaaactcctagttcacgtcttgactacacttaaagttttgggggttgggttttcgttccttaattcatcataaccaggctttgttggctaaacaagcttggagagtttttaccacacctgattcccttgcttctcaatccttaaagctagatattttcgacattcttcttttttagaagcaagtaaaggtcatttcccctctttctcttggactagtttgctctggggcagggatcttcttaagaatgggctcatttggaaagtggggagtggtcactctatccgtacccttcaggattcttgggctccaaatcttaggatccttaggtataaagataattgtcttcctccttctgataaagttagttttttcatgagttctaatggtacttgggatataaataagttatcaaattactttgataatgacactgtggctaatattctccaagtccctattggaggtcatgataaagctgattgtcttatttggaaaggagatccttctgctcttcttactgtcaaatctgcatatcaccttgtaaatacttcttctttgcctccttcctcttctaatactagt

SEQ ID NO: 405116 - DNA, 563 bp, Cannabis indica
atagctcaaatccaatctaatctgcaaaaggtcaaattggatcgattattttagattagttacttttaatattaaattatttaatatttatagaaaaaaatattttttttacacaaactagtaacaaattatagttattttatgtctccaataacacattaaaacaaataaaataacaaattcaaaggaagaaaaaaattgtatgtataaaaaatatttaattttattttaaattatatgtagaaaaaaaattatatataaaagtaaaatagacatttgatctataaagttttaaaatataattgtattatatgtattagacttttaaattactattttctttacattaaaatattatttgtatttataattttttaatttttttctaaatatgtgtggattagctagattggatatgttacttttacatgtcaattaacatcgcacaagtgcgaattttgaatttttcaatctaatccaatctacacaagtgtagatatctgcactttgcgaattagcttgaattatatcgtgcggattagattggatcgactattttatga

SEQ ID NO: 405117 - DNA, 638 bp, Cannabis indica
tgacagcttagactagtatttactataccgaaacaatggggaattttaatcaaaattgttctttgaatttcctctttaactttttcattaagaaattactataatcatacataattggactagatgaattatgatcattagcttatgatgttctttattttctttcaagaaaattagtgatgctgatgaacatgttccatatattctatcaagaaacggtgattatcctcaattttttaggaattgaatatccttcttacagtgctactaaaatatcgattgaacataagcttaaggttatagttttgaaattgatatcaagctttctacaagctaaacttagggttgtaatagtattttaatgggggtgtttcatgaattcatcaccaacttcttgaatatcatttagtgtcataaaccgattggtaacaaccatttgggtgtgtgatttcaaaatgtgactcctaccacataaaagagagttgtgggttcactttgtgatataacttgtttctatcaagaaagtaccttgctagaaactctataggcttgataatctaaaaagttatttctacctttcttcttctacaagtgtttgtatggtagggaaaaataagcttttggacattggtataata

SEQ ID NO: 405118 - DNA, 637 bp, Cannabis indica
gactacataacaaccataactaaaagtattacatttaacttaaagaaagcgaagcaggcccatatatgttaagtgctccagcctctataattaggaaatagcataaaaacacacacttattactccagaagccttttattctgtttagccaatacaccaactttaatctccaagtaattcatgtgtggctgtacgaaacaaatttaaacaaatatcaaatatgtagttttaactacatatatataatttatatatttttatatataatttttaattaaaaaatttatatatattatataaaataatttatattcagaaatatataataatattttaataatttatataaattttattttgatttattgttatttttattagttttgaataaaaaattaatttttttaaagagttaaccaggtcaacccggccaactgaaatccgccaacctgtgacccgccaacctgccaacccgtgccctattcaggtctgggttcagtttcatttttttgaacccaaaacccgtgaacccgaaatctgcgaacccaaaacccggcaaacccgcccgatgttcagccctactctagtgtaagcaacttactttagtaagatgctggagtatttttctaatggcaat

SEQ ID NO: 405119 - DNA, 811 bp, Cannabis indica
atggcttgtgagaagtcatgggtgatgtctctcactttgtatttggtacatggttgttggaaatataacttggtcaataaattcctcttcctggtgtggtaaccgacctatgccatttcacgatggcactagtctccaatttggagagcactgccattctcttatggaactggttacccaaggcagctcctaggccggaaacgactttcctcacttttttcttactccttgatgtcgtgaaaacccactcggacaattttcatcccttagtttgcgagaagtgacctgtgccattctaccatggaaaaggtctccaaaactggagatcactgccgtttcctatggtacaggtctccaaagctggagagcactgccattgcccggggcacaggtcttcaaggctagagagcactgccattgcctatggcacaggtctccaaggcttgagagcactgccattatttcctatggtacaggtctccaaggctggagagcactgccattgccgtatggcacaggtctccaaggctggagagcactgccattgcctatggcacaggtctccaaggccggagagcactgccatttcctatggcacaggtctccaaggccggagagcactgccattgcctatggcacaggactccaaggccggagagcactgccattgcctatgacacaggactccaagactagagagtactgccatttccaatggcagtggtcacttgctgctcttttcttgtagttttagtgctattttgactttatacataaatccaggttatttttatgcctaaacaagtcaagt

SEQ ID NO: 405120 - DNA, 625 bp, Cannabis indica
tgtccatgaccttttacgagaattattcatcttctcgttcacgaccgccttgtggaggaagcatgggagctttcccctttgacgcatcacgtcttgaaggcggttgagagagtggaccttaaacaaaacagaacataatatatcaaatttgatcaaaattctactaaaatttcggtagcataacggctgtaattgaatgcctccaaaaattttaaacatgcctgtataatgacaaataacacatatttaacagtagtttattcatccatcccaccgcagcacatatatttgcagaacctacttcactatggttgaatattgaagatattcaaactccactaatcaataataattaatttataagtgaagttacctcagatgttacaattaagtgtttaggccaaggatggaacttgtttggtactttcctaacatatttgcacccttcaattgagattgggatttcaggatcctcttgcagcatttctaaaatcaaaacctgggcatatgaatcattgtatagtgtgtagtaaacattgatttcaccctcatgctcgtacagatatgcttgggccacaatgttgtcgatgttgtcagagcaaagatatacttgctgatcaagggc

SEQ ID NO: 405121 - DNA, 1081 bp, Cannabis indica
gtagactgtcttctccatgggctggacttcacgagaaagcccaagggtattatttattgtaaactccctaatagagggaaagggaacacctaatataattctcaaaactactataaataccccacagatcctatagattaggggttgatcgctctcttgcaaactttgttcaggcaaacttgagaatatacatattctttgtattctctaaggcatttacaagtaaaagacttacaaaataatactgactcgtggactaaagctagttaacactccaaccacgtaaaaaaatatttgtctatttttactcattctcttttgattgttgggatttatgccctaaaagcaagtaataaaatagataatatacaagagaatatatgaaatacacttattagataaataatatattaattataagagtataattattaaatatatgaaaatttcttattcatatgaagaaggtataatcttgtaaggatgtataagagaatttagattatacgatatgaataaaataagtcggtagtgtattaaagttatgagaatctttaatatggaattgctaagtacggtttactatacactatacttctagtgtgtgtgattttgattcagattacatatgtagatggacatgtagtaaatgtattgtgtataattagattatgcatgactggagcaatatgtaataaacatatttcattaacttgttgtttaccatgaaaagattttatcatatcataatgatgatcattagtaaatcagcttgaatcctaagtatacatgaactcatatttgtgttcattgagttctttgattcactcgttaaagtttctcagagaagatgattcttacaacttctgttttagagcttaataatatgagtggctgggaacatgttatacaatagtggaattcaaactttcttaacagttctaatattagttctcttataatgttaattttagaagtgctaacacttgaatccaaatctataataagttatagattaactgttcacattgaattaatggtacataaggaattaagagataattagaagagtaaaatggta

SEQ ID NO: 405122 - DNA, 432 bp, Cannabis indica
cttccgtccaaaagactatgttagctgccatggtggatataccacagtgtacacatgataatttttttagtagttcacgtaatattaattattataagataattttaaatatttaaaaattttagaaaataagaaaaaaaatataattataaaaaatattctttctttttttttttcccctttttcttttcttttttatttacaaaattaattttttttcccttttttcgtttttttttctttttttcttttttaactaatgctaaaaaaaattgagcagcacctccccttaatttttctatatcccaaaaattcaaaatcactcaaataatattctgaaatactcaataccacaatacaatgatcacaaacccaatatcaacaatattcttgcacaacacacaattacaccacccaaaaactagaaaaggt

SEQ ID NO: 405123 - DNA, 444 bp, Cannabis indica
  modified_base (303)..(303): a, c, t, g, unknown or other
gacaactcaataagagaattttgagcacttatccattaatcaagataacctttcgtaaacactacaatcccttccactccgataactttcttttgccaaaactcttttatttttaaaaggagatagagggataataaatttctttttttaacaagtgagggattataatttgaggtaataaattattatttttttaattttcattgggtttttttttttttttgagaattttttttcgttggtattaattgttaaaaaaaaaaatccttaaaaaaaaaaaaaattgttataaaaagttggggngggggggggggcaaaatttttagactcttataaaaaattgaactaatgaaacaattttactaaaagcatctctaatagaggtgtaaataagtggtaaaaagctaaaatatagttcatttaacaaaaaatgtgctccaatag

SEQ ID NO: 405124 - DNA, 665 bp, Cannabis indica
attataacatttaatttgagtgtaaaaattaagagtatgtctattattactcattttattatcattgagctacacttcaaatattactagtgctagatccactgcacttgaaacaacataatttcattttcaaggctgaattaaaacataatttcattttcaaggctattccattccatgtagaaccaaaaataaagatgcttagcttcacacactgatgtcgcccaattagttacactgcggccgctgtagtaaacgggctatgtcgtatccacatggaggtaaattaccactaaagattattataaataaaaaatgatataaatatgtgaactaaaaataacaaaaatgatgagatgagaaagttgattagataaagagtttggtaaggtagaattgtagttatgcaaattttattcaaatagcgatattaattcaaaatatagttgcaattctacaccattaattacaattgaaagatatatatcttaaaagcacaaattaattaattttgcataaattgaatctcacatttaacttgatagcatatcatattatatatcataaatcgacaaaatactgctattggcaggatgtagtaaatgacatacaatataataaatataccactgctattggcaggatgtagtaaatgacatacaata

SEQ ID NO: 405125 - DNA, 571 bp, Cannabis indica
tttgatatatgtatgaatgttatgttattaatgttattattgaataatttatattaaatcttagaatattttttattcatacatgatgttgtgccttgtagtcgtacaaagaactaagataacttagctatgaataaacagtcaataacatattaaagtttgagaatctttaatcaacggttgctagtacagttctctaatgcccattctttggtgcaagtaatcttggttcagatgacgtatgtagtgtgacatcaaagtgaaggtgttgtatattatagatattatatatgacaagaaccgatatgaatgaagctatctttattaacaagttgtttatataaatacctaattcatatcatgatgatgatcaatagtagatcgacctaaatcttaaataatcatgaactcttgttcatgctattagtttctttgattcatttgttaaagtttctcagagaagataattctcacaacttctattttgggaatctatattgtggatggctgggaacatgatttataaatatggaaccctgactttcctaaaggatcgaatgctagtttcctt

SEQ ID NO: 405126 - DNA, 508 bp, Cannabis indica
aaaaaaaatgattggcacgacaataagagtgtcgggccttaaaatattctgtgattggcaccactttaggtcgtaccccacttggacgtgcctatatactattattgttgtagtgacattcttgttccaagaacacaaatgacacgttatgatatatatgcttgggtgcacttttaatgggtattacccatgaatgggtcaaattataaaaatttaagtttttatgtttaatttttctatctaattagaaaaatctctcatttttacatcgtatgagctgagattgttctatcggttgaaaaaaaaaattagcaaaaaaagataagtaaaagttaagtttaacttaaataatttaacatgaatattttttgatatagtataaaaaaaatatttttaaatatttttttttaattttaagttagttactactaagacataaaaatacaaatttactcttttattattcgttattacttattaaattacgaaatttagtattgtttaatta

SEQ ID NO: 405127 - DNA, 585 bp, Cannabis indica
ttaacaaataaattcctatttcgtctttttttttttctcaaaataaccaaaatttggtgaagattctcaaataagacataatctattttcaaattctaattgaattattaatatagttagttgagtctacaagatgatattatctcaaacaaaatgatatcaatattattggaatttgaatatatacttataaaaactcaaatttttatatcatactctataaataaattgatatataattataattttacagttctagtagttttaattaaaaaactataatgttcagtattatatttaatttttattattattttaacttatttataattgataaatacatatttaataataataataataaattttaaagttttttaatattttgtgtcatactttttgagcttgttgcctaccgtgttttcaaactaatgaattcatgcttacatgtagtttttgtgtttctcgtttcgtgtcatgcttaagtacataattttcgtgccaatttataatcgtaccgtattatacacaagcccatatgtctagggaaatttgattttctatacttagaaaatcaaaaaattt

SEQ ID NO: 405128 - DNA, 821 bp, Cannabis indica
gggaaaaataaggctaaagtagatatgaatccacctattactgagattacttctggtcttacagttacacaaaatcgaagtaaactttctcttgggagtcagaggggtgttcaaaacaatgggctgtctattaatccatctttttcaacaacaaaggaagtctctccttcactggtttatggaaaaaaataaggttccatcatctcccaatcctttaccatcttccccaaatgagagtgacctgtctgaaattttcatgcctaacatcggaccaccaccgggatacattgctacatatccgcctgaatcaaccaactccaacattatcaacactgcttccaaaatggctagttcaccagttcatgctcctatcatatccgattccaccatttgcatgactactgctgttgcatttggcaaagaaaaccagtcaccaaaccgatcttcaaagaggctgcctgaaagcatgtcaatgagaaaggctttaaagcgttgtaagggtcttcaactcgcctcctcaaattcagatttgtccactggtgctgagatgaaccggatttcttctaattctgctatagatccatccgtttcctttgacaacattgcggaggctgatgcacagccctgcaaccagccatgaaaattcttagctggaatgcgcgtggcctggggaatcctagcgcattcagacaacttcgtttgcttgtcaaggagcaaactcctcatgtattatatattatggaaactaaattagattgtaatgtagttactcgttatcgtcaggcattacgttttcctaatggtttagaagttcctagagt

SEQ ID NO: 405129 - DNA, 837 bp, Cannabis indica
tacccgtgcaaccttagtcacctttgtcacgaatctggtgatgtaggctcggagaggctcccttggtcttctttactttgaccagatctcttaggtgtaatgaaatttggcgagaggaggagaattgtgcatggaactccgaggacaaagccttccatgagttgaactttctgggtgccaacttgaaataccattgtttggcggcttctgaaagggtggcaggaaaaaccctgcaacatacgtctcctcgtactccttgcaggtccatctgcatctcgaaatacttgaggtgggataagggatcttccttcccagtatacatcttccaagttgacatcttaaacttgtggggaattttaggatattaatctcgggggagaaaggggttccacgtgcttggtccaactcgagatcattgttcctctgactggccatgccttggaacatattttttagttcgtccaattgtgcttgcacggctggactaacctattcggcctcttcaccgacctgagtcacataagcatctctttgagcgggatttcaagcgcgggtttcaggatgcacgattggcgcataaagttggtcgtccacccctctcctactattcagattgtttctgagatcatgtgttgtccccaatctatcaaatacaaaaacactgggttgcctcagtgactcgttggtttggccaatttgctaactggcaccattaacttggttggagttattgggtatgacatctccaaatgaactactagacaaggtctgcccgcctaccacttgacccacaggtggaacttgtgaccgggcattggacgactgaccatttatagt

SEQ ID NO: 405130 - DNA, 589 bp, Cannabis indica
atggtcaaaaatcataacctcactcaacataggtattctattttctccaatatacaccccactaagaaataaggttctagacttatccatgtgattaaaatagacatccatcgcattttccgttatcgccgagcaaaaatggtaaaaatagcataattcttatataattcatgtaatacaactagagtataataaattctccgaaattaagaaattataactctaatgcccacttttgataatgggacccaccattaaataaatttacaattaattataaaaatatcaataattagtgctacttgcctttattagtccatattataaatgcggtcattacaattattcccccgttaaaggattttgtcctcgaaatctaacctgaacaactctggatattgagtcctcatgtcagactctaactcccaggtggcttcctccaccttactattcctctagagcactttgaccaaggcgatggtcttgtttcgaagaactttttctttctatcaaggatctgaactggatgttctttgtaggataagtctgattgtagttcaaggtttttgtaactcaagacatgagtcag

SEQ ID NO: 405131 - DNA, 900 bp, Cannabis indica
aaaacgatcaataattgtttgatttatgagttttcaagacttatatataccacatctcattgtattattgtaggagcttcaagcaacaaatgaatgattggaataaaattttcgaacaatattttctaaatgtatcaaacttcacgttccaattgattgtaattcttgaactttgaacacgaatcctgattttattaatgacttgtacaatttcatcttgtgattatgagccttaaggtggcgttaggttgggaggaataaaaatataggaatgaaaataggaacggaataaaatttaaaatacataaaaaaaaattattaaattttttctcaccatgcattggaatggtttttccttctatttaaaaatggaattattattttaccaaaatagtgaaaaggtcattccattaaaaaagatattccaacactttaagatggcgtttagttgggaggaataaaaacaaaaaggaaaaaggaaagaaaataaaaaataggaatgaaatagaataaaatttaaaaagcataaaaaattattaaatttttttaatcatgcattaaaatgatctttcctttcatttcaaaataaaattgtcattctactaaatagtgaaaagatcattccaacattttaatagacaaccaaataaaaaaatagaatgaagattgtttctttacctttttatttcatttcctccaaccaaatgccacctaatttgcattaaacaaaagaatggaatgaagattgttttctttccttttcattccattacttccaaccaaacgccacctaaattcccaaagactccaccttatttaaagaagcttaacttataaatttattagtttggacacgatgcagtataagatatataagtaccgtttggtaacacttttgtt

SEQ ID NO: 405132 - DNA, 735 bp, Cannabis indica
aagaacgttgtgacacctagatggctggacactcaaagacaagtgatccctttttagtgatctttacaaaacttcataaaaactaccccttaacaaaatgaaaaaggagatggatcgaaaagagtaaagaagagagagagaattcaccaagaacattctctgtataagaactctcattaataataaagactcgtggactacagctcattaatgtccgcaccacgttaaaaccacctgcattaattattccaaagctctgttcattatatcatttaattggttgccgaaaacctcgatcaacaacagtttactaaaatggtaacttactagatgacaattcattattttcaaaaataaatttgaaacttactcaaatgtattaatctaagcaaaataattgagcatacatgtaagttttagaggtaaccaaaatgtatctcaaattatataatataaaagtaatatttttttttttatataaaagaactacttattgatttattatcaacatcataagtaaccaaaaagttacttttaagacgcagaaaaaaaattaaattttgagattagttttattcaagcatattattttagaattgaggtattttttaatgacgtggcaaaatattattataattaagatttattaagttatttttgtaattattttacattttacttatattttaaaaaaatccctattttatataaagaaattttaattttaattttttt

SEQ ID NO: 405133 - DNA, 1062 bp, Cannabis indica
atatataataatatataaattctatacaatttgtattgaccactcagtataagctcatactacgaaaaaaccagttatctagattaattaataatgttgcatcaaaaaaaaaaaaataatgaaatttaaaaagatataacaatatatataagtctaaattatagggtgttttataggaattttttagtttaagttttttcatgattatatatcataaaaatttagaatttttatttgatgggaacttatttattatttaaatatatttatatttatattataattatttctattagatttatttaattttatagaagtttttctactattttattctatataaatataacatttttattagtggggcttatagccctaacattaatactagcgggtccgtccttgatcatatatattatagttattttagaataattttttagaaaatttttatattttacagtacgaaaaataaaatttttatattttgttgtatgtgcaattattttttcttatacgcatgataaataattgtttaaatcttatttttaaaatttaaaattttctaaaaattcactaataatcttaaataattacaacacacgcgtttataaaaaaaaattagagtaaacatatttttttgattgctgaaagaaataagaaatttaaccaaacaactttataaggatctattatataaatttcctatatgatattattaataattaatagtgatagtaaccaaagtttaaatattcaataataatatatatatatataatagcaaattattttattattatctaaaagagccaatatacatataacaaatgtcaataaaacttatacaaccaaatattaattaattgtatatagtgaatctatatacttagttttatttatataaaagtataaatatttattcatatatcaaagttgtgatataatgcacatagaggagttgtcattttcaagactcgagctttgtgctacctacattttcagttaggcccgaccccaatatataaatatatatatatacatttttttatatatatatat

SEQ ID NO: 405134 - DNA, 851 bp, Cannabis indica
caaaatatagagcatcttaatgatattaatcgatttaaacattcaaaatatacctatgtatgacaaaaattatagatgtagagaattagaaaaaattgcatccatttgactaaattcccttttatatttgaaattatgaaattccaccctctataatgaaatatctatgtaaactttccctcaagctaaacctttctcgaaattaaaatacaaaaagaaagcaaattcttcttatcaaaccttaaacttaattttgtttaagtaattatttatgtttttctttttttccgccatttcttgaagtaagtttttttcttatcaaagagaaagaaaagtgcattacaattattttctttttaatgcaaaatattttacaagaaaataatagtttttacttctcttattgtgcagtcaaaaagttattacaagtagatcatattagtattgttatttgttactaatttgcaccatattataatgtactgatgtaattcctaattgtttcagtatctataagaattttttagcctattttttttcataatcgtatatgttttagttatgtaagacatcctgcaaaattttgagaaatttagaataatttataatatagaaatcaatattcaaaccatctattttacacgcgtataaaataaaagtcacgcgtacaatagactctttgaacactgttttcgacgtgttaaatttttttcgaatttctcaaaattttattagatgtcttaaataagtataatgtatactatcataaaaaaaaaaattggacaaattagttttttagataccgaaatagataagggtgcatcgatatacccattttaagggggtgtatt

SEQ ID NO: 405135 - DNA, 1277 bp, Cannabis indica
aaatattttttttagacatatatatatattgattaaaatataatattcaaataatctaatttatcaatttcaatttttagaatagagaactgagacgtagcaatctaaaaatattctaatacatatagttatataacttaattatcactaaataaaaaataattgcacacaaagcaccatttgtttccttaaattttattaaaagtattatatctatggaaatgtgtgtgtttgtgtttgtgtgggtaattttttttatatatattatataaataataatgttctgtatatctcttggtaatcctttgtctatgatttctcttttttactctatgttgagtaaaatccacttataaccagtcccctttacatacaaatatatatccacatcagcaacatacaacaaaaataagcaatttgactcaatccgaagtggcttcgcctttagtggatcaaaaaatagaagttagttacaattgttattgtactaactcccagatctttgatcaccgactctacactatataaaagcaggaataaaaagaaaacaaacatagatttacacagaacacaaatagaggaagaaataaaccctagttgaggcttctactccaagatccagagatgagaaaccaattctcatggtgaggagttcgaagaaggaagacatgcacaaggaaacagagaaaagagttagatcgagaacaaatcaagagaaagaacaaagcataaagtgtaaaagagagaaatcgagcttacctgatcaatttctgtgacaggaagctccaaaaccttgtaatcaaccattgatgatagtggatatcaagctcatctctgagacgagcttgacagagacgtagcccagtttttgggtgaactctgaaacaaatttctggtgttttctctccttatttttctttttcactcatttaatctaacttgtgtttgtgtgtgggtgtggatctgagttttttggcctagaatcgagcaagttcttgaagaaaacttgctctgctagggtttcgagtttgggaggctgagtgttgtgtttgtgtggctagggtttctagactcttcgatcagagtctttaaaccaaaagttcaaatacgatactaagtttggtgtcgtggagtttgaacggtgccgttttagtctaagggttaatttagacaagtaaaagtcgtttttgaccttgataccgatattatatagttttgttggtgtagggtaaaagggtcaaaatcctacactctacatatagttggggttggaatat

SEQ ID NO: 405136 - DNA, 754 bp, Cannabis indica
gtaaaaaaaaaaagtaaaaaaaattatttttttttagatttttttatttttaatttttaaaaaaaaaaaattatgtgtacataattgagccacgtgtacgctatgtacacgtggacaatctaacatagcaattaacacctaaaatggataaaaattatacattgctaacgattttgtagttttgagagttttaccgccaaaatttaaattttgggagttaagtgcaagcaaagtgaatgtatgaggagttatttttttttttaagtcacattacagttttaaacctttttttataattatatttttttaattggttctttttaattatattattacattaataaaaattaatttttttatttttaaaatggtataaatttttaattcaattgcaacattcaataattagaagaacaaatttctaatcgtcttaaaaaaatcatactaaataaatattttgatcattatttttaaatattaatatttaattatattactttattactacaataatatttaattataatttaaataatcatatatctaaatgtaatgtttaaagggcgattagttttattttatttttaaagcgttagataattttttttaacatttggcttattaggcaaattcattaaagaaaattaattagtagtatgacttttgtttgatcttattatctgtgatgagtagctatattataagggtttttacaaaaaatattgaattttggataaaagtttacaattttact

SEQ ID NO: 405137 - DNA, 655 bp, Cannabis indica
tctaataatggaaggattggaattctccttgttcaattattgtaaattacataaataccctcaataaatattattaaaataattataaggataaaatagtaattttataatttaataattatctatccttcaatctctctatccttcctaccaaacaatataaaaggattattactctcctctccctcctttatattctccatccttcatcaactccccatccatccaactctccctccttcctaccaaacatagtctaaggaggcatttggttggaggtaatgaaatggaatggactgaaaatgaaataattttcattctattcttttatttggttgcatattaaagtattggaatgccattccaatagaatgatctttccaccattttagtagaatgactattcaattttaaaatggaaggaaagactatttcaaaacattgatgagaaaaaatttaataattattatgaaatattagtattatgtaatattataatttagagaaagaaaatagagaagagatgagaattttcttagtgttttattccaataggtgatctcctatttatacacatacaagagtcaaatattaagaaactaagaaaaagagaatattgattacattaatggtaataaataaaagatttggacat

SEQ ID NO: 405138 - DNA, 538 bp, Cannabis indica
gttcgtgtctaggttcctgtccttgtatgggtcctgtgcaggtttcgggtacggggttgggtccgactttagatttcgggtctacgttaggtcctggttatggttcgagttccagatttagatctggctcagggttctagggcctaggtccctggtctaggtcccccatccaagtcgggttcttaggtcctagtctgggcctaggttcgggtttggctattgagtcttaattttagtccagatcccagtctgggttcccgtccaggtctcggtcctagtcttggttcgggttccggtttgggtccttgtcagggtctggatcctggtctgggtcgcgggtctaaggtctcaatgcgggtttaggaccatgtcaggtcaaggtcacggttcgggtgcgggtctaggttcgtgtgccaagtctcaagtcccaatcgcagtcaaggtctcggccaaggttctggtatgagtatgggttatggttgttgggaatttattttaccaggatcttagatctactcacaagtatgttgtttaaaca

SEQ ID NO: 405139 - DNA, 586 bp, Cannabis indica
aaatatattatgtatgcatgtattatattgcataacatgactgtcaaggatgaagagagacatatgggttatttgattttaattacgatgaaggctacactaatactctaacagttgaagtatgtcatggaactttttctgacttcccaactatgcttcaaagaaatgccaaaattcgtgacttgaggcagacttggtgaaacacatatggtctaaatttggaaataattttaattagtattttttttttaattatgttggattggttaattattattaatgttattttgtgagctaatttaaatttagagtaatttaaatttcatgtaatatttatttttattaatatatgaattttaatatattattgtgataaattttattattaaaatgaatgatatattaaattatattgtttgggagtggaatcatgatagcaatttttaggagcattgctattggacaccagtggtgcctagcaccttctagatgtgtcgacttgcaattggctagcgatactctataaaaattattatattaaactatatgagacccgatacttaattgcaccaatagcgatattgac

SEQ ID NO: 405140 - DNA, 893 bp, Cannabis indica
gagcagtattcaaacaagataagaatactcaccagtagttatgcaagtactcacttagaattcctaacactcaaattttaggctacgaaatagacaaaagctagaacaataacataaaaaagataagagaattatagtgattcagtgagaactcggtttgcttagtccacttttgtaatagttttcagcttagcttattagagttggtatatagaaagtaggtgtccgttaggattaatataaacattcaaagaataaatacaagaacagtttcgtctgttcttatcttagttgcagcaacacgtgtgacttactaagtcgcagtttgttcattcatattcactacaacattttgactaaataccagcggagccaaaccgccggtattaatggggttattaacgacggaaaaagtattctgtcggtattacttttgaataattaaaaaataaataaatatttattaaattatagtattcccggcagaattttagtattggcggcagaaaatccgcatctaatagtttgggcaggattttgaccgcccaaattttaaaatgactaataccggcagattaatactgacgggttccgccagtattagtaaataaattctgaccgttttattaataccggcagaacccctattaataccggcgggtcctgccggtaataaatttctatataatcccccctaactcagaaaatatttttcattttccccactaaaatttcaccccacctcaccccggcccccctcctcctcctccgccatagtccgactgtcatcctcctccgccatagtccgactgttgtcctcctccgccatagtccgcccgttttccaccgtgaagcgtcattgcaccatcatttttttgacaggtaatgtgttt

SEQ ID NO: 405141 - DNA, 589 bp, Cannabis indica
aaaaaaaaatagaataatttaaaaaatattaatatctagaccttaaatttaaaaaataagataaataattaaattttaaaaataagataattaattaagcaaaaagaaagatttttacctatttcaaatttaaattacactaatatcttaaattaattttaaaaaatagtaattaatttaattatgataattagatttgaaatatgaaaagtaaaaattaaaagacgaaactacacaaaaaaatcgtaaattaattccatgaaaaagcatgaaaaaaatgaagaaattcgaaaaaaaaaatgtgagttgtatggatggtatgcacaacataccatccgcgcgcgctcattggttgcacatccgagtttccttggcacagaaagtggcacgcacgatgtccgtgcgcggacgagggacattaggacagcctatgtgtgtttccttggacaaggactgtccgaacacgcttctgaccgagtgaggctgtgtcaccacccctatcttttttcaaacaatctcaagaggctattcgtatacgtacattttgggaacacggtagtgcaattgagtgggagtgctaacataaaca

SEQ ID NO: 405142 - DNA, 397 bp, Cannabis indica
acttttaaaaaaatgaaaaattaagtaaaaaaataatttaaaatgtaataacaactataaaattaatgattgttaactattttcgcccctcgttgaaatcatcttcatcaatctaaagattgtaaaaaaaaattatcaaagtaaagtaccaattaattgaaattgttgcttctttattacaaataagcataataataggaaaatagcagggaaattattaaaaaccaaagagaaatctaactgtagctggttgattagagaaatgggtttgtaacagcgatgtaggagattgtatcgaagtgagaaattcacatgatgttgggttgagacaaaatgaaatcctaatttttattttttttttataaaggaggaagatgggtcaagcggttgttgcaaa

SEQ ID NO: 405143 - DNA, 561 bp, Cannabis indica
tgatacgatataaatgcatatttaaaaagtcaaactgaaaagtgaaaccaataataataataataaatagtacaccatcaataataataaatatataggacaaataaatcgtaccacaatttttttttctttcttttatttaatctttatcttcaatcctaaatttcaatgaaaaaaaatgttttgcttagaagcttaactttacattctagtaacttagtacttaaagcatggaacatgtattgttgttatcaataacataggttttcttttatggataaaatataataaacaataattagtatttttactttttgagcttttggtattatctgattttgctccttaaaatattcagcttgttaaaaaaaatttctaaaatataacagttacataattatgccatttcggttagattttatattttgttttttaacgttaaaaattaatatttttatcccctgaactttgaccaatacacaattttgtcctcttttattaaaaaaattaattttaaaaattataacattctattttttaaagcaattataatattctatt

SEQ ID NO: 405144 - DNA, 509 bp, Cannabis indica
gaacgtagttcatacaatctttagtatcttcaataattttgtgaagaatacattgtgaggtaaaataactcattttgagattttatgagataaataacctctgtgtgactttagaatgatattgcatcatttgaattgattttagtgagctcatttagaattgtacaccattaattatggttagaattttatccttttttatgacaaattgagtcttgaaatctctttattattttttaaataaagagattatttgactaattattgtaattaattattccattattttataagaaataatcaattattctataccatataatatctccaagaaaattatttggaatttaaactaaaattatattatctgcattcaacaagctttcggagattatggcaaagagcatgttgacatactcttctcgcaacacattttttaaacaaagtaagccagctcttttattcttttatattaaacacatactattgcttgtgtttggtttctcaaa

SEQ ID NO: 405145 - DNA, 650 bp, Cannabis indica
gaagaatcgatatatgcttgatgtagaatatatatattgacaatagtaaacttattttaatttatgatagtatattaattaaacttaatatagtaggaactcttatactaactttttaaaaaaaaaattataatttttgtatacaataaaatataacaattgcaaaatataattgttatcccaaattttgggatgatgacgtgcgaaccaaattgtaactgttattcgcgtttttggtattggacacgtggactccaagtcagcactgcaaacctatcagtgggaccctcaacaaaggagaagtgggccaatcccacctcgatatgtccttccatgaacatatcttggtttcgcactcgtaaagccttccgccttcagtaatttgtacctgaaagacatgtctgataccacgagaccggagagataaaactgtgtgttcccagaaggcccttccgatttccctttatattccaacacataaagaaagaaactacaattgctagatcaaaacagagtatcgtatcaagattaaagggaaaacttcctataacaaatattagcaactaggagtaaccaaagttgtgataactaggagtaaccaagcttgtggtacttggtttgatccaaatgggacaattcttatagatttt

SEQ ID NO: 405146 - DNA, 626 bp, Cannabis indica
aaagacttttggttaatcaatttcggcctttcatggttcagatataggtatgtatggctttctaaatcgaagaaaaaataacttggactacaattcctctaaagaggcacattccgtgtctttaaactattaggcctagtgtcacgggctcaccttttcaggcagcggaacacccgtgcggcaccttgacttctctaagccaaggtcagccttccaaccatccgagtaacaatgggctcatttttcgcgcgaccgtgtgcctcgtgcacacttccgtctttcgaacaactcccgccgagtcatgctcgcaagcatccatgagtgcattcatgcatcgaggctctctagccaggatactcgcactgtccataggttcccaacatggtaagacaaatcccaacactgacgctcaccttgtcactcgtgaccaaggtagcatgtgtggcaagatgccaacaccaagccaacgtgccaacgcctctatcatgccccattcgatactgtccgaatagtctctctctcgtcgcccaaggactcccatacgtccatggaccaatcctcaaggcgccatgcctccacgcatgttggcaggccctcaagcaagccaccaaactagttgcatacat

SEQ ID NO: 405147 - DNA, 557 bp, Cannabis indica
ctggtaaaatataatccaacattgtatagccccttggccggccatgaaagcctcccttggccggccaggcctcaaacaaggcctccatggctggccaggatctacatggatcagaatacatgtttatttaagaactcaaacatgttcttcgtgactcaaagagccagaataataatgacagtcaaattttagatctttttcgtctagtatcgacacattatgtatcctaaggctatcatgaggatcaaaatatcgaaaggataataatctaacgtaagagtgaaagcatgttcaaagaaaagaatagtgttcatgcatccatgcaaaatctgttgggattttatgccctaaataaaacccatttcaatctaatctgatttgttatcaataaaagattagaagtcatttatgttttcatgtagttttcatgtttgtggtttaatatatacaaaatctgtaagtccagaacatatagtcatttacaattacagtgatgttaacacagtggaatgtgattgtaattatattctttaaaagacaaagtccctgtttcatca

SEQ ID NO: 405148 - DNA, 594 bp, Cannabis indica
aaaaagttttaactgctaaaaactctaaaatttactgaaattatatataatataactctagctgctaatgctatgatctagggcactataacccaaattaagaagttgatcattagacctaacattttagtgctttgtcttgggaacagcagacacatgagaatgacatccatcattttgtttcaacacccacaaataattgatctaactaattaagcttaaataagtattaatattagttttaattaatttatcatttacaccaacaataatttatttttttctattacaaattaatacatatatatgtactgcgaaaattttgatttttagtcacaacaaaatttgtaactaaaaataaaataattgtgactaattataaatcatcattcctatgttgtgactaacactacaagaaatatcacttttgccagcacatttttgtgctggtaaaagttgatattgcgctaataaaataaaatttacttgtgatgtgttggcaaaaggggttggcaaatcaatattgacattagaacttttgccagcataaaatgaaaagcgttggcaaaaatgactttttccagcgcgtaaatg

SEQ ID NO: 405149 - DNA, 451 bp, Cannabis indica
tttttcagatttttaattgagttttcttgctgaattttatatggtggtaaaagcatgaaaaagtggttttgatcttgtgaatgcatgtttgtgttcttgagttaatttgagcatgttattgtattaatctttgtgtgtatgatgcttagatttttaattaagctttagctgggattttggaggtgatttttagcttgagccaatgtgatatgagatgttttcatggctggatattatttgagttgttagagatgaagctcttgttcaagagcttgaagtgccatgtttatgcatgattttgagatgattttacaatctgaaattatgaagtttattatgggattttgatgcatgtgatatgtgtttttgatcctttgatatatgctagcagctctatttcatgattttgagttatatgcatgtttgggttgaattgggagtaagtttggca

SEQ ID NO: 405150 - DNA, 582 bp, Cannabis indica
ttttttttttttgaaaaaagatattgacctaagtgggatctcacaaagtaaatataatatatagttttttttatcagttattacaaacataccctaagagcaatgctcaaccaattaaagtacatacaatttttacacaatgtctagttaatctcaattgcacaattaaaagggagatacaatcccacttaaatttataaattactgtgtcatgctagaaaaaaaatagctgtctatgtctaataaatgtgtgtattgaatgtgtatttagaggtgtgaataaatcgatctaatccaatgacaaccgactatcaaatattggatattcaattgtgatcagatcagattatattttatttttgaatatctaattagatcggattggatattggatgttggatggggtgtccaaaaatctaatacatacaacagtaaatcaaactaattagtattttcatttagtttagaagagtaattagattttatgttgttatacataaagtatatatgtatatattaaaattaacattaaaattttactttttttattcaatggtccaatccaatccaatacatacttga

SEQ ID NO: 405151 - DNA, 1126 bp, Cannabis indica
caccgagacccaatggaagagtaattatgatctctggaggacccaatatcggagggactattcgaaaggaattaaaacgttacgacggggtcgtaaaatacagtgaggtttgggaagttactcagctcccagctcagaggccccgactcttggattaacccattacgttcacagaaaaggacgctaagacggtgcgttttcctcaccatgaccctctgatcatagaaactcccatcgccaacaagattgtggccagaatcctaatcgacaacgggagttctgtgaatttattatttaaggaagccttcatggtaataggcctcacggacgtgatctctcgccgagtggttcccaactcacgggattcaatgggacaacacttatcccaatgggaaaagtgaggttgccagtcaccttgtgcccagacacaccccaaagtacttttaaatattgtatgtttgtagtggttgacttcccaacagcttacaatgcaatcctcggtcgaccagccctggtggatttcggtgtagttacatcaatcaggcacttgtgtctaaagttccctactcaggaggctgggatagggaccgtgaggagcaatcaaggagaggctaggcagtgttataatgttgctgcccacctacccattttgatggtccgcgaagttattgatctaggaatggcgaaagaagactagttggatccccgtgtgggatccgaaaaaatcgtagaacctatggaggacatcgaggaagtatcggtatgtgaccgtgaccccaccaaggtcctctggctaggaaaaagtctagagtcggaggaaaaggaaaaaataattaaaacgctgagggcagccacggatgttttcgcgtggtgccaaggggacatgaccggcataagtccccacgtcataaccaatgtccttaatgttaaccctgacatgccaccagtgtagcataagcgactattggaaattattttaccaggatcttagatctactcacaagtatgttgattaacaccctaaatatgaacttcaaaaacaattattattaaacacatataaagtatgagaaaccttacattgggtgcaacagaataaaatgtctcctttcgttcagatctctaa

SEQ ID NO: 405152 - DNA, 530 bp, Cannabis indica
tgaattaattttgattgagttctcctatagagatgaaataaagccatggctttgtccattgctcccagttacgtgctattaaatatttttgaatatttcaatttgaatgattttcgatacggatacaccaatatacttttcttgtattttatttgttttggatacctgtatgattgaggagaagattccaaagtagcaggttttagagcaattgtcggtaggagattcgtcggtgctacctcacctatttaaatatttgtttcaaaccatgtaattttattgctcattagtctttcagttgttcatacaattaatgtgctttttaatttattatcatgtctgtaccgactacctttttgatcgctcttgaaattacacatataataagcatgttacttcagtgactttttcggcaccgacgactactccgacgacttttccaatgccggcagtaaactttagtgacttttccggcacgagtgacaacttcggcgatcattatagttttatttattttattaaaaaaaaaa

SEQ ID NO: 405153 - DNA, 1119 bp, Cannabis indica
cacacaattacatatggtattatatgtacgaacattttttaatggagatgtaaatgggtgatttattgctaaaatatagtttatttggtaaaaagtttgttctaattatatgccaaaaattgattcaaatttatccatagtaaaaattaatttaaatttattacatagtaaaaattaatataaatttaaataaaatttgaatcacaataaatatattatttttataattacttttatgctatttttaatattttattattaaatttatctattgcattaaattataaataatttatatttattttttattgttttaaataataataaaatttataataaagttattattttttatatatatttattgcatcaagtttttgtaattgtatattggaatacaatactaaaaattaatataaatatatcacaaaattattttttgtgttatatataacacaatttttaaaaggaataattacacaagtcactatttttcgtaaaaaaattacatttttatgtttaaagattttttttttagttttacggttttctttagaaatgacataaaaacaacaaaaaaactacataaaagtaacatgtaaataacatttaaataacatcaaaataataacaaaaaataacatacatataacaaaaaatcaacaacaaattaacaagataacaatataaaaataccgtagtttctgtaaataaaatcaaaaaaaccgtaaaaatatttaaaattccgtgaaatcgtatttttgtaattttttttgttatttttgtatatttgtgaaattatcccttcttaaaatgggtgatggtcttgcattattttggtcagaagaatcaaactatcccctacttgcatcgcccaagaataatacctaatatatatgtaaaattgttaatagaaaagggaccctttttaagtttttttttttttttaattttattttggaagtaagggaccattttaaaattagattttagattatgattcataaaatggggggtttgtacaaattccagaactgtgagaactggtggtgagggcgattatgttactgatgtagactattgtcgtgttttaggtttttggtcccaccatgtatggac

SEQ ID NO: 405154 - DNA, 941 bp, Cannabis indica
tttttattatactaatataaaaatattaaaaaaaagttataacataattataaataggattatttttctttttctttatatctttgtgagtttcttatttttttcaaatttaattttctttttttttaaaaaaaaaaaaaactcttacaaattatagtaaatattaccaatgacttccttagttgtatttcgttatgttttatataattttctaacaatgtaaaattgattttgtacaatttaaaagttcttgtgaaatatatatatataattttgactaattttagctaattaaataaatatttgtaagacaactataaattttttattataaactatattaacaaattgttttttaaaaaatgaatgcaactgaaggtgcacattacagtgctataaaatcttttgataaattttgaataatttttatattaaaaatataattaatctttatatattcatactattaaagaaacaaactatcactaattaaaatattaataaaatttttagttttaggtgcaccacgaaattctcctatatatataattagggtctatgtaggtacaccacataattctccaatatatataaatatatatatataattaggttttatgtcatttaaaaaaaaaagttttatgtagatatatacatggtgatatacatatatatgatccaaaaatgagtgtattcctatctttattatattttatataggtataattttatttttataaattgtggtttatattgtataatcatttaaaatattatgtaattaattttttttttataaaaaaatagagtaatttatattattaaaaataagatttaaataacatgttttacagttttacaggagtattaaaaacaataaatacaaccgtaacatatcatatctttggcgctaaattaatttagaattaatatatatagaa

SEQ ID NO: 405155 - DNA, 776 bp, Cannabis indica
aatatatattagttggccagagttgtatgcatatgcatgcatgtcttatatattataaccacccagcaccttaaatttaagggtcactattattgtgattagtgtgtgtgtgttttgttattgtttgtttttagtaactaataattttgtgtgtagtgtactctaaaaaattcagtacgtactcaatcttgtgtatgattttttcatattatttccaattttgctgtgaatatatatataactatgttatatacttttattatttttgaactttcgaatatttttccaattttcacctttttatgaaataactattctatttccaaaggaaaaaatagatactccactcaaatgcttaaaaaatttaatcttgttatgaaatattatttatgatatctaaattactaaattaattatcactattaatatttggttgtatttttttttattacattaatttaatttttcattattttagtcatatttttatataaataagaattcaccgcattagaataaataattaagaaattttcatttcgtttctctttctctattcaacttcgtcttcttttcttttaatttattttatattattttataatacgttataaacacgagtttctacccaagtctcaaagtaaatatttgttaaagttcttaaatatgttttaaggttcactatacactaattatatatttatatatatacttatttgtactgaaattaattttaatttttttttacttttttattttattatatctatatatta

SEQ ID NO: 405156 - DNA, 542 bp, Cannabis indica
taaaaactcaagattggatcctctaatggtaattttccttcttactcgtggttcctctgctccccattacagaaaattcaaatcccatctcccttaacctagcttcccccttcattatgcatgaaaaaaaaaaaggaaactacaaaaaaatagccgagcactgtgactctctagggaaagttgcaattcttggctttcttatagagagagtgtttcgccaattggccaagggccgcgactctttaggtgttgaagtttgactcaaattatttatttatatttgttaaattgcaattatttttaattattaattgtggaaaaagaaagtcttagtggctaagttttgatgagtcttcttaaggaagtcttggaatgttttggtccacaagttgtcttgatgaccaagttttgtaactttataaatatgtgttttgtgtgtgtgtgagaagtatgtgtgtgaagaagcaaaaggtgtattgagatttaggtggatagattgagatagagagcatatgtaattttgaagtgataagtgaaatata

SEQ ID NO: 405157 - DNA, 1182 bp, Cannabis indica
tccacctgttgcaaagtaggagatgcagacgagaatattgtaccaaaataacactcaatctcacatacaatatcctcttcagtactcaacttgcgcccatccttagtcataatctccacaattgcgttctttcttctacccatagccttattgtggaaatacttagtattatatccccaagagctagccaatccgcacgagatctcaatttccaataacactcctcgcgagataaaaggtcattcagtttaaactcaagacgcttcacctcctccatacggaccaaaggtgccgaaacactaagaaggtcatccagctgtttctgagtttctctaacctgcctaggaatcgacccatacttgctcttattccacgcccctaattgatcagcacacgagccaaaaatatcaataagagtatcttgattatctaaaggataatccattgacagccatgtcctattaattatttcttgacattcaggatccttcaaccaatgagtttcaaatcgaaaacaccttttttttatcatacctccgcctcctagtaacattctcaagagttgccacaataggtctatgatccgagttaaggaagtttccatttataaccttaacaaatggaaacaattcatgccatctttggttgcaaaaataacgatcaaaacgttcctgcacatgcgtaccccctgccttttattcaaccatgtaaaacagtgcccttcgaaccccaaatccgccaaagagcacctatccagagcatgttggaattcagtcatagccgacatactacgatcggaaccaccctttttctcatttatcgaaagaatctcattaaaatcaccaccacaaatccatggaagatcaaataaatccttaagcctacataacaatctccaagagtcagaacgacaactcgccttttgggttaccataaaacccagtgaactgccataattccctaccaggacacttaaccaaagcatcaatatgaccagtagtgaacgacttgacactcacctccaaatcatcattccataataataacagaccaccactcttcccaatgcaatcaacatgaaaactatttgcaaaattaatttgtcgcctaattccttccgcccaaccacccataaagtttagtttccgacaaaaaaacgaaacttggggagaacttacgaac

SEQ ID NO: 405158 - DNA, 642 bp, Cannabis indica
aaaaatattgagagttatcatcctcaaactgaagccaagttattttactcaacttttgaataaagcttaagtagttttgctgggctatcacaaactcagcatgcttttccgattcatcttcctacaattgagtatttgaagggtcattagctagcttgtcttgagctaaattgaactcctccttagctgtgtgatagatgttaataatattccccatttcagttctagagaacttttttagagcatgtttcagcctaagaagtttgctaataatacctgtcagattattcttgctaatatcaagttattttgattttctttgttcaaaaattttgaaaatattatttaatcaaatagaaataaaagattgattgataattgatgaatcagtctttgaataccatacttagttctatcaatttcacaagtcataaatctcatttggtgaaattatagtggtagaccgttttcgaaactaatttattcactgaaagtcctaatttctaccagttcatattaatgattcttagcagattaattctatgttatgaattagaaattaaaaacaatgaacacagaatttacaagcttcctctgcattggaaacgcattccaaccgagtagtgcttgggttcccttgaa

SEQ ID NO: 405159 - DNA, 576 bp, Cannabis indica
gccgtgaggttttgctcaaaacgattgcttaagctttgccacaccttgagagcttaatgccaaagtattggtgggggtcctctactaagagaacaaaaggtgtaagctggtttagttggcgacgtctttgcagaagcaagaattcaggtgggcttggctttcgtaatttgcgtgattataatctttccttgttaggaaagcaggggtggcgtcttcttctgtatgaagactctctcgtgggacgcatttacaaggcccgttactacccaaatggaaatttccttacagcagagataggtgataacccaagctttatttggcggagtgtgtttgagtcccaacagttggtccgtgatggtgctagaaggaggattgggtctggtatgtttacccttgtgcttaatgttccttggctgatttctgatgtgaatccttgtgttgtttctacccatcctgctctggcgaatagcacggtatcacagttgatgcatattgatcgtaagcaatgggatcttgaggttttacatgatttgtttgaggcaagggatattggcttgataatgcaggttccactaa

SEQ ID NO: 405160 - DNA, 924 bp, Cannabis indica
ttcgatcatttttgcctagacaatcggaatttcgattggttcagggctgttccaactggaattccggttggatagtatcggaaaaggccaattttcctattttggccataacttctcgctcgggtgtccattttagacgttctatataccgtttcgaagcttgtgacgagctctacagtatggtttatatttagggccaaaaatttaacttttttaagggtgttttcaccacgtagtttggtagaaaaccatagattcttttcgggaattaggaagtgttctggagcaaacacttaccttttttttttttatggaaatgtgacatagggccttcgatcagtagatggtatttccactcagattaactggcattcatgaacccagaattgaggtaagattagcatagaacatattatatatgcatgttgtgtttgtgattgtatatgttttgggtgatatcatagcggcacaaccactgtgtcagttcgccagtacatgcaccgtattggttaagagtgacattcacaccaaagagtattaattggcgctatcatagcggcacaaccattgtgtcggtttggcagtacgggcacaatactagttaagagtgatatcatggccaattatactcttgggtgctattgatgctatcatagcggtacgaacatagtgccggtccagcagtgcgatcatagtgctggtagtgggtgatatcatggtcaatagcactaaccattaagaacgttcttaatcatttggtaagccttgtggataggtgtatgggcacctaaatactagccgatattatgttatatgttttgtgcttttcttactgagtctgttgactcacatttgctgcattttgatgtgcaggtaaaggcttgtcttgaactgattattagtgagtctagagcttagtgaaga

SEQ ID NO: 405161 - DNA, 766 bp, Cannabis indica
cctgaatcgcatgaatatttgagccatcatcaactttccaaattaaccattttttcattagatcacgctcccaaaggagactgcgccaggagtaagaaggattaaagccagggcctgcctcaaggactgaagaatgaggaaaatacctagctttcagggttttactaagcaaagattgaggacacattagaacccgccaggcctgtttagcaagcattgcctgattaaagtgaacaaaagatctgaatcccaaccccccaacaaacttagattgacaaacagctccccaatttttccaatgaagtttcgaattatcccccgaggaaccccaccagaattttgaaattagggactcaatttccttactaagtttagttggtaatctaaaacaggacatggcataggtaggaatggcttggagaacgctttaatgagagtttccttacccgccctcgaaaaccatttatgatgccaggaatgaacaatgttggagattcgatctttaagaaaggcaaaagcaggatatttagacctagacagacactgaggcaaacctaagtatttggtgataaacggcctatcctccaaatgaaatgtacgaaaaaagagatctttaatctcagaatgagtattgggggaaaataaaatagaagacttgccaaaatttatcatttgtccagaagctttagaataaagagtaagagcttggttaagggcaacacaagaagtgggatcagtagaacaaaaaaggatgctatcatctgca

SEQ ID NO: 405162 - DNA, 913 bp, Cannabis indica
atatgattctaaaaattttgcttattttagaatttatgaagaataatttttttgaaaattatagcaaattagtggatgtcctcattttaaaactggtagagaaatgaccattttagactatttattatatatatcttttttttgcccatcacaaaaaactgttagacaactttttagtcacaacataatttttttttgactaaatgtggctttagtcacaacaaaatgttacttgtgactaaaacataatatttagatacaagttgtccctaatttagttttagtcacaagtattgtgactaaaaatatattttgttacaataaattgtaattattgtgactaatacatttagtcatggaccttttagtcacaacataagaatgaatttataattagttacaagttttgttgtgactaaaagtaaaattttttgtagtggccacataaaaaaatcaatatatttttttttagaattagaagttacttaactattatggtaaatctatattagatttgttaaaaaaaaaattatttgaaagttatgtcaattttttatgagttggtgtagattgttggtttaatattattattcttagttgatatattttattttgctatgtataatagtgatatgtaattttgttagcataatacaaatattttaatatatatataactagtaaacatcccgcgcttcgccatttataatatttttaattatatatataaaaaaattaattattattttaattaatgataattacttaataattgacttgataattagaagccaatgtctttataacctatcgtcagtaccagaaaatattttgtgtaatgaccataaagtctagccaaaacttttttttccaaaaaaaatgaggaaattacactctatactctttttatatt

SEQ ID NO: 405163 - DNA, 1111 bp, Cannabis indica
ttttcaaggtgattccaaatttctttgtcatcgttagtgtcggtgtgtaggtcataaagcctatccgagagtgagttgaggatgtgtcctctacataaaagatttccatcttctctcttcttcctttgcgccttgacctcattagtatctttgttggtaagtgtgtgtaagagctgcaaggtggactcaagaatatagacaatcttgagtatggttaggaggaacctcaccttatcttctcacctagtgaaattggtgccatcaaagcggttcaatctctgtaagtcttggttcatcatcttgattgtttctccttgcattgaaaacaaaaagtaatctaattgattattagaaataaatgagagattacaattaaagagtaaaataagatgaataaaagacaaagataattacaactctaagcaaaatattacaaggataatatattaaataaagagttacaatccaaaacacaaaatacaaataaagaaaaagagttacaactcaaaactcaaaactcaaaaatacaaataaatgtaaactatataaatatatatatataaaatattgtgtatatatatgatatagaatatatataaaatagatgatatatagtagagatataaagtatatataaaaagagtgtatatagtatgtgttgacttcgctttttgccaaggacaatgagtctttttgataagcaataaacgatattttgtaatgaatatataataaagcaataataagacacaggaattttatagaggttcagccccgagcagtttggtaatagcctaattctcgttatttgtattgacttaagaacaaggaagaagattccttttcttatagctcttacaacggtatctctgaatatataattcttagataataatatagtcttagcttagcagcgtattgactttcaatctctcggtcccctacccagtgaacattcctcactatttatagggctaggaaacttgaggaggaagagtttcctctctcgttacaatgcacataaatagaaagatcatgtgatcaatgttgaatacaaggatagtgggattgagactgaatacactgatagtgggatcgtgtgtatgccata

SEQ ID NO: 405164 - DNA, 721 bp, Cannabis indica
agagagaaagagagagaaagttaataggaaattattgctttgtaatgaaagtatggagtggagaggattttatagtacgcggcgcttggtctatttttatatataatattaacacgtgactaaattggtctatttttgtttttttaactaaattggtctattaattattaaataagcaccacaaaaatttatataaatagctttaaaacaacaacagctcacaccccacaatattaagttttatcatagtcaccgacaaaattgttttagtgatatcaattttcttaatttcatctttcattaatttactcaaatttgaagaagtataatattattattacaatttttttaatataatattttatttatttattataataaaaattataaaaacactacaaaattttttacttttagtcacattaaaatttgttaataaaattaaaaagattgtaactaattataaatcatactaaaatgtccgtagctaaaaatattagtcacaaaaattacaatttgttgtgattaaatgtatttttagttaatattcttaggaaaatttacaaaaatactgtaatttgggttaacttttacaaaaatattgtcacacagaaattttttcaaaaatattgtgtttttataaaacaccagtaaaatacaaagcagaacaactcaaaacaacagtagaacaactacaaaacactagtagaacaccagtgaa

SEQ ID NO: 405165 - DNA, 737 bp, Cannabis indica
tgccgattgatctttaatttcttcatccactggttgtaccatatcaggcccatcatatttctttccacttcgcagggtaattgccttgcagttttctttaggattaacttcggttgtactaggcaagtttccctgaggacgagttgctatctgagttgccagttgccccatctaagtttgtaagtccttaatggaagatctagtctctgtcataaattgcaataataaatctgtctgaagaccagaattcccactagagctttgttgctgagtctgttgttggttctgtgtctggttctgatttctctgttgatagaacccactattccttcgattccctccttgattaaacccatagttgttgttgttttgagagtaatttccaatggcttttgcttcatccattggcaaattattcacatcttcctggcactctgcatagggatgaggacctccacatagctcacagaccacttgagcttgttttgcttgaacaaccatcagttttgttagggcctctacctgggctgtcaacttggtaatggcatccacctcaagcataccagccaccttctttgtttggctcctttcagttggccactgctgattattcagggccatctcctccagcaaatcataagcctcattcgcacttttcctcataaatgctccaccagctgctgcatctataagggttctagtgttacctaccagcccgttgtaaaaattgtgaacca

SEQ ID NO: 405166 - DNA, 591 bp, Cannabis indica
tttatgagaaatcaaggtgcaacagtcagattaccttttgatcttgaaataaagaaaacttgtaaaaagaacagaagaaggaagaaattgaaaaaagttgcaataaagattgaacaagaaggagttatagctgacaacgccaataatatcaataatggggagttgtagaagactaggctaatggtcacaaaaacaacgaccgtagcctaagggactatttgcttcctaacttgacatgggccaaatcttgtatatataagatcacttgccattggtgccaacaattttgaaatcaagccagccatactgcagatggtccaatcttcagtccagtttgggggactgccattagaagacccaaacatgcaccttgccaacttcgaagagctttgtcagacaattcaagatgaacggagttagcgataacgccatcaggctaaggctgttcccattctcactaagggagtaagccaagagttggttggtatctttgccatccaattttatcaacacttgggaggaattagccctgaaatcctttccaaattctttccccctatgaagattgccaagctgagagctgaaatcaac

SEQ ID NO: 405167 - DNA, 610 bp, Cannabis indica
ggaaaacaccgagacattcttctctatagtacaagcaacaaaagaatcaagattctgttccgatctaaccagggtgatgatgaaatgataagtgacaagttggattgtccacgtgtacacagtttacatgtggcataattttattatttcacgtaaataaaactaaaaaaaatcagtttttttttctgggtctcttttcttcagtgactctctctccctctcatgcctttgctaatattcacaatctgtttatgctgccactgatttacaaattagtactctacgccataattcatttatcaacacaaattcaaaatttcaaaaaatgatggattcaacaaacttccagattttataaactagaaccccaaatcaataggtatgcactaacactgcagatatatttacacatattcaagacaaaaaatttccctcaatgtactctctcaccaacgaaacaaaaaatataaatgaaattataaaatagttttatcttcaagcttaataccaaacacaaacccatataaataaaagactcacaagctctttttttcaaatccaatctgaagacgagatcagttgggagcttcgttgtggaggttcgcccaga

SEQ ID NO: 405168 - DNA, 795 bp, Cannabis indica
agagagagagaggggatttagacttacagcttgagagcttaggatgctcgagacttagggtaattaggtttagtttgatgctcttaatataggagagtttacaagagaataataggttaatatgtttaaaaagaggaaatataacctatttattacataataaaaataataaaataaatagtatgttaattaacccctaagaataggtaaatagctgatatttatcccctattttcgtgggttgttgaagccccattcgtagcttgaattgttatctaagatattgttgggatttattttaccaggatctagatttactaacaagtatgtttgattaacactctaaatatgaatatctctaatacgataaaattaaatacataagagtttaaaaaaaaccttacattaatgtagcggaatgttaatgactcatttcgctcaaatctctaacacgtggtcctttctgtcacagagtaataacaagaattgagcctggatctctttctctccttcgggttggttaccatcgtcttctgagtctctcatctactagttgtcagagaatgaaaagtaggtttaatttggttgaagtgagttgttgtatgagatgagagcatcatgttccttttatagtatttcaactagggtgtaggatttaattatatggattaagaagaataaagtaatgggcaaaaatccatcactagtggtcggccatacatgggcctcactagttacaattttgtcactttatttcaaccacttattcttctttcaataatgctatatttttca

SEQ ID NO: 405169 - DNA, 1005 bp, Cannabis indica
aagtatatagagtttataatgtcattcttgtattttcttaccattgtaaataaaactctctaaacaataattacaactactactaacttaaaaaaattgtaatttaatttttatttttaatgccaaacaaaaaagatgcattgtttattcaaggggtgcattgcagcaccattaacatttattgacttacgaaaaatttaatgagataagattcgattaatgtaaactataaaagaaatggttcaggttggcatttgatttattaactttgattactatttaatattatgtatagtgcaggtttaattaagtagtatatttttattttagaagacttagctataataattagacataataatttagttttgatacaatagtgacatactgaggaaaaaagcttccaaaataagttttttcttgttaaaataataattgagttttatccttaatttaaaatttacaaaatctattagtgttgtatagtgtgctaattcacattctatatctatttattttgtaaatagttttcgtgtccaattggttgtttattttggatgcctctagaaggtggtctcacattgctttgtttaaatttttaagataataactttatcttatataagtcgttttgtttgtagtgactcatattctgactttacatattgttaactagacaattagcttgttgactaaaagtttctcatcgaagattgtcatagtatcactctttcaaacaaacaaaaaaaaaatggttcagagaaagaacgtgttaaagattgatgaaatatcatttgggtattaattatataggtctctaatgtggaaatattgtgtatatgtgcagcagcctcttcaagtggtggcgatagtaaattaaattgactatgaactcttctagacatgaaacaaagtcaaggttaatttcttccccatagttcaagtaaactagctaagctaaatccaagagatatccatatccaatgataatagataacattttaa

SEQ ID NO: 405170 - DNA, 526 bp, Cannabis indica
ttcaatgacaaatgatttttgaaaaaaaagtatgagaaaaacaattttggtgcatacccctgcacgcgcggatggggagaatctgaccgagacagcccttggtgccgagtttcctcggtcaaactattttaaaccacgtgattaggctgagtgtctcccttggtgcgcgtgcgtgtgtgcatcaacttcaaacagtttcatccaaattcaaaaaatcataactaattcataaaaaattaaaatttagttgtgtaaaagcctaaattaattaatttttgtctactttctagtaaaaatattttcagaacgaaataaaaaatatttttacaacatacatcgtgatttccatacaatcatcaaataagcacataaaccatcatgaaaccatccaaatcaacacaaacatcgttttaaattcatatttcttgaaagtaaatcattaccatggctttgaggccagttgttggaattttttttaccagggtctagatttactaccatatatgttgtttaacatcctaaaaat

SEQ ID NO: 405171 - DNA, 1017 bp, Cannabis indica
tctgaaagtcttgtacaaaattacgagctgggggtgtcccactctattagagattgagtatctttactcagttaaggtcgttccatcatggaagaacgctacagggggctttttctatctctgtactcaccccagcgagcctaaaattattgtagacttggcaaataaagtatccattaagaacaactttttctggacgtctggtctctcccccattggcaaacccatgtttcgcaaacttcgtaagtgattgttctcttcttacttatttacattaatcttcctttttcaagttttatgactaatatttttttgttctaacaactcttttgacaagacctactcttacccccgagatggttagtaggcataggcgcctgttaacccttccctacggtcttcggtcatgcagcttccttttgagcgaggttaacttgcgatcggtgggctttctcgctgataaagaatatatttgtgattacaagattcccaggtattcttcttggcaacagattattattctgccctaatatcaagcgtgggatcgcttggctcaagcacaataccttcaaagtactgcccctcgggaatctcgtgaaggagcatcccaaggtaatcaatgtgattgatctcctactatacttagatctgagcgtagtaccttagtcacctttgaagactcccgccttaatttttatatttggaattctcttcttgtggaccgcattgctcataagtttgacagctggtatcctagattccacgtccaggttaactggcacgagttattttatggtatagccgagcaatatgggactatggaagatatggcaggtaacatagatgcgagttgggatttagaacctgttgaccaaggttttcggcaaccaataaaataatataagattagagaactgtaagaaattaagagaaggatttttacgtggttggagcgttaatgagccttagtccacgagtctgtatatttatgagtgtattaaatacagagaatgttct

SEQ ID NO: 405172 - DNA, 765 bp, Cannabis indica
tgccttgaatattctactagcaagagatgtaggagaacaaaggagtcgccaaccttgtttggccaacatagcaagattaaaatcatgtaggtggcggaagcccataccacccaagttcttatgagaagtcatacgatcccatgacatccaaatgattccttggcctttagcgcttgtcgttttccaccaaaaatttgccatgatcttttcaatttcatgacaagtttctaaaggaataagaaatacactcatagcgtaattggggagagattgaatgacagtttttaggagaatttctttgccagcacgggagagaaacttgccattccaactgttgaggcggcttatgattttattcttgagaaagccgagaataacagttttctttcttccaattatgttcggtaagcccaagtagagggagccatcagtagcttctatcattccaaggctagaacaaatttggtgtcggagtattgcttcattattggggctgaagaagattgaagacttcgaaatattcactttctgaccagaagcaagttcaaaagaatggagcatgtgcttgattttggtagccgtactcagattagcttgaaaaagaggtagctgtcatcagcaaaaagcatgtgagtgatggaaggagctcccctagcaacttgattgagttcattagggtttatgctctgaaaacttgtaaagatattttcatttataaataagaggaatatttttcatgtatgcttaaatgttaaattattaata

SEQ ID NO: 405173 - DNA, 847 bp, Cannabis indica
attttcttacaaaaattaaataccaagtaatgttgttttattatttttaaattaactaaaaatatatatataaaaaaagaataattactcatatattattttttatttttttaaaatttacggttagagttgctcaagtaatggtttctccagtgatttttatatatgttgttatgtgaattttagttgcgatttaggttgctccgttagttactataagtgtttctatgtcgattttcataaaaataccaaaaaaataaagtgcatcgagtataattgcatccaaatgatatatatctattctatataaagtgtgcctatataacaaaattcttagtttatgagaaattcatgggtgactttttatttatattaaaaaaaaatggtttattattaaaaataaaatagtttatgagaaattcatggatcactttttatttatatataataaaataaataaaataaatctcattaaataaaaaaaaaaatacgattgaccctttaggtgatgattttggcatatatatgtgtatgatcatggaacattagtgttttagtttaattgacattttacagaaacaaaaggatctattgaagtcgaataatgattcttcaatgtttttaaaattcttatgcttacctctttgtgtttcaattatttgcaatcttttatttcttataatctcaataaatacctaatattgagattaatattttgattgtttagaaactctaaaaattagtggattatgataaatgattcagtttaatgcttcaagatttgagttttttgagagaaatatttatgtaggtaatctatgtgtgttctataggaatggttctggaa

SEQ ID NO: 405174 - DNA, 1220 bp, Cannabis indica
gtcgatgccctcattgacggaccataggcaaatcttcctaatcttgactcttaagctcactccaagcttcatctaaattctaagtctgcacttgtccctctatctatgtagaaccacccacttggtgacgatctgcctcatccactcttggacttgatcaatgaacctatgccactttcgctatttagaatcacccatggagtagtgcctctgcacttgaatacttcctccaacatgaacttgtctgagtctaatacaatgcccctccagttaaccaagtagcccttacaacactgatgctaaagctaacacatcctctaatagtagctcactcgcagattgtcgaatgcatacttcttttagcaaggactaagtatggtgcaccccttggggtgaggttcacaaactaaccatacccaacagcacctacataacacttccactaaagccaagtccctctagaaacttcacacgccaactccatggcgcaccatcctcctgatggcaattgagcaagacactcttatcacatgataaaattggatgcgtcccttttggacgaggctcgcaagccaactgcacccaatgcagcaccaagtgcactctttcacacattctctttgcggcatactcaatattggcccttcggccctacgacacttccacagcttcatgcaaaaggcccttttgacccaatgcataagtgttcctctgagcttctttcatgtgttcaatgatctatcaatcacccaaaaccatgaattttccctttgactcctgcttgtgtcggctctctaacactatgtcacaagtccatcttccaaaattaaccatgcatcctctaatgactcgctaatttttgacaaacttaataacacaaagtcctactcttaagacttgaagtcattccaatctgcaatctcccatcagtatatgctctctgtaccattcggtttacagtgtcccatacaacacctgtgtttccataaacacaaagcatgcccataacatgccacaaactagctcagtcttgatctcagcctacgcccatgcataatatttatttgtagcttgcaacaaccatgcaagtctttacactgagcaacccatctgttgtagtgtttccctctggattcacacaccaaaattgaacaagtactttgattcttcaaacatatgaattagtgggctccccctcttcaacttgggaagaacttctc

SEQ ID NO: 405175 - DNA, 472 bp, Cannabis indica
aaaagagagttgtccgataaggattggtgaaaagaatcttcgagaagggtggtactaagcttagaataccattgtcgagaggcttgtttcaagccatagatgctcttttttaagagacaattagagtttgggggagctttgtagcccggtggtagttgcatgtaaacttcttcatgaagatcaccgtgaaggaaagtgttgttgatgtctacttggtgaatgttccaattattcatggaggcaagagcaagtaagattttgaaagtgttgaattttgcaacgggtgcaaaggtttgggaatagtcaattccttgtctttggttatagcctttggctactagccgtgctttgaatctatcaacgactccttctttggtatatttaactttgtatacccatttgcatccgatagacttttggcctggtggtaacttggttattatccaagttttatttctttccagagcttcag

SEQ ID NO: 405176 - DNA, 751 bp, Cannabis indica
tcagccgctcaccatctctttctctttcttctgtcacaggagttgttgccctaagccagatgttttacatctggtggccgatgacccaaacagacaccaaatttgaaatctccaccccaaaatttaaaaaccccttttttgcctcctccttctttgacccctaccgatcttgaatcgcccactccgacatctctcctcctctctacctcaccacacatttcgaactcctcactgttggataataagaagaattttggagagaatacttgaatggaagaagctatattttatatttcagcttgtgtgatttgtgacttggtacaaaatgatgagattacatttctatttataagactctatagactaatctagaaatattattaaatggctagcttctacattgttctacacaattccctctactaacacaactgaaagataattttagaaaattcaagagtagcaacaagaaaattctagaaattaactatactaaatcaagtttaatatttcaaaacccccttaaacttgatttgtgactccaataatacttcgtagtttgatgaatttttctctcttaagtggctccgtaaaaatgtctgctgcttgatcttgagatttgacatattctactcttacttctttcttccaatgcattctcatatgtaatgatagcgggtgtcgatgtgtttgcttctttcatgaaagactgaattctttgctagtataattgctgatttgctatcaacat

SEQ ID NO: 405177 - DNA, 909 bp, Cannabis indica
tgacatcgcttttaaccaacgataatgagtcaaatttaagcgattatgaataattaaataataaatatgaataatataaagtaaaaaataatacctaaattatagaggtttggtcccttgatgatgttaatagcctactcccgttttagttgtattgacttgtgagtagatgaacatgaaaaccttaatctctcaaaaactcttacaatgatctctgagtttttcactcttaaatctagattttttcgcttgagtgttttctctgaatgaaattcttgttcctgaatagtaagatgagtctactatttatagagattaattacatcaaattagttttccaaaatcaataaggaataaaatgaaataaatcagtttactttctataattaaaataagtaaaataggaaactagacaggttttctctcttcttcaataatacgagtttatcccatgaatccagggatagtgtcgtgtcttgcaagcatgaagatatataagatatatctctaaaattgtctaacttgcattccctggctggtgcatacgagccacctgcttgatggaagctagtcaggtgttttggcatactctgctcggatgtcctaacttccgtttatgacttcaagtaccaaatctccttgcacggctctttataagtgggattggccgcccaagttatataatctatttcacgtgtcacccatatggttcccacgtcaccttgtgtagaaaattaaataacatctttaacatttagcttttactaaacaacaacattattatttaataaaatagataaagtttaaattagcttgtgaagaagatgctctagtgagatttttttttttttaaatcatttaacaaactttaaataaacattgagtcaatttataaattaaaaacataag

SEQ ID NO: 405178 - DNA, 803 bp, Cannabis indica
ttaacccgccacaggttgcccaacctccccaagctgctcaggatgcccaaaattgggaaagtaggtttgcagcaatgcaagcaaggatcgaggaagaagataatgagtttcgacggttacgacagcagggtgctgctgcaatgcctactcaaaaaattccagtggcacctgcccttgctgtctaggctgaaccagtggtgtcaatgaatcggatggaacccctgtatgaaaggttccgcaagcaagcacctcagtttttttgggaggtccagatgtcatgaaagcccagaaatggctaacggtgattactagaaccttgaaatttatgggtgtcaccggtaatgacagggtggtctgtgccaccttttagtttcaagaagatgcactggtctcatgggacatggtgtctatgattcacgatgttacgacaatgacctgggaaaagttccaagaacttttcaatgctaagtattacaatgaagcagttagaagtgctaagagaaaagaattcactcatttaactcagaaagaaaatatgagtgttactgagtacacaacacaatttgaccgtttggcgaggttggccttgggaattgtgccaactgactttagtaagaaagaaaaatatctggatgggttaaatgcgaagattagacaggacttgatgatcactactgatgacagaaccacctacgctgaaatggtggacaaggcactacgagctgagggcgcagtaggatgcatgacagagtctagtgggactccagttgttggtagggctcctacccctcctgcattaggtt

SEQ ID NO: 405179 - DNA, 744 bp, Cannabis indica
gccactgttgattaaatgaaatatatgcctctttcatcaatagtatgattaattaattattcgtagcttctatttgtaaaatggctgatacaggttcaattggaggtcagaaaaagggagttagggaaaagtataaggaaaaaaatattgaacaaaaattggccaagctgcctccaggtcaaaaattgaaatttagatttttatatggcgattgggggccctgtagatgacttcggcaacaagtttaacaattacataaagtttcttgtttgcaatactattcctatgaacaagtttgagttcgaggacgttgaggatacaatcattcagactatatgggatagaatagcggtaacattctaatttttttaataataaatcaaacgaaatcattatataaaaaaatataatatatatgactttagtattttttttttcagaccaagtttgagttgccagctaataatcctatgttcgtggattacgtcactaaatctatgtcaaaaggattacgtgactggagatcagatacgaagaaggcgtggaaggagaatattgaaaaatatggggaggaagaagcgaacacgggatcacatccagatatggttacaccggaggtgtaggcaaaggttatcgcatactggaaagactcggaacaacaggtattaattgaaagttgtaatatcttttcctatttacttaatcttttttttttctcaatttgctaacaataactatacgtta

SEQ ID NO: 405180 - DNA, 541 bp, Cannabis indica
gtaccaagcgtaggtacgagctctcctatttaggtgatgcaatttcctggcgacgtaatgggcataagtacgggcgtcagtgatatatgatgagtaccgagcgtaggtacgagctcacctgattaggtgatgcaattttcttggcgacaaactgggcgtaagtacaggcgttagtgatatatgatgagtaccgagtataggtacgggctcacctgattacgtgatgcgattttcctggcgacgtactgggcttaagtatgggcgtcagtgatatatgatgagtaccgagcgtaggtacgagctcacctgattaggtgatgcgatttttcaagcgatgtgctgggtgtaagtacgggcgtcagtgatatatgatgagtactgagtataggtacgggctcacctgattaggtgatgcgattttcctggcgacgtactgagcgtaagtacgagcgtcaatgacatatgataagtaccgggcgtaggcacgggctcatctgattagacgatgcgatatatgttggaagttattttaccaggaact

SEQ ID NO: 405181 - DNA, 758 bp, Cannabis indica
gtgaggtagtgaatttgagattatgcatgattggaattggttggtatgaattttagttatgaaattcgaagtttgtaaaaatgacaatttcgggggtttccaaggccctcgtcatggcgtgggcaacctggatgttgccgccacggccacagccttgctccctgcggtgaggccctgcttctctcgagaatttttggatttttgtttttgccacaacttttgactcgggactccatttgggatgttcttgatatcgttagaaagcttgttttgggctctatatgcttatctataattgaaatgcaaattatgtgattatgtgaaattgaattttgggattaaccctatttgtgtaatctcgggaatgtgtgactaggactaccgatgcttgctcaggaacacccgaaatttggaatatccacatacttgggataccaggcaagacagtagttagcacgtagagttaagcactgtggtgctcatgtatgatattatgcttgtgattaggtgagaaaccaggattagggttatcaccctaaagtgagcggttatacgatctagggttattactctagtgtttaaatgattttgaatacaatactatgttgtatatgttgagataaagaattatgcgggtaaggcataattaggttagactcggtaatcagaaccgagataaaccaatctaaggccttattgtaaatagatgtgtgagcgcaacacgtaggtctatgttaaatatgttgggaattttttac

SEQ ID NO: 405182 - DNA, 737 bp, Cannabis indica
tatttattattgttatatataagtatattatttgcaacctcccaaccatcggggtcttacacggatgaagcgtgtatgccaaagaatggataaaggtgaaaaaatagaccttgaagttaatgacaaaggggaatatttttgagatatgtatggagagatgatatcgtggcttggagttagatgtcaacaaacaatcggtatcaattataaagactggagatatgtggatcaatcgttgaaggacagaatttagaaagacgtgcaaataagttaattatacaaaatatacttattatggtgttttgtaaactatttgctaattgtttgctttctacatatagcgtggtttcaatgttcgtgcagattggaaaaaagattctcttaaaatgtacgtatctccctgaccaaaaagtaggcttaactaacaaatcaaagaacacgaataacacttttgagatcaaacctaatcatgtcaagattaagatcatttgatctaggatcaactaggcgatattgaattgaataaatattacggtaaatttatcgtatctaatcaaagttcaatatcggtcccttccaatgtatactccatactccatacatccgatactggtaaactttgccgatgccctggaaaggacataacacttatccaaggtgtaagtattcgtatcgctgattatcatgccagtttaaatccaatgaattgataaatcagggaattaaacttttgaaca

SEQ ID NO: 405183 - DNA, 634 bp, Cannabis indica
gatttcacattattttcttttttctttctcttttcttagttttcttcttttcctgtagcttttgctgccactggtttgtttaccactttccaacacttcaacagttacacctctctctcttcttaaaaaaaaaaaaaaaacaacctctctgtctctcaaataaaaaatagaaaaataatgtgaggaaagtaaacccacaccctcctgagaagcgcgtgcattcactgtgcaactgtgagcaaactttgtcgtttacctaggtctctctcaattccccaagttgagtaccaccgattacgacaaccaaaaagagaattgctctttgttttttcttttttttttttctccggaggaaaatgagaattgatgaaagatacacttttttttctttaagaaaaatatattgcaaccacaagaagatacaaagagagtacaagttatctcaaaaaaaaaaaaaaacaagagtacaagttacaatatattcaagggtaaatggcggcaaaatctttaatactttcgctttagtttcattaaactcacaaaactcaaatttctgcgggtaaactcccaaaactagaaaactgttagcaatttactctttccgtccaaatttaattgttaagtgccatgttgg

SEQ ID NO: 405184 - DNA, 533 bp, Cannabis indica
tttttttttgaaaaaatcaaactgccaaacgacatgttatttttgcaaaaagcaaaacgacacgtcgttttttccattctgtagatgactgaaaatgcatgcaaaacgacatgtcgtttactctcctgaagggctgcctcacaagacgaaaaatggcatgttgttttttcacagtttgaaaaacgacatgtcgtttactataaacgacagctgcaatgtacctcccaaacgacacgtcattttcgccaaacaacacgtcgttttccagaaaacgacatgtcattttgcgtcgtcttcttcagccaaccgggtcgattttgacccgtttttctgcatgcgggtcagacgaacccgacccaaacccgatcggaatagacaattccgacgacaaaattgcgtgttttcaaatcttaaatgttctaaatcaaataataaagagatccacatagattttaagcacgaaaacacgaaaaaaatataaactttaataacacgaagttaatcgggtccgaaaaagttttaactgaaatttt

SEQ ID NO: 405185 - DNA, 868 bp, Cannabis indica
gcgggcacctactccacctttgcggtgcttccagaggccaagaagggcaaggagatactggcccattacatgaactggttggttcctgaggtcagtgagcaactggctggtgctgacaatgactcttctttagaattgctggtgggcggagtcttgaaggagttcaccagggtaagtttttcttgatacttccctttaatcttatgtacttagctcaaatgctaaagttttttctttgtgcaggtcgctctgaagttggcctacacttactcccgggctaagtctgccgcttccaagaacacagatctgtctgacaccatgagggcggaggcagacttggccaggaaggatgctgaagatgccagggcaaaactcagagctgttcggttggagttgggtgaagccaacaagaagatgtttgccgcccagaagaagataactgagctgactaaggatctcaatgtttctgaccgtctttaggagaccatcgataccttatctactgaagtgaacagtcttcaggatgagaggacttctcttggagcagttcttcatcgggtgaaggaggaggagctttcgaccgaggttgtgaggttgaaagagaaggttaatgctctagagacagccggtcttgagcttttctttgatatttggaaggctaatgctcaggccagctttgactacttgggtgctgctaaggacatgtaccttgagttctgcgcgtcccaagtggcctatggcaaaactgaggcggctgcttcaaccttcggtcagactgctgatgtacctcctgttcaaacaacagatcctccagctccaattggcccagaagaaccgaaccaagagcctcggactccagctgtttaaa

SEQ ID NO: 405186 - DNA, 638 bp, Cannabis indica
tataatatatatatatatattaatctgacattaatatatgtgtcacaaatttttatattttaatttacattaaattattattttatattattatgtctaatattaattagtttttttttattatttaatgcactatgaaattttatttttttctttaaagaaaaaaaccacattttaatctttcaaaaaaaaaaaacgacaggtactatactccacccttgttccatccatgtgtcgtctttgtgtctcataccataacacatgtcttgtcacatcaccagacattgtttttcttattatttttgtcataatattattgttattaaacaattaaaaataataattttgggtagaaaattcaaaataattaaataaatttataatggtaaaagtgagataagaaaaaaaaaaaaaagaaaagaaaaaaaaaaggaaagtaccattaccaataccagccacatttgctaagtgcatgaatcaaacctctcatccttcctctatataaacccctatgatctcttctacttcttctcagtgcttcacacactccattcttcaacttttcactctttctttctttctctctcaatttttattttttaattaaaaagagtcaactaatttataagaaaaaaaaa

SEQ ID NO: 405187 - DNA, 866 bp, Cannabis indica
gggcccctggcttgacggacctttgatgagcaacaattggccactccctaaccaggttgatgaggatggcgcttacgacccaacaagatacataccaatcgtggaattagaaaaccgccatcttagacgttgattggaggaagtaaaccggcgtaatgccgagttggagcgtgaaatagcttcagtaaaggcagcacgataagatgacactcaaaatcaacctaaccttgggaaaagagattcacgaggcaaagctcacgactcgcagaccaaggggaaggggataaccaagagatatactcagaatcctcaagagatgcaacctgagggagctgaggaaaacctggagacacagcctgagatacgtcgaacatcagagaaaaatcgccaacccactttttaggctcatgagaatgaactcgtgcaaaccctaatagggagaaaaagttgaatcaaaccttgagaggaagggcaaggtccgaccataatcatgacaagagtgatctaagagaacatctgaacctaagaaagcgtgacctccgtcaatgaatcggttcaaggaaaaaggattcattccatttgcgaataaacaagttggaggataagttcagagggcatcaagtcacgaaacccaggagacaaccggggcacgatactgttggaaaacctgattcggaggcctcgagaccaaagagtaaagacgattccaaaaggtggcccaaggataagaagcccaataggtatatccctctttatgccgaatataccgagctcaataaaacttgggaaaaaaactacctcgcatgtaacgccctaatgctaaggcacgttacagtgctttttcaattattgtgcaatctttgcta

SEQ ID NO: 405188 - DNA, 520 bp, Cannabis indica
ggaaagaagtgttattattgcaagaaagaaggccactttagggatgattgttatctattaaagaacaagctcaaaagggacaagagcaaggaaaggggtgaagctgatgttgcatcaggatacgattcagctgatgttgcattaggatacgattcagctgatgttcttgttgcatctagtgaagattctggtgtagaatggattcttgattcgggttgttccttccacatgaccccaaacaagaacttgttcactgattttgaggaaaatgcagcaggtactgtccttttaggcaacaacaaagcttgtaaaatcattggggttggcactgttaatatgaaaatgcatgatggcattatcaggtcagttcagaaagtaagatatgttcctgatcttaaaaggaacttgttatccataggcctgtttgacaatcaaggttacactgtcaaaatcgaccagggcactcttaacatctcaaaagggtcacttgtggtagatagaggaagactcaaaaatggtc

SEQ ID NO: 405189 - DNA, 590 bp, Cannabis indica
cggtggcgccaggggatcaaacaacgaagaaggcctctatttcttcgtcatctccgtgtagtcacggaaccatacagggggatttatcttcctcttctgactcttaacccctgcaggttgtgcctctatcgccaaaatttcaccctaggacttgctgtcatgtacatggataacacctgcaccgatgggagtagctggagctccctcataaggatcatacccatcaagaaagacctcctcctcttgtagtgggggtggtgcagctggtagtggggtagatggatctgttgggacctccggtgctaaagttgtcgttggtgaacgattcaacatggccaatatatttctgagttgctccataattacgttctgaccacccttcagctctacatggctggtctcatatgccttctttagctcggcttgacaaacgtacatacccttctggtcagccctgatcctatccaacctccccactaaatcactatactcggcaccacgaacgcctaatgaagatggtgcactgggctgagggtttgaaccagtggcctgaaaaaatatataccaaaaaaaaatacggtaagcataca

SEQ ID NO: 405190 - DNA, 1117 bp, Cannabis indica
aaaaaaaaaaaagttttttaaactcaaaaaataaacttacaataacattgataaacttaagctcgtaaaaaaactcaaaaaataaaaagcataaaaaatgagcaaagttaaatatgtattaaagtaaaaagcattttaaaaccatatattattaaatgtaatttaataacgctagtggtgctagcatatactttaagttgaattaaatattaggtctcacataatttaatttagaaattattataaagtatctataacaatttatacgtcattagagcatttccaatgaaagtataaataagtgctgaaaagctaaaaaatagttcatttattaaaaagtgtgttctaatggtgtactaaaaagtgatgtaaatttagcacatatataataaattttgtcccaaatttagtacaacatttgctataatgtaaaagttacaccacaacaaatgagcattgctattaggcagtagtggtgcctagcatcttctcgacatgtcgtgttgcgattggctagcgacacataaaaaagtgatatgcaccactggtgccctttagtatttctcacaataaatgtactactttttcatttatatttatgtcatttctattattttattagtatatttaactattacattaaattataaaatatttatattatttttttattgtcttacatattaaaataataataaaattaattataaagttattaaattttattttattttaataaaacattaattaaatattaaattttacatcaaaatattacaattatatattagaatacaaaactaaaagggaaaaaaaacaggaaaattctaaaaaggataaaatattacaaaaatactgtgggccggcccaatcaatatttgtacagcccacattgaatatattacaaaaataccacttgaccttaccttcagccgcacgttacaaacggagacgatgaaggaacctccatcgatgcagtcggctacgcaaccagaatgaaaccagatcgagcgtagaacaaccataaattccggtgaatttcgataggaaacgaacaaatccaaggatctaaacagaaaatttaaaaaaaaaaacgaaccagaaaaccgtggagaaa

SEQ ID NO: 405191 - DNA, 517 bp, Cannabis indica
ggaggaaaatgcaaaatagaaggcggtgatcatgtttgtcattgttattgttaatccaataataatttacattattattattaaatattttcaataaagtgatgattaacatttaattatatattttctattttatatatcattatcgatgatcaatgagagtcttgtctcttattatattttttgattgttttactttttatatatgtgtttggatgcattttattctcaattgtgattttgtgaatgattatttcttttgtgagaggatagaaatgttatttattttaaaattattaaaaaatatttatgaagatgtcacaaaaattgttaaatataatgtaaatattatatagacatttatataataaataagatattagacctaattaagtctaattttaaatttagactaattaagtttaattatgccaaatatatatagaattttttttaatatatggattttttttcgggaaggttaaagtatttaagtttgcaattctatactaaaaaa

SEQ ID NO: 405192 - DNA, 719 bp, Cannabis indica
ataaaattctaattatcctttcaaaaaaatttacaacaatagataactaaatctctaggaaaataggactaatatctcaaggaaatatccctattttcgtgggctattgggacagtcccgcaattggctctactgtttagaagttgtgcacataagttggctggaccatccctattttttagggtctggccagcctacgatcccttatggtcggctaggtattgttcctgcagcctcagtatgtgcctgccagctttttatgtgcttgctagcctttccatgtccctgacagcttttcaatgtgcctgtcagccttggtatgtgccagttagccttagtatgtgctagatagcctttctagcttctttgtacacttttccttgcaaaggtcagacttccttggttgagcaggtccttttttagggctgacagtacactctttggctgaccaacttatgcttaaaccctagttagtctacaagcttcctctggtcgacctatgaacttcccttggtccagctagcttggctatttagggtcttgacggtctacttaaccccttttgcttattgtttgatgatttttgctttattgctttaaacccttaacaattttcatgctatgtaaggagactttatcctattattgatgagttgtattccacttgtcctcagtcttaactatgtggacatgccacgtcagatggaaatttttggata

SEQ ID NO: 405193 - DNA, 473 bp, Cannabis indica
tgatgtgactacaaccccagagttacaccagagaaagtaacttgagacattataaaccattcaagaattccctaccggtccactacttttcttactgggagtccgagctttcgcttcagaagccattagatgccctgcactaaaccagaggaaacagactgctaggagatcttggggcgcgtgcatacaacccctaaagcttcccgaagctcaggagatgtatgtgcatcgcttttcgagcgtgaaatattattgggtgtactggatgtccattgggttttataccctaaataaaacatatttcaatataatcatatttactaattaatgtaagatcagaaatcactttaatgttgcatggttcacatgatttatttcatgattatatttaatgtataaattatattaagtccaaaatatatatatttattcatgataatagtgtcgtcagcacagtggaatataatcatgat

SEQ ID NO: 405194 - DNA, 594 bp, Cannabis indica
aaaatcattaaacttgtgtggacacataaatactcaaaacatctaataaactattagaataaactaagtaaaaaagtaacaaaatcaaacaataataaaaaatatatatataataaaaaaaattaaatacaaatgaagaaaataaaaccttgttatagacaatattattttgtaagtttttgaaaaattacagtatcaaaaacaattagaagttttatgaatacgtgtggtaaattagaatattaaaaattttattttgatattgtaaattattcaattatgttaaaaaatttataggttgtaatattataattataacatagattactataaaaaaaatatgagaaatgctaaagggcatttatagtgcctaacaccttgtaatattactattggtacaatttaatattgagtctcacttattataatttaataaaaattttgagaaccgctaactaattataagacgttatgtgataaaggtgcgaaacatcttagtgtcccataacattactcaaaatatattctaacatttgttttcggggttcataacacccttctaaaaaaatctaatttcttttaattaattgttaa

SEQ ID NO: 405195 - DNA, 597 bp, Cannabis indica
aaaaaaaaaaagtgcagaaaaatgcaatcaaaatctaatttttgggaaaaaattaacgaaacatacacaaatatgtagatctgttaaaaacaaactatatataatttggtaatcggccaaagagagaacaagagaatgagagatgagtggtgctttgtggtgagtttagttgatcttttatgggagagagaattggaggaagaggagagagaatgagagaagttaaaataaaaaagtgaataataacatatttttcttatgtgtttaatgagtggattaattcaaatccatactttacatttgaatatagtaatccgaaattcttatatcggctcgtttggtatgcaggattggactggactggacaagattatattatgctgaaagtaatcttgtgtttagtttaagaatagactggaatgttttatttatttccttctaaagaaagaaaaatttaaattaaaataaaaaatatataataataaatgaaaattaaaatatacaataataaataaataaaaatgaataatttgcagcaaaaaaataaaaataattaaattataaaataaaataaaataatatatcctatataatcaa

SEQ ID NO: 405196 - DNA, 556 bp, Cannabis indica
gacaagtctatgttcacgattcatgtattacacagtgtagaaataaactactatatattacttgtctttcttttttttgtttttttttttgttttttttttttaaatagagagttgttgaaacctaaataatcttcattttcatggacgcctttgtgctcaatccaagtcctcattgagaaacatggatgaaactatatctataaggtcctagaaaaataagagtgcaatgggaaactcatttctaattggaactagagataattattagaaattataacgttagacttgttattgtaattaggagattgtattgtagttatataggctaattagtaatttttctccctgaactttgacatgtaccaaattgagccatctgaattttttttgccgttaaaaatttctcccgaactattgagattgttagatttaaggacttttgtctaatttcattcaattttactgtttcagtgattgtttatatactaaaccatgctcccatatctaccaaattatgcccttaaactttgatatgtactaaatcatgccccttg

SEQ ID NO: 405197 - DNA, 883 bp, Cannabis indica
gtacatatacattttttttttgacactagctactacaaaaaccgacattagtgactctcgtggagagactctaaaacgttttagtgacacttcactgcctgttactaatgtgggtgactggaaagataatatttagtgacactcagtgtgtgtcactaaacctttttagaaaccctcattgtgcgtcactgtaggattttagagtcacactttattaaactgtaaaagtaacacctacccacgtggcgcgtcactatatctatttatttttttaaaaaaaatgagaacagccacattcaaagtatgtcactatatcttgtttttttttaaaaaaaaattatatattaattttttggatttagattatattgtaaaatttatttaattaattatatttgaataataataatagaattaaccatatatcaattatgagttaatatatattttaatttggctataaatttattaaaaagtcaacataacaaaaataccatacaataagaaaaatatcagccacatttacaacaaaaatatcatacataacaaaaaatattatacaaatttacaacaatttgtgtaaaagttaatcaaaaatctatacagccaaaaaatgaatctatagagcaaaaaaataaaaaataaatactccaacagtaaaataaaaagagtgcaaacatacatttcaatgaaaactaaaatctttaagtctttgaataaaataaatacaaaaattttgaacaactattcaatgccaaactcaaacctacgccgttcgaagctcacactgtcatccgagatgctgtggtgtgaagctcacgtaacagcgataagagaggcagtgggagaggtggagttgtggcccttttccgtcgaagagaga

SEQ ID NO: 405198 - DNA, 632 bp, Cannabis indica
accaaactatccatttctaacacatcatatatattgcacgaaataatataatcacttacttagctaataaaatagctttgttaaatatatatattaggttgatgttaagtgcaacgtataattagtttttttttttaattgggttcaattaggtggtattaagtgcaatacataaatgtttaatattttgaattaggtaatgtatttttcttttaatttttaaaatggagtttgagattttgatctttaagaatttttttttggctattgctacattagtgtcatttaaatgtgattatataaacgtattttttaaaattttaattttttttaaaattaggtttgtatctgataatacatatattgtaatttattatattcttaaccaaaactcacataattatatttatgtgtctctatatttaggttggattcgtaaatttgatataaagtttttttattcccaaactttatgaaaaatatggtgtgtgtctgtgtgtgtgaatctgtttaccaaaactaaaacgaaaaataatcaattctttattacaactatttcaatttaaaatataaaataaataataataaagttaaaaatatctataatatttcaaatttctttatataaaata

SEQ ID NO: 405199 - DNA, 502 bp, Cannabis indica
aagctctgggtccagtttcggataccaatctcgcgttcgagtctggttccatttttggtgccggatcacgagctcggtcctagcttcaatttcgggtcttcgtcgggtaataggtccatgtcctagttctgtttcccaggtccttatcccgattctgtgtccaggtcccggtaattgagtgggtttgggtcccgatctatgttcgggttcaagtcctagtctcggttcgggttcaggtctctatcttggttttgatctgggctcgggtttgggtttagatcctggtcctggtcctggtcctagtcctagttcggttctagttccatttgcgatttagagttcgagttttggtttaagttcgggtcagagttcgcgtcctggtctgagtttgggttcgggtcctgatttcagtctaggtccagatcaggctccgggtgcggcttcacgtcctgggtcttgctctaggttgggcccgagtcccaagttccaatcccgatctgag

SEQ ID NO: 405200 - DNA, 732 bp, Cannabis indica
cgaacggaagaaaggcaagttcactggtaataccgaacagcaccccagggaaatgacctcaagtttactgccttttatgtcctacagacgaccagagacaatatatgcaacaactcagtcatggtcccataccaagaaaccctactcccgtgaagaaggacataagtaaaagagatacatccaagttctgccatttccacgcagattacggccatgacacaaacgagtgcaataacctgaagcaggaaattgaatttttgatcagaaagaataacccacacttgtaaaagtatgccaaggccggctagaatcagagggtcgcccaaacagacaataaccagaaccaattgattcatccactagtgaatgggcatttacaagttattattgggggtccacatcctactagagactcgggaaaagtttgagaaaagtatacccgagccttgcagtatgaacaaaaggaaacatttttggccatagaggagagaaagccaaaaataccacgggtaggggaactcacaataactttcactgaagcaaatgataatcatgtccacttcccacacaacaatcccttggtcgttgaaatacagattgcgaataagacagtggcccgaatcatgacaaacaatggagcctcttcaaacattttgtttaaaacaacctatgagaagatggggcttcagcttaaaaatatccaatcccatgtacccaacttgtacatggttt

SEQ ID NO: 405201 - DNA, 510 bp, Cannabis indica
tttatagggtgcaaataaaactcataagaacctataaatttagttttgattctataaaaaaataatatgacaaacttaaaataaaaaaaaaaaaagacaaaacacaaaaaaaaaaaaaatgaagtaaccccagtacaataaaacagaggtgttaaaaaaaaacaaaaatcaaactaattaagtattgtaattataatattcaatcttgttgcccttgattttgcccaaaatacgtggaccagtgtaacgacgacacgtggagctgagaggctcaactcttaaagaaatcgactaagtctttggcaacaggagtgtcaacgagaagataactcccggagaagatggaagaaggctccacatactcccgaaggctagagccatgctagggcatctccgggaggtactggactctatttgaacagtcacctcgcatttaatgccgcatgggagaaaacgtattggaactaccataaacaatatgactgacggcgtaacccctcttttgtagct

SEQ ID NO: 405202 - DNA, 386 bp, Cannabis indica
atagttaattatcaactttttagtatttttatgtgaatttttttttatatatcataaataagactaattctgaaggtaagcgagtcaggcatgtgtcttgagtttttgaatatttagggttttgaattgtgaaaaaaaaaaacatattaatatttgatgtagtggtaaagagttttactttaaactaaaaagtatcaatttttaatctcttatttttttaaaaaaatattaaatgtgtagctataaaaaattaaactttcaaattttgaagagttttttatttggtcccgtacacattaagaccggccctaaagaagggtgggttggatactgttaacttgggcaaatatttaatatgaacacagatgaattaattaatgattaaa

SEQ ID NO: 405203 - DNA, 666 bp, Cannabis indica
acagcttgatgcattgatgggtttgctaaactgcaagggcgatagagagtgtgcgctaaaaattgaaggatttgatgaggctcttaaggcgcgatgacccacaaaatggagatgtgtttaagcaatacctataatcaaagaagagaagaaaaagtatctccgactagaaaattgacaaaatggagttgattctgtttaaccaccagtggcaaaaccagctggaatggttgttgcactctgtaaatttcaacttcttcttataataataataattctcatggggcggctgtttcgattgctgcgctactgccggcgggagccatacaacaaccaccaccaccgcaacaacaacctcctccgcagtctcaaatatccacagtacaatctcttcctattgctactactactactacttcctcttccagtctttgctcaatgatgtctactaaataatatattgttatttatttattgtacaatttaaagtaatgatttcttgaaaattttagttcattttccattagttcagatgtaatacatacatagtagtttaagcattacacacaagcctattttcacctggtagtgatacatatatatgtaatatatatgttacataatttttttgcaagcttatgatatattcatcaacactaaaaacacaca

SEQ ID NO: 405204 - DNA, 616 bp, Cannabis indica
tgtgtatattttaaaaactataatatatatatgtataataaataatataataaaagatatttattaagttcaaaacaattagaaaagttatactttacaatatcaaaattattttattaaatacgaaagaaaaaattaattaatagttactcatattattaataaaaatacatcaaatatataaaaaatttaaaaatttaatataattttaatatttaattaccactaaataaattacaaccgcacgcaaggcgcagtttgtttcctagtttatctatatagcatggggctccaaaatttatttaaagctaatttctcttctctctttaattctctttattttttatttttttatttggtttataaattttaattaattaattaattcattaattattgtatatatgttgttattatttttcctaaccttttattattttttattttttttattattaattcataaaaaaaaaattgttggaaaaacgtttttaataaataactaaatatatatatatttacttaataatattaataattctaaattattttttatttaattaaataaattaaaaaaaaaaagaaattattacatagaaaatataaattgacattt

SEQ ID NO: 405205 - DNA, 709 bp, Cannabis indica
tcgagctttcccgcacgtccccctggatctgcacgtgcatcatgctgcttacagcctgtatgggttgcacgtgcagcctcctggcagcaacatccccttgtgcgatttttgtgggatttttccacaaattccaaatttttcccaattttaaaacctaaaattcaaaataaaacattatttttaatatatttaaacttaaatatcaattttaaattaataatatttaatttttaataaattattattaatttttaatattttgaggtttaaatttaaaaattaattattttaatttttaaattatggtaagacttaaaaatttgttaatttctttaatatttatgttatacccgaaatttagccatcattttggaggacacgtgtcaaactaggaagaatacgaattaacaaatgtaatgataattatatttgaaaatagaataactcattaatgcgaaattgacaaagcatatttaaaacttgctgactgtaaataaaaatttaaaaaaacaaaaaaaaaaatcacttttaatatttttctaaacagtttttttttcttaattaatattttgaacttcgatcagacccggacctaaatcctcccatggccgtggcgctgaattcggcctctaacttgaacccgaatccgacaccggacctagacccaacataaataaaatcaaaaaataaaaataaaaatgaactttac

SEQ ID NO: 405206 - DNA, 918 bp, Cannabis indica
ttttttttcttgtagtttatatggtatgatatattcttggcgttcatgcataggcactttatgcagaattgtagtgttcttcacgtaatagagaaattgaatgtgtcaaaattccaaactgagccaaaaagagcatctgttacaggtcactttctaggtgttactgtaaggaataatatcatattttatgcttaattaatggaaatagaaaaacaaaatctttcacgtcacggttgaaaccctagctagctagtccaagcaaaactaatttaatatatatatgcatatatattatgtaatgatcattttggtattggcctccaaaactatacagatatgcatttatatgaattggcaaatggtgtaatacttcactattattttgttttgtatatctttgtccgttttataacttattgctagcactagttcatacttttatgtatagatatatatattagactaatagttacgtgcagtgtaatgcacgtatacttaggtttaaaataatagtccaatttatttaattgtcatcaacattcactaaataagtacagtactgcatatttatagttattgctaaaagtaacctatttatttgtaaactaactttcaaaaaaattatctaaaaatataagctgtggtagcactactacaaaaactccttttagaggcggttttttagccctttcagcgtcgattttggcgaaatttgctactgacgctgatcaggacaacgctaaagggttttaaacaatcgacgacatatgtactctatgcgtcagttcctagctaggaaccgacgccatagagtacatatggcgtcagtttctagcgaataaccgacgccatatatggcgtaggaactgacaccatatatgagcgtttttcaatttttttaatttatataatttattt

SEQ ID NO: 405207 - DNA, 849 bp, Cannabis indica
cacaaaaacataacatgacttagcaaacaacaacaacaacatcatcaatcaacacagccacagtttttacaagtatagattacatacaaaaatgatgatgttgaagaagcttagaattttaaaacccaatgctgactttaaaaattattaccaagaaaatgaaaagattagatctttaaagaaaaattaaaagaaacaaggtgaggttgtagggttatggggtgtggctgtgatgaaacatatggtctgctttatcaaatgctgggattgatttgcatatctatttatctactacatatgcaaatcaatctgtcaaaataatccataaataaattggttcaacattgttcttcccattgctaaatctttaagcattatttattaacttttgatactattaaatgacaaataaaaaaaatactgttaagtacaaaactaaagaaattagtttttttgatagataataaaaaattaaattaaaattttttttagatgccgaaacaatgtatcaatacatttacttttaagggagttcattgtggtatcttacatgagctttttttttacttttgtatttgactacttaatagtatcttttattttctattttatttgcctttaactacccaatagtatatttttgttttgttttattattttggttttgccaaaatttaaatgagattatatactacaaagtatcaaacacagtcacagactcgattatatactaaaaagtaaaaaatacatacaataatattgttgataaattcaacaaataaaatttttaaacaaaataggattaatatatactaaaaagaaaatataacatcaaaataaataaaaaaa

SEQ ID NO: 405208 - DNA, 584 bp, Cannabis indica
tcgtagaagaaatttttgatgtaagcattactgtggaagaaatgaaaaaacatttatccttttttgatgggaagttagttggtttgaaaaaggcagaaggtagtctattgaaaatataaaatcagaagatataatgttgaacttattagctttctatttttttgaggaaataaaatctttggacattttgttattaactcgtaggagaaatgaaagtttgaagatgacgcccgtccctaaagatgagggaagagtagaggatgggttgattaagagcaacaatgattgtgttttaggcaataataatgtgtaattaatttatcatgtcaataaattttatttttctctatttgttatttgttatgtgataaaagtttgattttaaaaaaaatgaaagttatttgatttatttgggagatgtgaagctagaattgacaagatgatataccataaaaaatttgttcatgataaggtggaagttgctttatttttgcaatacctagttttaaataccatattttaattttttataaacctttagtaatcagattgaatttatacaaagatatgatatttttgtcaat

SEQ ID NO: 405209 - DNA, 881 bp, Cannabis indica
cctatgaagtcttttgattcatagagtctaattcccaatatagcttcttctccttcgaagaagatttcatcaaactcatttttccaaacaaagttttgctttgaataggttacaattggctatgattatgttgataagcatacttaggcttattcatactccaactcagttactatgttagtatgctattttacactcaatgtttaaaaatgcatttttgatgcgcgcctcaagttgaggcatttaaagattgcaccaaggtgtgcgccttgctgaggagaagagaggtgtacgccttaatgagtgaagtgctgaattgaggcgtgaggcgttgaggcgtaagtggcgtgcgcctcaaattttgaaagttaaattggttatttgagccctaaaaaaaaagacccaaattataattttatatttgtatttccgctacccaacttaaaaaacctaaaaacctttaaaagccccataaacattaatgaaaaagtccaataaaatatttaaataagtccaaataaaacttaaaaataaaaattctaattctatcttcttcctatatccctctcttcttcacagcagttgtgcagctgcttatttcttcaaccaacaaagaaaaaaagaacttgatgcttccttccttcaaatgtgtggtaggatagtagaatttaggattctaattctagaaacataattatttttattttagtttgagttttatgagacatatctattggtatttttgaactttatgtgatattttatggttattatttttatgagatattttatagtatgtttaaaattatgtgacaatttatttatttttaagtgctttaaaagtattgattccattaatttttgaggcttacgcctcgcct

SEQ ID NO: 405210 - DNA, 504 bp, Cannabis indica
ataaaagaaaacctcaaaactgataaaattttctcattttgttgtagaattaaaacaatttgctcgttaatgtatacttaaaaatgtactgaagcttcgtaatacacttagtatcaaataatattgaaggttggagtatactaaaagtgagtggagatggtatccaaaatggagccttatgtgtcggaagttaaaaggtttgaggagttttgctaggttggttcttcactcgactgggtataaatctgggaaagagtttagggaatagaaggttttggttgttggatctagtaattctggtatggagatttctcttggtcttgctaatcatggtgcttgaggcttcatacttagttcatctaattgtaacaaaataattaaatatcgtttaaaaataattaattatttaaaaatttattataaaaagagaatcttaatttgtgtagaaagaagtttaatttttataaaaaaaaataaattttattataaatattataattaaat

SEQ ID NO: 405211 - DNA, 542 bp, Cannabis indica
tacaatcaaataagctcttgctactcttaaatggaaaagagctatggatactcagtttgatgctcttacaaaaaataacacctggtctttggttccttacatggatggcatgtgtgttatcacaaacaaatgggtttatcgaatcaagtacaacttagatgggactatggacaaaattaagactcgattagtggcaaaaggctttcaacaaactccaagttttgactattttaaaacgtttagtccagttgttaaaccatgtaccatcaggcttatctttactcttgttgcgacatatgattgggatatacatcagattgatatcaatgatgcattttaaatagagaccttaatgaaactgtatacatgactcaaccaccatgggaccttcatcctaattttccccatcatgtatgtaaactaaacaatgcaatttatgggacaattttcattacaaaaccaataaacctgaaaaagatggcttattttgtgaaagaatttttgggtctataaaaagtgggatttgtgcttgtggaaattat

SEQ ID NO: 405212 - DNA, 854 bp, Cannabis indica
gaaacataattgctattttttttgtgtacgaagctagtattttttctatagctactttctctttctttttcctattttttttttgttatttataatattgatctaattaaggtgatccatctttgtaagttattaattttgatcgcactattatattgaagaatatattaacattttttcatcatctattctactaattttttttttcaaaaagaataaatggactattatcaatttatcataattataaatgatttaatttaatatatgaaagtaaatgtattttttcagatatatttatttttcagcaagtatatatattttctttaacatatgcaataatctatatttaatagcattctatataataaatattaattttgtatcgtgaatttttgtttcttgttttttttttctttttgtttttttaacagttcaatttttgtttttattatgtattattgtttttttttttgacaaattttattatgtattattgctatatagatatatatttttgagattgactttcctggtgtcaaatcaagaaatattaatatttatttacttttatctcttatttccactgaaacggatatgcattcaacattttgtccaaaagctacaaggataatgtaatagttttttatgtagcaaggataatataacagtttgtttggtgaattatatctgatatttttagctctatttatattagatattgaatttttaatatatatcggatctaattaattttagctatcttaactgatctagtgctcattaaatattagattggactatttatccattgaatacatatgtatatatattagattgattcattacatcta

SEQ ID NO: 405213 - DNA, 563 bp, Cannabis indica
gggtaaatgaccattttacccctacttccaaaacttaagccatgggataacctagggcattctagtcattactaactttcccaatataacccactattcaacattttaacctcatccggtataaacccagttcaatataacttaattgccgtgacatttttgaccaccccgccaagttccacagttgccacacccgaaaatattttattcaaattatggtatctacgatacccacatattccaataaaatctccgtaattaataaattacactttatttattcatttacacaaattccactaattaactcgtaattagcttaagtaagattataatcttactctaatatccacataactacatatttaataaaatatggccaaataaatatcaataaaattttcgggatattacatgaatggttagatttgttttatcagaggtgttcttaatttcctatcacaagtgtcaaccaaatgaagatgggtaaagaattttaatattctcccactcaactaaggtaatgtgatacactctcaaagaactttaatggtatcattaac

SEQ ID NO: 405214 - DNA, 526 bp, Cannabis indica
ttttttttaatttttttgggtaattactcatttggtaccctatattttgttgaaaaaacacagttagtactctctattttagataatcattggtaccctatattttcaaaaactacacatttagtaccttaaatgtattttaattttttagatttctcaaattacccctattttaaacattatttgattataagccaaataaatttaaaataacttaaatgataataaaaaagtaaacatagctttggttaattaatcttttaagtatcgaccctctaaatacccaaataccaaatttgatttgaatcatgtaatttacttgaaaaattgagtttttgctaatgtcaataattattcaagaaaaatagtaaaaatttaattgtaacagtctgcagcagcagaatgtaattctgttaccgcaaaacacattattgcagaaacaaactagaaccagaacaaaaaaattagcaaaaataaaaaataacaacaaaaaataaaatcacttgacacaagagatttgtacgtg

SEQ ID NO: 405215 - DNA, 596 bp, Cannabis indica
aacacacccagaaatatacataattcaagtatattctctgttatagtgagtctcccgttgatgatgctaatccatcaacatctaagaccctcgtatattttttcctgtcattaccactaaggttttattccctagttcatacaccaccattgctcccttgcaatcatcactatcttcatacttggttgaccactctaaaaattattttacacttaattatatagttcgttatttaataaataacctactttatgatccaatattcgccaatcactcaaatacatgtctattaaattgcatctcaattcataagcttttccccattctgggtgagtatgcctttttataattgcttaataaagtaatcttttcccagaattttgatggtctccttatataccatattgactatccggtcaattataaagtactctccatcattaccgtatcaccttaagtaatttaggtaatcttctttaccttagtgataccactattcttcctgacgttcttttatacgttaccccggtaatgtctccacttcaagcctccattgggcccttattctcacagaatgatgcctcttatacacgagt

SEQ ID NO: 405216 - DNA, 456 bp, Cannabis indica
cctggaaaaacctgccacgccgttccttccacgcggtcccgctcgtcggttcagctccaaccaacgcctgccacccgtccacgcgtcagcctctctccctaatcctagctcgccaagtgacctgcagaaggaaaagaagaagaaaaatggctgattaaatgtgttcagccgaaaattacaaaatatcaatgtgcctggtgtcaattttaaaactattaggaatggctgattttaaaatattaatttaaaatccaaaaatccatatttttctcccacaacttaacacctaaatatcaactttatcttcccaatttttttcacctaaataaacattcctaatttatttttaccctatcttttcactatttttccatccaaacaaacatttattttttccaatactcttacacatactctatttatcccttctcttcccaacactaattaaattaatca

SEQ ID NO: 405217 - DNA, 740 bp, Cannabis indica
cttcttccttaaaaccagagatttagcttgcactttttcccttgttttcgccatggcaccagctctagagagctgcaaaagcaaaagtttccattatttattattcaatatactaattattatataaaacataacttaaaaaattataaaaatatactaaaatactagaaaaatacaaacacatattataaaatataaaatattaataaaaaaatacataatatacaaacacttagagcaatataaatttatatttatttaaccttttaatttaaatttatttatgctttaatttaatttaattaataataaaaaaataaatttagatttttaataaaagtaaaaaaaaaatattaattaaactgaaaaaaatataagaaaccctaaggaatcggttatttcataaaaccgactccatagggtccctatggcgacagttatttcatacccttttagcgtcactcgtatcagcgtcggtagcgaatttcgccaaaccgacactgaaaggcctttacaaccgcctctgaagcccatatttgtagtagtgatatgttgtaatttatatattctaccttttttatatatataatatatagtctatatatattgtatatatctattgtaatatttatataatcaatctcttattttagttattgtattatttttacaattgaattgtcatttatcttgatttatcttctattgatacataaaatctctaacaatcaaaagcttat

SEQ ID NO: 405218 - DNA, 567 bp, Cannabis indica
tagcttttgaaatgtgtgagcagatcaggtatttttcttaggcatgctatcatcttctccccctagcctcgtactccccagatacatgatttaccactaactgtgagtcactacagatctcaatatgttcggcttgtaattcccgaggaagttttaggctggtgataagggcttcatattcagcttcattattggatgccttaaacctgaatttgactatgccgtgctggtgctgccccctcggtgtgacaagggcgattcctgcgtcggacagttgatccgtagccgacccatctacatgtagcttccaggttggcttatctttactattgctcggctaaggtacttgtactggctctgggttactttttgaaatgctctattctttacctgtacattcaaccataaaatttgataaggcctgacctttaatcgttgttcggggctgaaagataatttcatactggcccaactccactgcccatttgagcaaccgtccagaggcgtctggtttttgcaatacttgacgtattggttggtcagtgtatacccgaacaggatgagcct

SEQ ID NO: 405219 - DNA, 612 bp, Cannabis indica
tttgccgcaaatttccctaaattttattatctgaatatggcaccgtgaactaacagcaatatgagaagcttgttgatatcatgtattcgtatgttctttattttatatttaattttacattcggttgaaaatttgtttaaatatatctccttttattcaaatagtttttgtgtttgtttaaatatctcggtaacagtacaataattaattatttaatttaaataattaatttggtaatcataaaaaaaatataattttaagactaattagaatttttgtcccctaaactttgacatgtaccagatcatgcttcctgaactttgatgaccattaaaaattctcactgaactattgagattatcgaatttaaggacttttatccaatttcattcaattttactaatttagtgattgtttattttatgtactaaatcatgctcctcagactttaatatctaccaaatcacgcccctcgtactttgacatgtaccaaatcatgctccctgaactttcatccatgttaaactttctttactaaaattagacaaaaatctttaaaatacaacaatctgctatcaacttcgatgtagcttgtcgttgatctccaaatct

SEQ ID NO: 405220 - DNA, 303 bp, Cannabis indica
ctgtagcagagtattaccaggatttgagcccgaaactccttctgttatttggattcttcacagtcttacacactatgattgaggatcaactttctatgggtggacatgcactcaatcactaaggctcaaattttatagttaataaggctataggatttcgaattagaaggaaaaaaagtagaagaagaagaagtctcaaaaaccaagttgtcagagagaatgaaaactaggtttaaagcctttgaagcattagttggataatgagaccattcttttctttttatactaattcacatagggtta

SEQ ID NO: 405221 - DNA, 641 bp, Cannabis indica
agaatatgattagaaaaagataattgaatttagtatggggtaacgtgtagcatagaaataaaaaaaaaagactcaatgtcactgacgtgacaacttaagacaagtaaaattaaagttttaaaataaatacagtaaatgtataaaacataccctgtataaaagttaatggtaccgtgtaacagaataaaagtaaataaattgataatttcagtatagagtgtaaatttctctctcttttttttttttttactaattttgaaaaataccatatttattcacaataagagccctatttttttttctatagctcattaaatttgaagaccaaccgtagtaccacatttactaaattataattataattgaaataatttatgacatgttttttaaaactctaattagtatttataattccatgttgaacaaagatacaaatagagtagacaaagatatgatttcataatttgttttatgttatttacttaaattgataagaaagaaatataaaatatttcatattttttcacacttacaaaacagggttctaccaataacaacccaaaatatctgttagtacggacaaaataattagaatgttctctttataacttcatcgacagaagcctaccttttaccaacag

SEQ ID NO: 405222 - DNA, 588 bp, Cannabis indica
cattacttcctttgtgttcataagacattatgcaacatccttttctatatgcattactcctcaaggggtactgaattctttactgtttattaagtgtatttgaatatacagaagacatatatccaattctatccaaaattggaattgagataacacaattgagaactttcttcagttgaataactttccaatgctttttgaaagcaacaaagttatgtatcttcactgatggagcttaaattattatagatgggtttttacatccttctagaatagttcctccacccccaaagtaactaccatctcgaataggttatgagttagtgtagatatgaggattctaatatacacccttatcatttaacatataggtcactttcagagattcatccttgactgtctcctaatgttccttgtttgattacatcttagatggctcccactcaacagtaggagtctggttaaattcgtacatagaagtacatttaacctcttactgttggttctcagggacatcttgttgtgacatattatcttagtttgaaactataagttccttctagactaagtcattaacatagcattcta

SEQ ID NO: 405223 - DNA, 608 bp, Cannabis indica
tcttaacatttaataaaatataccaaattaaaatattaactttaacagaagaatataatatattattagcacacttttaatagttgcattcttctacataagaagcaaccattgaaaatactacataaacacttatttactgaagtattaatattataaaaaccacatattatttaacacactactacaagcaaagtcatctattccaattttcactaaaataaaaagggaaatttgaaattttatgcttatattaggggaaattttttctcttaaaccctaaataccctatattcgtaagatgtgacatcattttgttaattcccacattaccccctcattcaaacccctctctctttcccctctttctctctttctctttctgtctcacaaacccccacgcgtccacgcacgcacaccgaactttgacggagactgcccacagtgtccacgccggccgcctacacccgaccacccccaccgtccatgcaagccgcccacacccaaatgccccaaccctcaatttttctttttcaatttttgacttcaatttttgtatgcttaaattcatgaaaatgattaatatgttgcaattttgtgtgaaatct

SEQ ID NO: 405224 - DNA, 880 bp, Cannabis indica
acagagagagagagagagagagagagagtattagggttatagtaaaaatattagggtttttgtatgttaaattgttgaatataaaaggctttgacccattttcctttcttcttcttcttcttaatttattttaatttatttttaaaaaaattaagtttctttgtcgtcaattaccgacgaaataattggttcttgtgcttcgttggaaaaccaacggcaaaaatatttgctaatctattctgacagttccaaattttgagtatccaatcgacgaaaatactcttttttttttttgttttttatgtagtagtgatagctaccaaactctaactttacaataggtgattaaaatcaataaaaaaaagggttatttgcggcaaaacctcttaaagtgggcaggtttttgcaactaacctcctaatctaaaattttggtggtaaaactacctaaaccactagtccgttagcagttagccatttccatccatttttggctgttaactgccatggtggaatgtccacgtgtacacagtgtacacgtggcacaattttattagtccacgtaataaatatttaaaattgaaataaaaaattatttattttaaaaataaaaataaaaaaaataaattttctttaaaaattaaaaattaaaaattaaaaaacaattttacaaaaataaaattaaaaaaacaaaaaccccaatttttctccttttcttttctttcttcttctttcttcttcttcttctccttcttcaaatctgtcgaagaagtctccctcgccacagacccatccaaaacctccgaccccttcttcgccttttctgaaacctcttgcaccgaaaacctccgacccatccaatgcgaatcatcaagcttcac

SEQ ID NO: 405225 - DNA, 515 bp, Cannabis indica
ttaaatcagataaaggtttagaattttttataggatcactcaacgaaatgtcctccaaatctccaatatctaattcttcctatcaattgtcatcttcatgttcttgaagataaaattcctcatgttcttgattttcgatatcttccagacttgcttcttgaatatattaatttgaatctttatttgcaaaaattaatttgctttgataccactgttggaattttaccaaaatctgcagtttttatcccaacacaactttaaagacacaaattaatacaagaattgcaaaaaaggtatttttctaaactttacctttgttgtgcatccacaacaaaattagtattatttaaaaaatggataattacataagggaccattttttgtaaaaaaaaaattacatttttgcgttcaaagaattttttttttttacatttttacggctttttatagaaacaacacgaaaacaacaaaaaactacataaaagtaacatgaaaataacatcaaaatgacaaca

SEQ ID NO: 405226 - DNA, 957 bp, Cannabis indica
caaataaggaatatgacggtagcccattctatgatggatgatggagcctcttccagcatcatcttcaagattgcatacaagaagataaggcttcatttgaaagacctaacaccctgtacacagctcatgtacgggttctcgagccaaggactggctcctctagggcacatccaatttccattgataataagtgaaagtcctgcacagaaaacaatcatgacttaattcatatttgttgatgtggcatttgcattcaatatcatgatagaggaccaaccctgtatgacctaaaagcagtcacttcaatttaccacctatgcatcaagtttacaacaaagtatggtgtcgggtgcctaaagggagaccaacagtctgctcggcaatgttacaacatcgctctttccaaaataaaaaaggaagaccttctcaccaagagctcaaacaacgagtccagccaagggcattaaggatctgcccaaggcgagaagactagcatagatccttattttggggatcctgcaaacagctttggaccattggcagaattagaagaagcagggatcgacctctccagctgaccaagaaacttaaaattggtcaagatttatcaccagaaataaaatctgaattaatcaaatttctaagggcaaacctcaacacttttgcttggtcgcgtgaagacatggtaggaatcgatctatcaataatttctcacgcccttaatatagatccaaacttccatctagtacaacaaaaacagaagctactagataaaaagcgagcacaagcattcaaagatgaagctaaaaagttgtgtgcaaataacttcatcattgaggcattcgaccttgattgggtttctaaccccgtactggtacccaagccaaacaataattggtgagtttgcatcgatttcactaacctcaataagacatgtccaaaggattgtttcccact

SEQ ID NO: 405227 - DNA, 178 bp, Cannabis indica
atagcactcttgagattgaacctaagcatttcagcattaagatcttttgatctaagatgaaccagtgatattcacatagaaagataaaaacggtaagattataatatatttaccaagatcaatatcggtcccagtccaatgtatactgtaatatcccagaaaataaataatatttaaa

SEQ ID NO: 405228 - DNA, 698 bp, Cannabis indica
atatgaaaaaacaacacgtgaaacaaaacatttaaatttttattttcgacactcaatggcggagctagccacatattttagtgggggcaaaaaaaaaaattagagtactaataatgaacattataattttaattgaaaaaaatataatttttagtagcataaatataaaaatatctaagagtgaaaataaaaaatataaattttatgaagataaaaatgaaaaatataattttatagggacaaaataaaaaaattataaggatataaataaaaaatattaattttttgagaacaaaatgtaaaatattaaaaatatgtatataaaaaagtaatcataaaaagttgagaggagcaaataatcccacaggttctcctttggctccacttgaaaaatgcacattttattgatcttaaagtttaaaataaattaagtttaatttaatattttcatgaaattaatgaaatacatttttatattgaaaatattttatttaaatttaaattattgttattttgtaggaatcaaagtgtgtttttgatgaaagaagaaaaaagtgacaaagctgaaaatatagaagaaaaagtgcaaaaaaaaaaagagaaatgaaaagaagaaaaataaagtaaaagcccatccaaaaggcccagtccgcctgccccatcagctccaagcggggcctttctattcgtccaacact

SEQ ID NO: 405229 - DNA, 594 bp, Cannabis indica
aacatatcgatgtaggcttagccaatatagggccagacggtgaggtccgattatggaattgacactcaattttgtgatgggcccgatgggttccgatattgtttcggtgttgtgtctgatggtttatagatttatggcatttttaagaatttgtatcacttttttgtgagatttttgttttaaattgtaatttttttttaatgtatgtgacaagttcaactgttaaatgcatttgttatgtataatggtgtttgggagcttgagggtagagattgagtttataaccgggccgaaaatttgacatttgacatggatacgaatgtaagctactcaggtttggttgatcttttgtatgaagaactcgatgttgacaaactgtagtatgaattgaaattagaagtaaattacaagtacatgaaaggcttaatgtatcgcctcgaagttattagaaatgataagcgtgcaaggttctttttgtctacacttacgaagaagccagatgaatttactcccttgtttgtgactatattaaagaagaatatttttattgatcctagtcccacaccaagttctgttaaggacactcgtagcgag

SEQ ID NO: 405230 - DNA, 587 bp, Cannabis indica
tattaattaattaacttttaataaattaacgatgttacaaaaaatgtaataaaataaataattacacaattttatacaattttgtaaatatttataaataatttttcatatttacattatataataaaaataaatataaatatttacaattttaacgtattaattatttttaattgatttccttaaaaaactcataattaactataaaaatataaattaatatttatattttgatatattactaaaataatatatatatatattataatttcatatcaaattaataatttatatacatacaaacatattcataaattttatttatgttttataaatatatattaaatatagtttttatcacataatttcaataaaatttataagtaagtttaaaataaaatatttacgtttatttttattaagaaacaattgtgtttataagttattcaaaaatatatttttaaaggataaatactattttggaccccgtgttttgtaaaagttataaattagactttctattttgttaaatgattatctggaccctgtatattcgaaaatggtaaaaatagaaccctgagcttaat

SEQ ID NO: 405231 - DNA, 550 bp, Cannabis indica
gcgcctccgtaatcttggacggacgggcttacccaccttgcgcccaaggcaccctaccttctatgaggaaccgccgtagcaagctcctcactgacgtagtccacgccctcaaccaggacgtctccgtcagcatcgactggctcccagcctcgttgtactcccgtagtttggggtgcaacctctacctctttctccttctcagaggaacttccaggacgaacatcgtcctacccctcaacttcctggacctcggcgtccccttcatgatcctcctccatctggacggctggatcctgtttggtactgggaaaagtggcgtgctgagccacttgagggtccgatgcgtcagccagatgcgtagttttctttgtacgagccatcattctatggctgagtacagggtttgaagaatgtccttcgctagaggaaggtggactagaacaaagatgaggatgatcctcgtgcagaagttgaagcaggtcctggtcgatccgatgttcgtcttcccaagactcacctaagttcatctacaaaagacaacgcacaagat

SEQ ID NO: 405232 - DNA, 301 bp, Cannabis indica
aaatgataagaaataacaaatatgtacatatgaccagattatttttacgtggttttgcaattaaatttgcatactccaggagtctatcttatttatgataatacaagatacaattgataatatctcttttcttctcaaattctccatccctttttctgtggaatttgtctctatttataggaatataggtttggcagtttatttacatggatcgatttaaaatgtaaccattcatgaaacatggacaattcccatgtttcatttaaatgcatgtgggattttttctttgcattaaaaagat

SEQ ID NO: 405233 - DNA, 640 bp, Cannabis indica
ttttttgtttaatttttgggattgggccctattttgtccgatggtagtgtccgattattttcatatttattgcaatgaaaaattctaagtaactttttggtgagatttttgttttaaattataattgtattttttaaaatgtatgtgacaggttcaactgttaatgcgtgtgttatgtataatggtgtttaggagcttggtggtagagattgggtttataaacggggcgaaaatttgacatttgacattgatttgaacctaagctactcgtgtttggttgatgttctgtacgaagaattggatgttgacaaagtggagtatgacttgaaattggaagtaaattacaagtacaggaaaggctatgagtatcgccctgaagttattggaaataataagcgtgcaaggtaatttttatctacacttgcgaagaagccagatgaatttactcatttgtttgtgactttgttaaagaagaatatttgcgtcgatcctagtcccacaccaagttttgttaaggataatcgtaccgaggttgggagttttgttccagaaacaaatccaaaggtgttggttgcagatgtattacctgaattaaacaatatgatgccgagtgctgatattgtagcacaaatgcccttca

SEQ ID NO: 405234 - DNA, 814 bp, Cannabis indica
gcgttaatcatttcaattttttctgcacaggtgatgcaaggttctcaaggaattaaattgggattaaattagccttatcagctatgttgctgctcgcaagtcagactaaggcgttagtagttgtgtttccttctcttggaatttgcctgagagcatagctcttgaattgtgcgagcagatcatgtatttttcttatataagctatcatttttctctcgggcctcgtactctcctgatacatgatttaccactaattgtgagtcactacagatctcaatgtgttcagcgtacagttctcgagcaatttccaaaccagcaatgagggtttcgtatctacttcattgttggaagctttgaatccaaatttgaccaccccatgcaagtgttacctcctaggtgtgacaaggaaatccctgcactagacagttgatatgtagctgacctgtccaccgtaatatccatgtaggtctgtcttcattattgttctgctgggattcttgtactggctctgggttgtcttttgaaatgctttctcctttgcatgtgcactcaactacaaagtctgctaaggcctgtcctttgacaactcttcggggctaaaagattatttcatattgacccaattccactacccatttgagtaaccatccagaagcatcgagtttttgtaatacttagcgtagtgcttggtcagtgtatactcgaacaggatgagcttggaagtaggtgttggaaatattttaccaggatctagatttactaacaagtatgtttcattaacatcctaatatgaatttctaaaataatgaaataa

SEQ ID NO: 405235 - DNA, 687 bp, Cannabis indica
tatagttatgatcgcttatcagatttgtggtagctaaagggatttaagttggtgtacacgatggatcttgtataaaaagtcaagagatttgactctagggtttccaggggactttgattcacttttcttgagtgtgggaacacaagagtgggtatcttttgtttttactctatcaaggaatgtaaagttacttttgtaatatatgagttggtgattgtaaattcgcattgattgataataaagttatgtgcccgatctttatgatccaaagaatagccgttcgaaatgtcttacgaactggtaaattttgaattcttctttttactttaatcttcataattcaaagtttttattcaatttaatagattagattcatatcgatgaaaacaacttacacaatataaaaaataatgtgcaaaacaacatattataaatatctttaatgaaaataacagtttttattttgtaaacgaaacttttagtccttaaaaatatttaaaataaccatgcgtccgtaattttgtaatatttttaattttttggttgattcattaattttttttaatgggtcagctcagatgtacaactggatgtaactaattttttttaatattatatagaatttataatagaaaaattctatagtgcaccccctaaataggggtttttttaataatatactaaaaa

SEQ ID NO: 405236 - DNA, 819 bp, Cannabis indica
atacttcccatttaagttacaaagaaaaaaaatacaaatactgatttctctttctgagagagaatacggatccctctaaagctataaaaaggcaaaataaaatcaatatataatactatatgttcaatctctctctatattactctgtgaaaacaaaagagatcagatctgaatgatatctcagatcctcttttggattggactgaaaactcgattatgaggtgagtttttttttgtttttgaattaaatctttcattctttttagatattcatatgagttatgaattttagaaatatcttttcgaacccaaaatctttaataccctaaattttcttggcccgtgagaccccaatttctccataggagacggatttctaaaacatagtaacactattcctctagtttatattattttatttttcatttttgtgccacagattgtatatacatacagtatgtgaatctagataacactagtcctttagttttagattcattaagattgtttgtagttggtttgtttgagaatttatgcttgtttctttttgagttagtgaaagacctatagattttagaatttttgcttaaatgtttgcacagtgtgatgaagtttttgagttaaattttttaaatttagttttgagcctgggagatctcggtcagtgtcgtgttgggttgaaggctgaaatggtggatagttgatttcatcttgttgtttgttattgattttgttcttttttgggtgagctgatataataggatatagtggtaattttgttataggtttgttttatattgatttttgttctatttttgc

SEQ ID NO: 405237 - DNA, 806 bp, Cannabis indica
tttttttttttttttgatttctatacatctttcatttcctttgtttcccaacgacgaggcatggagaaaataaagtatttgaagagcgagatccagaacctaataggctagcgtgagattatgaccaagcaatggaatgatgccaaactggagaatagtcatcttaccaaagaagccgagaaggcgaagaggaaccttgaggccaaacttgaagtgctaagaaggaggcaaaggacaaggccaacacgtgccagaaactccaagaggaacttgatgtagccaaggtaacgctcaatgggaaagaagccgaaaccatcgaacgatgcaatgttgtgggccttcataccatctaccaggcctggatggaaaatccagagatggatacaagtttcttaggagattctgaggaggaaatccttgccttctatgagaagacgaagaaggaggaagaagatgtcgaggcagcagaagaagtagaatggtccaagtctcctactatgtagacttggtttttatttattttttattttatctaggtaaatggccttaatgctgagacaatggtttgccccttctggcactttttgtaaataaaaatttacaaggttggatgaccaactttgctattgaatgcttcgtacttttatatttgaacttaatacatctgtttgtttgcgtttttattcacaacttaaacgattatattttgatcaaatttaaaataatttagggatttccattgctcatatttttcttttgatattatttcaatagttagtgatctactatgtgtgcgagcagttatt

SEQ ID NO: 405238 - DNA, 608 bp, Cannabis indica
gaaggccttttttctcttgctctgccaaagtagtgccaagagcaaagttatattaaatatttaccatacaaaaaaatcagtaaaaaagttctactaaattattttagatattgttctctcttatagattgttttcttgtttgtttcctttctcaattgtatcaaataaaattaaaaattgcatgttatgtatagcccacattaccaaatagtaacatgcacaagaatacgatatatatttattgtacatatatgttttttttttcttattttaagagcaagatttcacttaagcaaccttataagctaccaaaaaataaaaaaaatggttattgttcatatgtatattatacatgcatgcatgttattatgctatatatctatcgagcaagaaaaaaaaaatacaatcgtacatataatctttgtgatgattaactattacttacaaggtattttgtaaccatgagaaagaaaacgaagcagactcccagaacaccactttcccatctccactgcaaataatcacacaattcacaaaatttaacagaacaaacaaaaataaaaactgtattgatgatgacacgtacataatttatattatagatatat

SEQ ID NO: 405239 - DNA, 933 bp, Cannabis indica
ttcaaaagcaccttaccgaatggaacctgtagaattaaaagaactgaagatacaactccaagggatgttagatctagggttcacccggcctagtgtgtcaccttggggagctcccgttctgtttgttaagaagaaagatgggactcttcagatgtgtatcgactatcgggagctgaacaagttaactataaaaataaatatcctttgcctagaattgacgatctatttgatcaacttcaaggcaaaacggtattttctaagattgacttgagatctggatatcatcaactgagaatccgagaagaggatatcctgatgacagccttccgaaccaggtatggtcattacgagtttttggttatgtcattcaggttgacgaatgcttcggaaacctttatggatcttatgaacagggtattcaaggattttcttgataattttgtaattgtatttatcgatgatattcttgtgtactctcggtcagaagcagaacacgaacaacatctttgtatggttctgcaacgactcagagatcataaaatctatgtgaagtttaaaaagtgtgagttttggctgtcacaagtatccttcctggggcatattgtcgaaaaagacgggattatggtagacccagggaagattgaagcagtgaagaattggcctagacccaaaacagtcactgaagttcgaagttttctcggattaccgggttatcatcggcattttgtggaaggtttttcaaagattgcaatgccgttatacgagttaactaggaagaaccaacggtttatatggtcagataagtgtgagggaagtttccaagaactgaaacaacgactgattatagcgcctattttagccttgccatcggatcaagagaagtttgtggtctattgtgatgcatcaaggcagggtttaggctgtgtgctaatg

SEQ ID NO: 405240 - DNA, 1105 bp, Cannabis indica
taaaataatttccaacacagactagtaagaagcttggccagaagttgaagcagccgcctctttcccatcataagaaacttgggccgcgcagtactcaaggtacatgtccttagcatcgcccaagtagtcgaaattggcctggggattagtcttccagaaatcgaagaagagctcgaggccagcattctccatagcattgaccttctccttcaattggtccacctcgacaccttgcgtccctctcctcctttagccaaagaagaacttaccgcagagaactcctctcatcctgaagactattaacttcagcagataagatctcgatggtctcctcaaagcgatcagcaacctcgaggtcctttgttagcacgaagatcttcttctcggcagcaaacagcttcttattggctttgccaagctcatgccgaacaggtccagtttccgccctggcctgctcaacttccttcttagccaaatccgcctccgccctcaaggtgtcggacagagccgtactcttggaagtgacagatttagctcgggagtaagtgtaagcaaacttcaaaccggcctccacaagggaaaaagttaacatatggagctaagtgtgaaaagttaaaagggagtatcaaaaaagctaacccttgtgagctcccgactaggcgcatattcccttatcaggatttgttgcgcggttgtcgtgggcgggaatatagcagtccagctcagccaggtaccccatcctggtcgagagtttagaggagtgcctctgaatcttggacggaggacttacccacctggcgcccaaggcaccctgcctcctatgaggaaccacctcatttagctcctcactgacgtagtccacgccctcaaccaggacgtctccgtcagcatcgactggctgcccaacctcattatactccccgaagttagggggtccaacctcttcctctccttccgcagtgggaggactgcccggacgcgcctcgtccagctcctcaacctcttggacttcagcgtccccctcacggtcctcctccatcggaaccgccaaatcctgttcggcgtagggcagagtggcgagccgagccacttgagcatcataagc

SEQ ID NO: 405241 - DNA, 520 bp, Cannabis indica
aggggtatttttgtcaattctaagatctcaactaatcctgacatttccaatggccaactatattgtcccgctatactaaaatactaagatgtgattctaatagccaaacaccgcgttccaatgttattgagcataaaacatgcaaaattgtgaaattccatatataacaaataaaaggcattctgaattcaaataaatctccgtaaactgataattcataacaaatatgcaagtttcataattaaatcctaattatttgttaattttcaaattaaagttaagcgatctttacaattatcccccccttaaaagaatttcgtccccaaaatctaaccgaacaactctggatattgagccctcatgtcagaccttaactcacaggtggcttcctccaccttgctatttctccagagtactttgaccaaagctacggtcttgttccgcaggatcttatccattatgtctaggatctaaactggctgttcttcgtatgatatgtttggttgcagctcaagatttt

SEQ ID NO: 405242 - DNA, 684 bp, Cannabis indica
ctcttttttctccttaagaaatcagtactgataattacaatattaattaaacaaagaaattaaagaagtcaaactttatataatccacaaactgataatgacccttatctcaattttttcttaattattatttatatatacagtttttttttcaccttagttcaaaacaaacaaatgtcttcgcttattaattgtttacgtcagataaaagtaacccattctcaatgaaatttattttataaatatatatatatatataaatatatataataactcatcataactatttatatatttatattgtaatattgttattttaaaccactttacatttttaaagttattaaaaaagttagcaaagactgccaagtaattataaacaataatatcattaagctccataataaaaatcaatacacgcttgcaatattttaattaagaaaactttttcaaaatgaacaaaaaaaaaaaaattaataagtatatattttatttttatcaattaaagttgaaagaagaaagctactcaagaactagcaaactttatcttttctttttctaattttcatatatctattaaaaaaaaagcttaatggataattcataatttgtttatgcattaaaaacataatctcttaggtttttttttttcatttattatttgatataatatatatatatata

SEQ ID NO: 405243 - DNA, 593 bp, Cannabis indica
gttatcgataattttatgcagtgctcatttagttggaatatcgatagcatatcgaccgtaagtcgatatgttgtcgaccaaattatgtagttgtttactgtttgataatgtcgacagaatatcgacatattgttgatgttatgtcgaccatatttaattttttgacaataatagtgctttgttatttatttttttagatggctcaactcataattccagcatccgagcattttactggccgcgtgacttatagaggcaccggaacttttgcgaaaattaaatctcgatttgaggagttcaacttgaataacacgacaaaggaaagccgtttcggcaacttttggaacgtcgttcccctgacattctcctcggtgttatttcacaagctgatgctgcacaagataaaggttgatgctcaggaggagttggagatgcagttttacattggtcagaaggagctcagattcggagtgcttgagtttgcactcattacaggcctggacttctccacggggccaacagaagaggagaaggctgcgtaggttgctcgctcagggtcagaccgattgatcaacaaatatttcaaccggtct

SEQ ID NO: 405244 - DNA, 851 bp, Cannabis indica
cgaaatcccttcgaaccacgatctgaacctccgactggctctagtagcaagtttcacctttctttgtttggcattcgaggatacattcacatggctaaatttttgaatttggctctgataccaattgtaaaggacactatctatttcttcattgatatgatatcgttcgctatgggcctaagccccgatgaatttatttttgggcaccttcctaaaaagtcacattctaataaaaatagtgtccatccttacatacctaagatccttcttattttttagccaatatgagactttaattgtatatctaatataaatgaatcactgagtactgatttttttctcacactatcggtcttagataattccaaagatcacgtgccctagaaagaaacaactaacaaaagttacaatataattcgaactctttaactcgaacaaagaagaataccgaccaaaacatcctcactactttaccacagaacacatgataaatgaaaaaaaagagatcaagttgataaaaatgggcagcaagtagtgagtttgtgtacatataagagaaacataggtatgaagtctattttgagcaactgccaagtttttcttcaaactactctctcaatttttggcactattagccacttctcgaagactagtcagctcactctccagagaactgatgttctttttcaaagcaatcacttattcttctgcaacaataacatgatattctacaacctcgagcttctcagcaagcttaaccacctttttgtgtttcttattcatggtgtaagcataacaaacacaaacctaaagataagaggacaatgtcaagtgatgttaagctagaagga

SEQ ID NO: 405245 - DNA, 578 bp, Cannabis indica
ttacaaaaaaaaaaacttacaattttgttttaaaaagaacattatattacaattctacagttagagcatctctgatcacgctctataaacttactccttagctgcctaaaatagggagtgatttaaaaaaaaatcaacactaactatgaaaaaaaaaaactctctataatagaaaatagatagagagctctcaaaatctaaaatctaaatataaggaacttcttatttttttgctaatttttttaatattattttaataaaaacactactacctttttcattatttcaacaaattaatttatatttaataaatttaaattgtaaaatattattaaaataattagatgctaactaaaatagagaatatggttggagcaagaataattaaaaatactccctattctagcttttagctattttaactaaaattttaataaaaaataaatagcatcattagaaatggtcttggtattatttttgggaaatttacatcatttactaacttttctaataatcttacaattatactgtgacacgctcaaaataacattttttactgttttttttttttttaattt

SEQ ID NO: 405246 - DNA, 568 bp, Cannabis indica
agaatagctcgttggatattgatactaagcgagtttgatataactgtcatgtatcctagagcgcaaaaaagtcaagccttgtttgatctactgacatgtttaccagacaaccatgaagaatcaatcatagaggagatccctggaggattacctgaagccatggtttgcgatgaagaaacacaagaaagatggacaataacatttgatgggtcatcaaccgctaaagggggaggtgcaggaatagtgttgaccaatccaacagttaagaatcatattcaggcttataaattatcatctgattgtactaataatgaagctgagtatgaagcacttattttgggaatgacagcgcactaagcatgtaagttagcagagttacgattagaggggactctaaacttgttattcaacaagtcaaaggggaattcgttgtgaaggagccatcattagcaatatatcgaacaatgtgttggaaatattttaccaggatctagatttactaccatgtacgtttcattaacatcctaatatgaattctaaaataatgaaataaacacataagagttta

SEQ ID NO: 405247 - DNA, 699 bp, Cannabis indica
tatccttaacttgtacggagtcgatgctgcggcggccaatagcctcgccgcggcgactgtagaaaagtgaaaaaacaggctttatgtagtccctcgccgcggccactggacccatttctttctacttcggcctctctcagtaaaatatgcataactttcacatacaaacttcaaatgagcttattcaagatgcgttggaaatccaaaaaagagatctaaaacttttatgttttgactttttctaaaatcggactaaaacatagtcgaatttaggcttgaagtttcagatttattttcttgcaaaattctctctattttatagattaccgtttttcgaaatttgactaatttatacattccaagtgtcgaaacttgaaaccaaagaaaacaagcataattatattctacaaataatgataaagaagaaaaataactataaaaaaggctaattaggatttttgcccctgaactttgacatataccaaatcatgccccctcaacttttttggctgttaaaaattcttcctgaactattgagattgttggatttaaggacttttgcccaattttatttaattttgtactaaatcatgatccctggactttgatatctaccaaatcatgcccctcgaactttgacatttgccaaatcatgccccttgaactttcatctatgttagacttttcttactaaaatta

SEQ ID NO: 405248 - DNA, 957 bp, Cannabis indica
ctttttttttcgttatctttttttctttttagaaatttctgttgcaatgaatgataatattttagccataactctctcaatattatttggaattggacaattcaagatgttatggaaagctaagaccgagatccaaaactttcatgttgagctccaagtctagttctacctgtaagatcgtcaaaattcacaattaaactccggcttgtaaaaccgagctcgtcggcttccactattttccaccaaaatatgctaaaagccctccaaaagactctaaatgcatgaatagtctttaaaaataacctaacaaattgaaatcacactaatcaataattcaaagaatcaatttaagaatattaatacataaattgatcatatttataagacaaatatggactcatcacaacttttatgagctaattttttttaaggattattatgtgaaccacttgaatttattttatgggttaatgtagttattcaatttcatcttcttctcttattttaattccatgcaatctgatttaattttacaattattgactaatcaccgatagttgttatttatgaattcgaatcaaaattctaagaagtgagatttgaatatgctttgattgttattgatgcaaattaatttaggacgaaattattgtagacgctaaaatctacaatgatcggaatgagcgtttgtgggcaccgacaacctgcggaacaaagacaaaggatgaccgtaaaaccttgggacaccggggtggtgccggccgaaggcactccgacggtcaagtcagtaaatttatagtgcgaagtagaaaagaaaacaagaaatgtaaataaatacttcctgtgtttatggttatgtggtgatccacggtcaaacctcgctcaccggaatgagaaagagtatgtcagatcgtagagaaataataagtttggtagtaaaactatagagagagagag

SEQ ID NO: 405249 - DNA, 571 bp, Cannabis indica
tcagcttgggtgatagaaaacactagagcaagtatcggttttttctctgctttcgattcttccttctttgcctcagggaaatctttcttaaaatgccccaccatgccgcacagaaagcatgtcttcccgttgcactctcccagatgatgtttcttacaacgtggacaatcagggtaagaataactctggcgtccacctctgggttggtttccacgaaatcgcttattctgcccagagccactagatgcaggggtaactttcctcttttgatctgtggtggaatcaccaccatccctaccataagtaggagtaggaaaagtgggggttccacaaatattcggagtcactcggggctcctgaaggaactttaccgtgccctgggctctcatagctttctgaaccatttctgcataagttgttgcttcgttggtagtaatcagtttgtaatagctcaatgaattccttccgcttagcactgtagacggcttcattataatatttggcgttgaataattcccggaattcttcccatgtcataacagtgacgtcccgagtgagggttatcaactcc

SEQ ID NO: 405250 - DNA, 555 bp, Cannabis indica
gaccatccatcagacattattgacactcacgttgatggccatgtctttttaatatcctcatctatagtgtcggtagtgtttatctcttccttcaatatccaagtcctaagctcatacatactatgaggtttcaatcccctaccataatttccaatcgagtcacacatattgataaaggaagggctcttagccaaattaaaaggcgaagcattctcaaagaaacacctccttatgtccatgcaaacattatcaaacatttctttctcatttttgggagttaaatgggttttttcagcagctgtcctatcactaccatcacacacaaacctatcaattggtcctcttacacctctagcagacacgggagcactagtcttagtgtaataagatcctgactcaaccatctcttcgaatttcatttcagccacacgcgtttctaatgttttttgtttcacgagctccacaaattcattcttagtttcttcgggaacctccttacatggtgcaacacctttcctagtgtgagcaaggtgttgtttctgttggaaattattt

SEQ ID NO: 405251 - DNA, 533 bp, Cannabis indica
tattttttttaaaaaaaaataaattatcttaaaaaaatttatcttttgaaattatatatatatatatatattttttaataattttaaaaacattacattttttctaaataaaatccataaatatttttcctaatccactatatttcaaaaccgactctattaataacaatactctttttttcaaaaggtgatataatgaaacttttcccatatttctatttttatttttttgttgaaatggaatattttatttatttatttatttcaaaaaagctatataatgggccccaaaatgtagtagtacccttttgctgttatgcatttactgaatttccattaggaaaatgagagattagtatatatatacaaatatacaaaatactttctattctactttgtagtttgtatttgtttattattcattattggaaaaacaatgttgattggttgagaaactgtgtccactattgacaaaaaaagtataaaaaagaagaaaaagaagaagataatattaaataaataataataaaaaa

SEQ ID NO: 405252 - DNA, 364 bp, Cannabis indica
taaaaattaacaattaggaagacatgacacatacaaatccacttattaataacaatcggatttgatagaaagtaaaaaaatagacaaaatttaagtacctggttttatgcactattacatgcgcctcagtatttaggggagaggcgtacgcctcagacttgtgaggcggtaaaaaatcgcttgaggcgtaaaaacatgtgaggcccatgcctcaaaagaaaaaccaatactataaggttttatcagcccattttcatttaataacttaaaaaaaagcccaataatacaatttaagaaaaagaaacacaaatttaaagttttttatggcattcctcatgaatttttcccatatttgtaagttttc

SEQ ID NO: 405253 - DNA, 1044 bp, Cannabis indica
gtctaattgatgaatatgctcccaacttcagctcatcagtcattgattatgatatgttgactccaccggatcttgaaagggaaattggtcttacaggtacttactatgaatataagatgaaatttagctttagtcatagggtaagagagagagaaggacgagctttataaaatgaataaaaggacaagcttgataatgaatgaaatttgactgacctaatgtgcggccaagctacacatttgaattttgcagggtctaacccttaatactgaaatctgaacaggagggaatatcttccatggggctatgggattggattctctgttcctcatgcgacctgtaaaaggatggtaatatttggagcttagttttatttcttatctagttgtttgtaaaactaaaagcttgtatgtttagcttttgttgatgtatatttttttatgttgttggtcgttggatgcaggtcaaattataggacgccagtacctgggctttatttatgtggaagtggggcgcaccctggtggtggtgtgatgggtgcaccaggtcgcaatgctgcacttgcagctattcaagatatgaataaagtatagagatgatgtccaatgttttgcgatatatatggaacattttttttttgtaattgttactaaataaagtataaatatttgttttaaaaatattaaacaattagattttgatatttgaatttttatatttaatttagttaattaaaaaaatatcaaaaaatatttctatttactctatataaaaactaagaaacaaaccgcgcttcgcgtgcggttgtagtttatttagtgataattaaattataaaattatattaaattttaatgtatttttaatagtacgagtaactattctattaaacttttattttttttcctcttaataagataagaaaaataaattatgttataaattcttaattattctaattatttgggactaaataaatgttataaaataatataaaatagatgagaagaaagaagaaaaagaagagagaaagagaaagtgaatg

SEQ ID NO: 405254 - DNA, 536 bp, Cannabis indica
gtgtacttattattttatagggtacacatagaactccttataaaataattagaaaaataaaattaaataatagcattccaaacaaagaaatggattccattggcctttactctttttccaaaccaaaaatcaataaatcaagatgatgaataaatagataaataataaaacttgactagttgttgagaaggtatttgctagttcatttcctttaactataaaataatatcatcatccaaaggtgggaccaacatctctcaacaagactctatataataaccaattaagttatactaaaaagaagaagaaggaccccatcaaacccatcatagaatcataaagcaaatatatgactcaattttatgtccttttccttttttcaattttgaaaagttggtcaatttcatccaattaaactaatcatatcatgtgtccgtacaatataaaaagtccttacttcatactctagtctagtctacttgcatcataagcttatttaggtgtaacatagtatgaagatttttcttccatttttt

SEQ ID NO: 405255 - DNA, 715 bp, Cannabis indica
taatttttatttttattttcattcacaattctatttttatatttttattcatttctatggaatgtcacttaaggattagtgatttgtcattcaaatatgtatcgaatttttacataatttttatttatgttttagattttatacaattgtatactagttatttttttcgactagataattatttaggtggcgtttaattgaatgtaatgaaatggaatggaatgaaaagaaaataatttttattttatttttttagttgattgcattttaaagtattggaatgtcattttcattgttttgatggaataactattttattttaaaattaaaaaaaattatcattttaatgtaaaataagaaataattttgataatttttttaggctaattaggatttttgccccctgaacttcgacatgtaccaaatccatgtccctgaacttttaagattgttaaaaatgctccttgaactattgaaattgttggatttaagaatttttgtcaaatttcattcaattttactatttcaaagattatttatgtactaaatcatgctctcaaaccttgatatctaccaaattatacccctcgaactttgacatgtactaaattatattctctaaactttcatccatattatactttttattaaaattagtaaaaaaagtccttaaaatcctaacaaatctcaactagttcaggggtattttaacgac

SEQ ID NO: 405256 - DNA, 624 bp, Cannabis indica
ttatgaatatggaaaatagtattagcaatttatggtagtcttttggactttcaaatgagcaattactaatattattaatattgatgatgattatattattgtattatatagattaaattttacatatatcataaatatgagaaggttgaagagtatttattctatataaaatgtgactataactgaattattggtttatgagaaattatttggtgacttttttttaacgtgtttttattttaaaaataaaaattatgtaaatattttatataaagaaattttaatttaaatttaaaattatgtaaatatttttttaatgttattttaataattaatcttttaaaaaataagtatatcttttattttaaccataaaaggagaatttaagttagagaattacattctaccatgtgatgataaacattccacgctcgataacttcttttaaacaaatcagaattgaactaaacccatcttcctttctttatttatgtagctttggtaaaaatttaagatcgaaaatcagaactgaacccatcttcctttctttatttatctctcaaaatctcttattgaaaccacccaagaaataaaaaatgaagaatatagggtgatgtatatgta

SEQ ID NO: 405257 - DNA, 724 bp, Cannabis indica
gtttttaatgctttcaatattcaaatagtttagtttctaaaagaatttttcttaatattcaaatatttaaatagttttgtttttttgttatataggtattaatttttttttaatatttttataatattttataaaatacaagaaaatcatataaagtaataagaaaacaacatcaaaataacataaaaaaatagtatacaaataacgaaaaaatcaataacaaaataataaaagtacattataaaaatacatcaaaagacttttatgtaaataaaattataaaaattatataaatatttaaattttcgtataaacttatttttgtaattttttttttatgttttttttttgaaataatctcttattactatatacgaaatacaatcatataaaacaattaatacattataaatatactataaatattttggatttttttttacacttttcttttgatattttataaaaattcacatagtaacccacctaacaatcaacctatcaattataaaaattacctagcaacttaaattctaaatttgaaaaaaaaatcaaaaaaattatatataaggtaattttctaaatatttttttaaaaaaatatatatttaaatattaagctctgatgacatgtttactaataagtaatgagaattaatggtaaggtaatcattctcatacatttgtttagaacttcccccaccaattttgtaaggaatgccatt

SEQ ID NO: 405258 - DNA, 776 bp, Cannabis indica
ttttcaatatattttttagggccccgaaataaaatttcactgtatacccattttattttatttcttttaatttttacctttatttttatattctgtaaaatatacccacttttatagatatgatgttctcattaaatttagaccgtgtaaattatatgttaaatttaagtagaaagtataagtagattgggcaacatactcaaaaagtaagtatattttaatattatatgctaaaatataatataaatgtatatttgattaatagatataaaaaaaatgcacttttcaataatttgtcttaggcctatatctcatggccagtccagcatagtgttgttcattgtcaagatgttccatgactaagctagtaccaaaatcaaatcattacacaagaaatagcttgaacatatatattattattattgtaactatacaaattcttttggataccatggaatataaataacagtagaagtaaggtgacatttggttggtggtaatgaaatggaaaggaatggaaatgaaacaatttttatttcatttctttgtttggttgcattttaaagtattagaatgacatttcaatagaatgttctttccactattttggtggaatgactattccattttaaaaagaaaggaatgaccatttcaatataacaagaaaaaaaaattaatgatttttttatcaatttttttaaggcattttaaattttattccattcaattcttatttctattctcattcccatttctattcctatattttcattcct

SEQ ID NO: 405259 - DNA, 548 bp, Cannabis indica
tatatatgtaatgaataaataaaagaataaataaatataagtaataaataaaagaattacctacaagaataaagtttattaatattttttttattttcctctatttttatattaatttatttactattatataaaaatattatattttttctgtatgaatataattagtacaaatatatttgatattacaattttatgattattagtcttttattatataatgttgttcattcgatacaatctgcactaagtgcggatttcattttttggatccaatccgatccgcacaatagctcaaatccaatctaatctaatctgcaaaagtgcggattggatcggttactttggattggttattttttaatattaaattatttaatatttatgaaaaaatatttttttttcacataactagcaataaaataaaataaattatagttattttatgtcttcaacaacacattaaataaataaaataacaaataacaaattcaaaataagaaaaaaaaattgcatatataaaaaaatatttaattttatttgaaatt

SEQ ID NO: 405260 - DNA, 887 bp, Cannabis indica
gatagttgaatgttgagacatgtggaccttacacattgcaagttcaccctggaggaacagttgagatcggtggcgtagtggacttgcacttgcggcttgttccaaatcatgaagtttccttatcctcatgcatgtgttgcaggtcagcaatgaagtattagcatgtatgcactatgctcgccatgttacacaacataatattggaggagcacatatgaaggcagaattatgccagttcgtgacgaggatgattgggaatttcctgatgacataaagaacatgacagttggagtgcctattgagaagcaattagtagggcgacctaaaaaaaaaatggttggaagaattaagtcaaactgaactgcttgtaatggtgaaatgattatcataccacaaaattgtgggaagtgcggtgccaaggagcacaacggaagcacttgcacctaccaaggttaaaaatgaatttttaatttattcgtattgtgatttgttgtgttattatgtattgttattgaattcatgttggactttttaaaacattaaaatttgtggtattttattttttaataattattataatttgtggcatagctggaaggcctaaaattgttatgaaataatacgccaccatcaaacactatcggcctatgtatcatccactattgtccttttacaaaaacatatgtttaaaggaagaggtttcaatggttacatttttattgtaaccatcatggttacatttttttaagccattggattattattaaatggttgtgattaatttggaaattaaataaaaataaataataaataacttgtaacctgaaagtgacctaatcatttatttccttataaaactttaattaagattaattatattttaaaat

SEQ ID NO: 405261 - DNA, 505 bp, Cannabis indica
ataagcacacatttagtgggatttttttgatctaaaacaacttcttctagttcctcgattggtttcaattatttttttttgtcttgaatttgaggatctagatcttcttcttgcttctcaccttcctctgttatgaccaccattaactgatggttggcccttctattctgcagttttacacgatagcatttgcgtaccaagagttggtcacctcgcactacacctacacttgccggtgtttgaaacattaaagagaggtttttgattaaactaattaccccttgtccaatcagtgcagtgcgccccattagtatgttatagacggatggtaggtcaacaactagaaaatcttgcatcaatgttgtgtttaatggtggttcgcctatggttaattggagttcaataatgccttgactggcaacactatctctagtaaattcgcacaagttcaccatgaaaggttttaattttgcattttgcaatcccatattccttagtttatcct

SEQ ID NO: 405262 - DNA, 504 bp, Cannabis indica
ataatatttaataatatataatatatatatgttataattatttgtcaaaattgattattatgtatatagttatttcaaataaaaattagtgtgactattattaattacctcacataattaaaataattataagtcacttgcccgattaattaatttaaaaaaacattgatctcaattaatgtcattatagttttattttagagaattattaaaaggtactagtagtgtcatatcgttattggtgtaattaattgtattatatcttaaataacttaagaaaataatttttagggaatatcgctaatcaatcgtgagacgccacatataaaaggtatctggtactcaataacaatgctctttatcttaagaggcattacaaaaaatcttttttttagttacaataaaatttgtgacaaaatataaaaatgtcactacaaaaaaacccattttcaccgactagttttttggtcattaaaactcgttatttagtcacccaaaattttt

SEQ ID NO: 405263 - DNA, 1326 bp, Cannabis indica
agcctggaatcaaaagctcaaatgtacaatttacagcaagggatttcagctgtcaaaattcgataactcgctgttttttcaaggttctggacaaagtctaatagtgttgttagtgtatgttgatgacatactaataacaggtcctaaccccactgctatatctgatgttataacagctctcaatcatgagtttgatataaaagatttgggttcactacactactttctcggggtagaagtacatagaacaacatccggtttctatctctctcaatctaagtacattacagatctgttggctaagctcaaaatggatggtaccaaaccatgtcccagcccggcaagttcatctcatgttttgtctctcactaatggagaaccgtttgctgatcatacgctctatcgaagcacattaggggccttacaatacctcaccttaacccgacccaatgttgctttcattgtgaataaattgagtcaatttattcatgcccctacaaatgtccattgggatgcttgcaagagattattgagatatctcaaaggcacaatacatgaaggtctcctcattcgaccagctccaagactttgtttacaagactactcggatgccgattgggcgagttgcccggatgatcgaagatcgataggaggctatgctattttcctaggaggaaacctcatctcttggtcagcaaagaaccaacagtagtgctcgatctgcaccgaaagcgagtttcgtgccttagccaatactgcagccgagatcaagtggctacactctattttgagtgaacttcaagtgcattttcctgctgctccaatcatatgggttgacaaccaaggggatgcctctcttgttgccaacccagtgtttcacaccagatcgaagcatatagagatcaatctccactttgtgagagatcaaattctggccaaagaaattgaggttcggtatgtgccatcaatcgaccaaacggctgatatcttaacaaaagctctctccgcggatcgctttctctatctcaaatccaagctcaaagtgtgctccactccctttcgcttgaggggggatgataaataacaaaccttttcaatacattgtattctgttatttcttgcagttgtacaggttgttagtttgtttttccacttatactctgccttaacagaggttgttatgttctgttatcagtccttttctttgtaatctttctctatataaatgaaaggttcagctcataaagttttagagcttttacaattccttgtgtccaattctatattgttctagttaggaattgtattgataagcatctctttcaa

SEQ ID NO: 405264 - DNA, 1023 bp, Cannabis indica
tgcgtgaatttgtaacaaccatatgtatgacaatctcgaagctcagacacaattagactgcaaatgacttcaaaagcaaatgcactcgacctcacccacctaatcctacatgcttgaccacgtactataaccaatgtgctgaatcacaagaaatatgtaccacaaggttgctgagcagcttgatttagagaataatttattttgtcctaggtcaggagagtggcagatattcaccattggaaagtttcagcatctggaagtccattaccaagttcattattgtgaaggccaacaagcactacactgtagttgcatgctatatgaaagtctggggtacccttttgttggattattgttttaccaagatctaaatttactaccatgtatgttgtttaacatcctaaatattaatttctaaaacaatggaatttaaacacatataaagtttaagaaaccttacaatagttgcagcggaattaaatgactccttccgctcagatctctaacccttgtatcctttctgtagaagaaaatcaccaagatctgagcccaattctccttcacttgaattggattcttcacagtcttgcacactatggttgagtaccaacttgttatgtgtggacatgtactctatcactatagggttcgaaattgaagagagaaagagagagagaaggatttgaatgagagagagattgaaggctcaaaatttttctaaaggcaagtgaatgcatcatcttttaatttgagaccatcactatctatttataggaatccaactaggtttaggtttgaattatttggcattaaaaaattgataaaataaatgataaaatggaccccaagtggccggccataggatgtgggcccattacttgcaattttgccattgttcaactatttatcttatttctctcaaaaatgtcatatttccaattcaaccacttaaatgccaaaattatttatttcataattaaattaattatcaaataaattgacatttaacatatttattaatta

SEQ ID NO: 405265 - DNA, 1097 bp, Cannabis indica
gtatataggggatggatatatgatgtgttaaaatggaaaaagttatagttcaaaactaggctaactattttgattaattaagtccataaatttttttattttgacaaatattaactttagagttatcattttagaatttgtttggaacatcttataattaggtcgtattgtattgtattatattgaattggattatattatatttttatgaaaaattatatgtagtatttaacttttatatatgaacacctaaatatataattaatattttaatataaattaacatattatataaaaatatgatatataattcaaatcaatataataaaatacgatattataccacgttccaaacaaaaccttaaataatactgactatactatatattcaattacactatatatttaaaatctctaatgtatatttggtgatttaatctaacgattagaacgcatagtatatatcaaatggaaacctaaaatacattccacattacaaagcttatagtacaaagaaaagaatgtatataatttccgttttttttttttttactaaataaaaattaaaaatacattcctaaatcataaatgggatataaaaacttattactacacactagaatccaaaacttggggttactatcaaatttctatggagcaatactgatgacatattaaaggttaaattttagtagtgtgttttcaaatcaataataattaaaaaatcaactcaattaaaaaagaaagtaaaatgaaataaaacctttttcccattatctctatagattattagtttatttgaaaaaacatatgtttaaattgaagaaggaaaagaaaaaaaaagggtaaaaagttaaatttcttaggccaaattgcactgttaccttcttgatatctattctatataaagtgtgtctatataaccgaattcttggtttatgagaaattcgtgggtgacttttatttatattaaaataaaataatttattattaaaataaaatggtttatgaaaaattcatggatcacttcttatttatgtataataaaataaatcccattaaatccaaaaaaaaaaaaaaacatcattaaataaaaa

SEQ ID NO: 405266 - DNA, 528 bp, Cannabis indica
aatgattcatgcatgttttgtggagttcagttgctgttgtggttgtgattgtttgttgttgatttctgaagttagaatatgatttattttgttgattcaagcaagattgtgttggtgtttgttgatttttactaagtgtggaattttaaacccaaaactatgattttcaaggtaatttaataaatttcgtggctgtagttgttgtaattgttggggttgttttcagaagtttttatatgcatgtttgagtagattcatgcaaagtttgatgcatgtttgttagatttaaccaagtttgagttttgaactcaaagcttggagctttaatggtggactttgattttatgcatgaagcttggttttgttgctttagaaaagttttttagggtctatttagtaggtctggaagttttggtgtgaattgggtttgatttgagtaagttatgaatttttgagtgtttcctgcttagaaccggaattaccagaattccggatggtgttcaggaatttccagaactggaattccgg

SEQ ID NO: 405267 - DNA, 892 bp, Cannabis indica
aaaatttttatttttaaatataaattttaatgtgaggtgagacatttaacaaaaaaaatattattttaaaaacaataaattaatgaaaatgcatgttttagaagggaattgctttttctgttgttatagggggtcgcattggtaatatcatttgtggagaggagtaagaaatgagttgttgtgggttaagtggccttaaaaattaagtagataaagtatacttgtaaaaaaaaataattaaaagtatgaaaaacagaatattaataatttggcccaaacatgttaatagagataatgtttcatggtttgagaaccttttgtcaaaataagtcaggacttctttcaaaaaaaaaaaaaaaagtttccaaaaaaaaaaattaatagaaattatataataaatttaaagcattttatttgtcatttatagcaaatagaataagtgtactttgaatgtagtcatcatatcatcaatatgaagaaaaaaaaaacattaaaatcagatacaatttcattgaaatagttatgcaaacctcttaaatttttttaataaaagaattaaggtgcagtttggtaacacttttgttttctaattttttaatcacaaaatgaaagtaaaatttttgtttttaaaaattttgcttttgaaaaataaaaatgtgttctgtaaccacttttatttttcaattttaaaaacagaaaacaaaagtgtgttgtgtaaaatttatttttatttttcatttttttgattttatttatgtcgcgtctaggtctgaggtcggatttgggttcaagtcagaggtcgggttcagcgacagggccatggggggatttgggtccgagtctgatcgaagtccaagatattgattaagaaaaataaaatgtttaaaaaaat

SEQ ID NO: 405268 - DNA, 534 bp, Cannabis indica
aaccgtccaactcaaataaattgttcaaaccaaattgaataagcagataaaaaatacaactcgaaataataccataaaaattcaaactgccaaatgaatgtattgggtggtttacaaattactttaaactgcccaattaacatgaataaaccgaattaagacgatttatatattttttaataaaaatatatatatatatatatattatattacataattacatttatttattaaactattttatatttaaagtttggacattttagtgtttaacttaaacttagaccataatagatagatacaattgaaattatatccttaatttcacatccattattaaatctcttatttgtttgttttatttattttttgcttagtttatttagtttcaaaatttatctatctagttgccaaatagaaacaagaattcaattgattggtacttacctatagtctttgtggaaacgatctcacttacctgagtattacttgttaaaataatatgtatacttgcgtgttggatttatcacaaca

SEQ ID NO: 405269 - DNA, 457 bp, Cannabis indica
tctttgcttataagtttcagctaggtcactaatagtgacttctcttattaagcttacaaactgagcaatataagctctttgcacgtcgtcccatgtgattattgatcctggtggtaattgtgtagatcaagtgaatgccatccctttaagtgactgcataaattgtcttatgagtaatgtatttgactgagcagattcaccacatgttgagacaaagtatgctagatgctctttaggggacccatttatcccatcaaactttttaaattgtaaatttatgtaatttggggatatagaacataatcataatgggccgaatatggtttatggtatccaagaataggcatattttttgtttcatatcattcttgaataattcgtgatgaggtactgaagttgatggtgtaggctcttttaaataaggttgtgtcggcaaagttgttgacacttgctcctg

SEQ ID NO: 405270 - DNA, 1018 bp, Cannabis indica
gaaagaatcaaaattattattattattatattttttactaaaaaggtttggaaaaaaatcaaaatgattttattttatttactttgttaaaaaagaaaaattaaattaactcaattatcctatatgaatctaattaaataaaatataaaataattattgtatgagatatattttaaagggtaaaattattttttaattttatcttgaaaaataaaattcttacccttaacaaccttgccattttcttcccatatctaatctattcattttttcccatataaatgtatataacttctaatattattcttataaatgaaaagtcaaataaatgtatataacttctaatattactcttataaattaatgaaattagattttttgtaaaaaaaaaatccataatttctcaataaaaatacactttcaaaaaaaataataataaaaaaagaaggtttttttttttttttgtaatggtcaaagaaagaaggtaaaagagaagactttaaactaaagtacatatataatccataaatgaaaattatattattcttataaatgcatacataggatatataataggatttttttcttcatttttatactttacaagtttttttttttttttttttacaaaaattttcacatagaaacacctatagtaactaacaaagcaacttaatcacaaccaaaagccatataaaaatccacataaaaatcactgaagaaactgccggcgcaacccaaactgtaaccacatgagaaatcacaattactagagcatcacaaactgtaaatttaaataaaaaaattaaaaaatagtatataaagtaatttttctatataatataatattattcttattagattattttttttaaaataaaataataaaatccataatttatctcaataaaaatgcacctttgttttgaaaaaaaaaatccataatttatttgaaagataaaagagaagctaaagtacataaattcataagataatatataagctaagtaaaatagtt

SEQ ID NO: 405271 - DNA, 387 bp, Cannabis indica
ttgtatcttaattatgtgagagtgtaagagtaatttaggtacaatactcataaaagatgtatatttgatttttttatgtaaatttagtaaatgtataaaaaaaaaaaagtaattcttcaacttctctcgaaaaaatatttttaggcctttattaagagtaaaatatggtattttttaaaattagtaaaaaaaaaagtgtaattttaaaaagaggattttttttgggttcctaagctaggtgagctctaggcacgacctgcttatatctagggtcgggcctatatagtcgtatacactgtagttacttaagacattctgttaaattttaagaaatttaaaaaatttaacacgtagaaaataatagaattcaaacagtatattacactc

SEQ ID NO: 405272 - DNA, 567 bp, Cannabis indica
ataaaagagcaaaaacccatcccttcatttgacttagatttgtacagtaacttctaaatcttccaatggattttagaacctgtctctgctgttccccaccataaattagccatcatcgattcccaattggttacaagtggttattgggattcgaaaatagctcataacaaaagtaggaattgattgcacaactgctttgagcacatgcactaagtacttttcccatactagtgttggtagggctaaaccgtaccccgagtactactgagtgttgtaccacatgcactaagtacttgtcccatactagtattggcagagctaaataataccccgagtactactgagtgttgtaccacatgcactacgtactttgtcccgtactagtgttggtaacactagatcgtagcctttgaacatcatatactctgagtttgtggtggtttgaggacgagattaaggaatttttaaataccctctcgatgaggacgttgacttcatttggtggggagggtttgttacaccccagtgaaccaagatgactcactgaactgttggattttatgccct

SEQ ID NO: 405273 - DNA, 447 bp, Cannabis indica
ttttcttttactttctttctttttaagaacatttagaaatactatttttatttttacatacacataatcattaatatagacaaaaatttcaacgattatgtagactaataaaatggtgccatgtggactcattataccacgtggaccattcaatttatgccacgtggattaatcaattgatgcaacatggaccaatcaattgatgccacatggaccaatcgatttctaccacatgtaccaatcaatttgtaacacgtggatcaaacaaggagccatgtggtgccatggctgaatgccacatttgtaccatgtggcaccataaatgaatgccgtgtcagctgtcttatattacaacatgtcatggcacgtaggtaaacacgtcatcaaatatgtaaagcccgcttagttaatttggaaattatcggttaattatgattaattatgaaa

SEQ ID NO: 405274 - DNA, 1120 bp, Cannabis indica
aataaattcacaacatacaaaaacactttattttattttatatgcgtataaaatataagaatcatgcctctaacacattatttaaaccttaattttaaagtgttattttttccttaaatttttcaaaattttacataacatttttgttgccgagattttcggcaaccaattaaataataaaatgagaagagctgtagaagctttaatgcaggtgctttttacgtggttcgggcattaatgagccttagtccacgagtctttattatttatgagagtatttttatagagaatgttcttggtaaatctctctctctctctcttctttactcccttcgattccttaatttatcgatcgacccctttttcattctgtctttggggtatttatagtgaattttgggagaatccctagaaagggattacttgtcttttagtgttagccccttaggggcacaacaaattcctagcagatataaaataggaaatacatgacctatgtcgtaggtatcttaaggattaggtgaatataatcttttatcctcccttgattgatgtgagttttcataatggagccgtcactagacttgtcgattgtcgtgtaatcgccgtaaaaagaggctcacgccatctgtcaaatcttcttctggagattctgatacgtttcctccatgcagcattaaatgcgaagtgattggtcgaacaatctctttcccttccggaaatgccttgttacaagtccagcctcccggagagtaaaggcgtgtctcatgctctcctccgggaggcccactccgtgagatgaacttttctgcctatgacttagccaatttttgtgaatggatgttctttgagatctacgtgtcgcacgcagtcgctaccacgtattttggaaaaaatttgaggcaacaattttaaatagctccaacaactatgaaaaaaattattccaataccgaaacaaataaaaatgtatcattatagaattttattaggacataaataaatttaactctcaattgcatataaatacctaagtttaatttttgacaataataatacttaaagtataattttaaaaatttctgtaagtacataacgattaattattaagtaaattatca

SEQ ID NO: 405275 - DNA, 626 bp, Cannabis indica
caaaaaaaaagatcaaatagtctgtatccagaacaaaaatgaaaaagaaacatatacacgtggcctaaacccacaattcttaattaattaatttagttgactatttagattaaaattaaaaaaaaaaaaaaagggttgtattgtttctagatattattgcttaataagacaaattaatattaaataaaaaaaatggtttgaaagtgtcaaagtaggggaattgggtccactactagtacacaccctagtatacctaaattaaatccaacttataattttttagacaaaaaaaaaaaaaactcaaacttaaaaaaatcacattttaaaatattagttttttttgaaaatattgacatatgttttattaaaggttaagtatatatacctaaattaatttgtatgtatattgatatatgatttaatgtatcaaatgatttggtaattaattattaaaggttaagtatatatcaaatcaagacaaataactttaattttatattggttaattatatgatatatacatacaaatttatttataattttatatattttattaattatgggaaacatatttttaattatatatataataaaaattaataataaacaaataaatattatataaa

SEQ ID NO: 405276 - DNA, 974 bp, Cannabis indica
ataaatcagttcatggactctccaaatcgattcacaacaataaaaatttaaaattattccgttttgatagtatgatttttgataatattattataagattccctttaaataatactattttggccttttaaagggagcaagctctaattgcattgaggtcaatcaagggcaacgatctcactcagctaattgccttttaacattttatatatgattttaattttttgatgcttagaagaggaagtaaaatttgagacatttcaagaagaatattttttgtacaaaaaaaaattaatgaacgaaaaaaggggagaagaccagcgatgatgatgatgatgaataaggaggaaaaaaaaaaaggttatatgagatgatgatgaataaaaattattttttaacaaaaaatatataaaaataatttggttggttattaatttttttaatatggtgttagatttttttttcttttttttttgaaaatgaaaaatttattaaactacaaacaaatacatataaatgggtggttaaaaaaatgtatatatagtatagagacaaaaatataatcaccgccataaaattattttatatatattaacttatttattttcagagtcggattccaatttaacccacgtatacgttgcgcaataatttagggcaaaaagttagctataaatagagatataagttataccaatattcattcatggccttcacaaaattataacatatgtgttatagagctatagcatatatattatatttacatggagaaactaaagagttttagttatcttaacaacaatatagatttagctatgaatgaagagaacaacacaaaattactaggagctcaagcccacatatggaaccaaatcttcaatttcatcaattccatgtgcctaaaatgtgcagttgaattaggcataccagatattatcaacaactatggaaaacccatgaccatttctcaa

SEQ ID NO: 405277 - DNA, 541 bp, Cannabis indica
tctttaattctgtatatatttaaaaattaataaaaaattacaaaattatcaaacccatcaacttaaaatctaaatcatatgttaataaaaaaatccaaaagaagagaattagtttgttaaacacaaaaatttaaaatcaaattaaattcaaaacctaaaaaatttgagaacataaatctctaacccctaatatcacgttcttctcccccttcacttctgcaaaccagaaccggtttcaggttcttctctcttttgcaattcaagggtcctgcgaagactccttggcgttcttctctctcatcggcgtcggcctgcgaagactcctcggcgttcttctctctcatcggcgtcggcctgcgaagactcctcaccattggagcagtcctctttcaccatagttcatcctccttttactctttcctcgacaacctgggaaccagaggcatgctttcatcttctctccttgttcccaaatcgtaagaagaccacaaatccctcattagagtttgtggtttgtacttttatttctgggtttaaattt

SEQ ID NO: 405278 - DNA, 652 bp, Cannabis indica
aggatacctgttggattagtgatgaggttgtctccatttcttcagtgttttcgtccatgtagagctgcctctctttccttaaaaaaatattaacgtatattaacgtatagctgcaccatgagaccaccacttatatatgatttttgttatagttgacttttgtagaaaattatagggttctatcttaaaatcaattggtaataagtggagtagctcatgttcttatatatgactcatcaatattttaccatttactctatgtgggacattatcccacaataatttttgacttatttaaaatttacatatttggatagattacagttaattaattatttaacttttaaatcataattagtgtaaattattattttttggtatgataaatgattataatttttaattttgtgatatcactactacaaaaaaggcatccagtgacatattttgtgagactctaaatatttgtagtgactcttcactgtgcgtcactaatgtgggtgactggacaagtaatatttagtgaccttcacaaaacgtcactaaaatgctttagccttttagacactaattctcaccatttaaaatcgtcacaatacatatatattatttaattttattctattttaatttaattttatattattaataa

SEQ ID NO: 405279 - DNA, 805 bp, Cannabis indica
attttaaatttgaaataaggtcattttatgaaattaattaaataatacaaaatataaaatatctaaccttaaatttaaaataaagataaaataatcataatttaaaaataagataaccaattaagcaaaaataatagaattgatctattttcaagttaaaaaactactaatatctaaaattaataaaaaaaattaattaatttaattctgataattagatttgaaatttgaaaaataaaaatctaaatacaaaaatacacaaaaaatttgaagttaattccatcaaaaatcatgaaaaaaataaaaaatagaaaatttttggatttggtgcggatggtatgcattgcataccatccgcgcgcatgggaaggaggccgtgacagagaaaatgtgacataggaggctgcatgcagcctttccgcgcgcgaatggcccctgttcagacgaaaattgccctaacgacgaggaatctcggacagattcctgtcctaagctgcgtgcactcgtgtgacacagggtattcgcgcgtgtatggggtttcaccacccctaagatttttccaattatgaaaaaatcataactaattcaaataatatcgaaattatgtttgtaaaagagaattgcttaatttttttaatactatttaaaaaaaataattctagaataaaattctaattattttacgtaaaaatttgtaaacatcaaccaatcatcaataaacacatagatcaacatgaattacatccaaatcatacatatgtcgttttaagtccaaatttcttgaaagtaaatcaattaccatggc

SEQ ID NO: 405280 - DNA, 627 bp, Cannabis indica
tactaataaatactcaaattatttttattattgttatcaaattataaggtttttatcatgttgtgctttcaaattagactattcatgcttatgtatcttattgtgttatgcttaagcctatatttttcgtatcatgtagtgcaatccatgtctaaactcatatttttttgtgtcttgtgtctcatactttccaaactagtgccctattatatatcaaaaagtctaacttatatttacaagacttttaactatattgtgttcagtataattaaatttatccaaaaaaaaaagtatgatgtactaaaactggtgacatataaatttccttttactgcatagttgtacatttgacattattaatatattttgatggcacctactcttttaaattgtttaacctaattttacacatagtttttgacaactaccaacaagaaataaaaaaatgaaactttgaatccaatccttataagaaaagcccacgatctacaattaagattgcagggaagttgcgtgcactcttgggtgataatagaaacccctaaagtgcgtttatgtgtatatataagcatctcaaacacaccctcttcctcaatcctcatctactattctctctctctctctctc

SEQ ID NO: 405281 - DNA, 556 bp, Cannabis indica
tacaaatcaatattggacatcaaaattgtgcattctgacacacttaaatcacacacactatttataaaaatgacgtgtccatatataattatctatagttcaaatttaatacacattattgtgtgtaaaaagtgtttgatatattttttgtgtgtgtctttagctttactcaaaatcatttagtatgatttgatttgatattttattttcaaaatatatttattttacttgaattgttagaagctataaataagctagttactagatgtgttatgtggtcaaaaaatatttgaataaaaaatttcatttattattattatttttagtttaaaaatattattataatttattatttcattagttacgaggcgtatttttattattatttatattttaaaatatttactttaattttaaatagtataattttatttattattataattattttgtatcaaaattgtgaaaaataaaattattttttaatgaatgttttggtcaaccaaaaaactacaaaaatacaactacacaataatttttctaattaaataagaaa

SEQ ID NO: 405282 - DNA, 651 bp, Cannabis indica
catgctgataatttcaactcaatctgaatgttgaaataactatctttattcatttattgatcgaaaagtgtatttgttaccgtaggaacttacatcagagctatttgatccaatctaatcttttagtttatcatgagataaaacaaattgcagacataagaaactgactttaaatggtggtcacctgacctaagtactttatttcttttagcgaaacctttgagcgtagtctgcccaaaaggccattcacttaaaagcaaatgttcattcagtacttaaagtggtcatccgacttggttttttattggtaatattttcgtaaatgttccccattccaataccatggtagtaaaacgagttgcattttttcgtcatacttacctaatttgtatgctccggagtagagatattcgaccacttgatactgtccttcctagttaggtccaagtacacttgtcgtactatctttggtgtttaggaatacccttctcaggaccatatctcccttgaagaatttccgagccttcactcgtttgttgaaatatcgagctactttttgctgatgggctatcaactttaagtttgcagtggctcgtttctctttaatttcatcaaatgatttagctaggagtatgtgattggtaccttgat

SEQ ID NO: 405283 - DNA, 801 bp, Cannabis indica
ttttatcaaattatgaggattactaggaatagaaaagaaaggtaaccctcaagaaaaactacatgacgagatacatacaattttttagaaactggatcaaaacaacggttacccttttcccttccccataaccgagaaacatacaaagagcagagcttgacgacaactttgtacgccctacactagaaagaagcacaaaaccagtagaaccaaagactcttaaagaagaatagtcagaaatacaactatatagtttctcaaaaggagacaaacccaaaatgacaaaagacagaatcatttaattaggtgaactgcagttagaactgcctccccccaaaacaaactaggagcagaagatgacaacaaaagataacgagcagttttaacaatgtgtctatgctttctttcaaccacactattttgttcaggtgtatcagtacaagaagtttgatacatagtgccatctaaggcgagtgaatcgacaaatttattcaaagtatactcaccaccttggtcacatctaaaacatttagtaacatcaccatattgagttttgacataagctcaaaaacgatcataaatactataaaagtcataacgatgttttaaaagaaaaatccaacaaaaacgagtgtggtcatcaataaagaaaatataatatcgagaacccccttttctaacttatctcatctaattatttaaataccaaatttattttaataattataaataactagctatcaaaaaaaacacaatttaaatatatctatttgttgtgttagacaacaacctcagccagca

SEQ ID NO: 405284 - DNA, 951 bp, Cannabis indica
ttttgcacaacttccaactgttacatttgtcaatctttggctttcttgtcactagacttcgtgtataaaagggcagctcaagcttgtcatttttcacaaaccttctcgctctttagtgagatccattttcaaaatggatcatctctttcctgccaaaatatcccttctgagttcagaagttcatccttgcaaactgttaatactcagatgcaccaaccattttccacttcaagcctcaaccgaagctggaaatgatgtattccagggttgaggagcttttgaccaatccaaacctggggaatcccgtagcctgccttggctgatcctcacaagtgatccctgagggtacagatcttgtgagcgatcttaaaggtcctcctcaggctgatgaagaattctaaaggaagattggcatggtttcaggtgaatttgggaaggaggttggcgtggtttctatcagagaatccaaccaacccaaggccctaacctgtgctaaaagatctttgcatcaacctctttgtggtatcgaggaatttcctaagggtaggagaaagatctcggcttcaggaaatgggatctgttgatgatgaggggaatgaggtctgtgcagagatcaacgctctctacatgtgtagtcaatctttttctgagctatgtgtagacggtctttttcacgctaggtccaaacggtctttcttgagttcatcggcttcccctttcaccctttgcttaggaagatgacttaattgtttgcccctagtggcatttttgtaaagacaaagttgtaaccagttttaggtttttccttatcttaaatgccttatactattttcatttgaacttaatacaattgtgtttgcttgcgtttttattcacaatgtaaacaactatattttgatcaaatatacagtactttgggtttctccaatgctcgtaatcttcctgtttaag

SEQ ID NO: 405285 - DNA, 696 bp, Cannabis indica
ataatttattttacatgcgtatagaataaaataattaagtgtgcaacattatttgaatcttattttcggcgtattaaatttttttaaattttttaaaattttacaggatatcttaaataaataattataacgtacataatcctaagaaaaaaatttaattaaaaatatatttcgaatatcaaaatagatacatagattgatacatttttgaaaaaaagatatattatagaatttttcaaaaatatatactatattattaaaacaacaaattttctgaaaaataataataaataaataacaacaaaggtacagtacactgttaagaatttagaactttataagtagtacctttttatcaatttttgttgtttaataaaaattgagatattatatatcttaaaaagaataataatatatgatctttctatgtatatggtgagtgaatttagtactcaaagttaagattttaagattttttttttctttcacgaaaactatcttagatgattatatatatgatttataatattattatggttattaagtgcatagtattgaatttatagcagttaagttttaattgtccaacatatttttgtattaaactatcttataattatatgaaaaatagagttcacatacttattacaaataattaattggcctctctagtatttattatgggtgttcatattc

SEQ ID NO: 405286 - DNA, 574 bp, Cannabis indica
atttcacttatagtcgtcgtcattgttatgtccaatagatttaatcaatacataattatacaaataaataatataatgaagtgctaatatagatgaaaagattaaaagttaaaacaaaaaaattaaacactacaatgtcatatccatagaagcaagattaataagagatactgttaaaactttatagagaagaaaaaatttaaaattgaaaaatttataaagaaagcacttaagattaagagatctttattattattattaataataaatttattaaaatattaaaaaaaataagaaaaaatttgactctcaaatatgtggttaaaaaattatagttttgtgtaaattaaatagaatacatatttggatttagtatcattaattattaattttttatgatctaattaaaacatagtagcatattattatatataattgattatgttactattttatttattttttttaatttacgatatatataaatgttgaattttaattttattgtgtaacatatatatcatttaaattaaaaaaattcttactaatgaataaattataaataattcgaagt

SEQ ID NO: 405287 - DNA, 500 bp, Cannabis indica
aatttaaaaattcacaatattattgttgtatagtgttataatccacttttatatttatttattttgtaggtagtttttgtctaattggttgtttatttcagatgccttttgaatgtggtctcaagttgttttgtctaaatttctgagataactttgtcatttaagtcgctttgtttgtagtgactcatatgttgactttgtatatctttgactagacaattagcttattaactggaagtttctcttgaccgacgattgtcatagtgattctaatcactctttcaaaaataaaattaagttatataatttttctagtattgcatattattatattgtaacaaaaatgaatcaatatattcgatcattaaatatatacagcagtatttgatatatctatcactaaaaattgatatactgtagactgtagtaataaaattatataccataaataaattataacagtactaaattaatactcaaaatatatatatcatgctaac

SEQ ID NO: 405288 - DNA, 533 bp, Cannabis indica
ttatgttgctaattcagttttaattaggttaaactagtataattagcctaatacaattatttaaaataagacaaatagaccttcacaattggagttgttcatgtgagggagggcttagttcagtatgtcgcacccactactaatgaccccctaactctcacacaaggcccaaaggagaagaatttaacctttcattaaataattattaggaataattgcaccaaaaaacattaattgtattttatttatagatatatgactacttatttaatttaggtatatacccaatatcatttctcttaatttagtatgcagtatacattcaaattgtaatatgttttattttctctttcttccgtgcatcagaattttcttttattttttttcttttaaataaacaattatctgagcataaatatatacacaacaatttaaatatatatctttaatatatataatgtgtcagaattttttttgtcttttcttatgtctctctccatccattttatatatttgtttctcttttttttttt

SEQ ID NO: 405289 - DNA, 832 bp, Cannabis indica
tgtgggaactatgcttacagaagagtgccacatcatcgccgcatggaaattaatacaagagggagccactcaactacttaaaaattaaaaattatatttgtctatatatatttttaagttaatatgtgattgatattgcttgcttttaataaatgcgtgttttgtatctgagtgattattattattattattgttgtctgcaatgaattggctgtgattgaaaacactgtaggaaaaataattttgacgacgaaaatacccaaaatcaattctaaatgaatttaaatatataaattaagagatttatgttgattttatgcattcaaaatacgtaaatatatactttaattttcaataaaaaaaagttgaggtccgaccatgttcttcaaaaactggtatatatacatgtttataacatgattttatcatatatgaaaccgtgaggaatatatagattagattatattctaatcaatattaaataataaaattatataattatagagaattatatataaatatatataggcaaaattatatgtatatatgtacatggagagtatgaatatagtgatatctcattatatatatatgaaaatattgattttacttaatgcatagataatatcaaattgatgaataaaatacaatcttaatattactaaattaataaactaaatagatatatatatatatagggatatgattttttctcgtgatgtactttcacggaatgtattccgtggtacattagatgagtctcagggtacattaaatgagtgtcagggtacgtttttactttttaaccctaattacccctagatcaatctca

SEQ ID NO: 405290 - DNA, 556 bp, Cannabis indica
atatatgggatgtttaagatttccacaatcctccaaagagaatatggaactccattaaaaaattgtacatgaatcattgataaatatatgtatatgtccaaggttcgccattttattttttgagtttatttttggccgtgggggctaatttgcaaaagaagttttttgtgcaaatgagtttttgagattgataatcaatgtacagatttaagaataaaaatgaaagctttatgtgtttgttgttttgtttctgggaaagtgttagtttgataaatatgtcaaaaatgagctttcttttagctaagattgagttatgtaataacttgatgagtttgttcttttctttgtatagcttctgaaattccgtattttaatattcccagtttgattatttaattaaatgattaattaaatgcggaataataaaactggtactgaaaacagttttctgtagttacagaatgcaactctgtaactccagagaaacccagaaaaacaaacagtgcataaaagtaaaaacacacaagattttgtacgtggtttcaacaatcctttc

SEQ ID NO: 405291 - DNA, 512 bp, Cannabis indica
gcccaggagggctgcacgcagcccatgtacgcgcgcggagggaaggatcagcatgatcaacataaaattgcatgcagtcaatgtaaggttgtctgaacgagggagccatgcgtgcttcagacaggcatttgtcccttgtctgcgtgcagattggcttgtccaagggcctgtctcgcatggtgctccagtgctcgatactcaatgcaccaaaaatttcaaaacaccataactctctcattttttaatcggaattgagttccgtaaaaaaaaagttgcttaatatttcagaacgaaaataaaattattttcatggaaaaaattttgtaaatcacattcaaatatcaaataactcataaactaacaagaacacatccaaatcaacatgcaaacaatattcatcgttttaaatccatatttcatgaaagtaaatcattaccatggccctgaggccagttattggaaatattttaccaagatctagatttactaacaagtatgttgaattaacatcc

SEQ ID NO: 405292 - DNA, 516 bp, Cannabis indica
tctctctctctctctctcacataattttgagccaatagtgattgagtaaccaacccactctaatcaagatggtactcagatctttgtggaagatcatgacttttgttgcttataggttcaaggagaattaatctaggttcatcacttggtaatgttccgctacaaaaaggaattcaagggttagagtgattgaacgggatgagtctttttattactatgcaatcaatgtaaggatccaaaacttatacatatttatttcactatttgataattcatactttaggttgttaggttattaccttaattatcaaacatacaagtcttaacagccactaatgcggatggttgggaactgcacatatttagatttgatttgaattatactttaactaataaattaatggtactaaaggatatcgagataattagaagggtaaaacaataatttaagcaaaaataattatgaaccaatacattgaggactaatcaattgcattgattatatcaatggacact

SEQ ID NO: 405293 - DNA, 584 bp, Cannabis indica
gattattattaagtgagcagctcgtactgacaaaataaaaaaaaatgacagaagtaatagtgacagatgaaggagtctttgagttgatggagcaaagagaagaagatcagaaaaagagggaacaagaaagaaaaaagagacaaagataagggagagtttatgtaacatcctaacaaaaagaatgccatgttctacgactaatcatacactaatcccgctaaatcgggatttactagagccaagagcaaaaattaaactttaaaaatacagaataaaaataataacttgtaattaatatactttaacataaatctaaaagagtacattttattccgagatccagtaaaacatttccaaaatattacaagttattaattgttgcgaaaattatgatcactacgcaagtatacgcaatcaagtagtaaactcacacagatgaggtcgaaccatagggaattggactaattactactaaattatactattgattctatctggtaaaagaatacttttatgaattaaataagacaattcagaaaattaaaaataacaaaggaagattaatcaagataagaaaataggga

SEQ ID NO: 405294 - DNA, 630 bp, Cannabis indica
tgaggagagtcagttattatatagttagtaacttagagtgaaattagttactagttagtttcaaattatatttagaatactatagttagttacaaactagtaagtttgtaggttctgcgatatattgtaccacggtcggatcgatgggtgaaataatatgcatgttagatgagtttgaatatcttaaatattcatccgtagtgaataaggttttgcgaatacatataccgcggttggatggatggtaagtttttgaattgcaaaatattattgtaattattttatattattttgaattatgttttgttgttattaatagctttaaattttttgaaaacgtttcaattatagccgttatactgctaaaatttcaataatattaggtatgctttctttaacctacttttataagaattaacaaatacatcctaaatattgattctaatacttaacataagaattctattaatttattttaagtcaaacaataagttaaaaatattgcacattatttattattcaaaatattaattattataacaaacataacttaaagaattattaaaatgatactaatatactagaaaaatataaacccatattatataatttaaatgtataaaaatatta

SEQ ID NO: 405295 - DNA, 1239 bp, Cannabis indica
gtagcgaaacgggagagaaggttggatttacccactgctgagtctccgatcaagactatcttgaacaagtactcttctccttgttcttccgccattgttgattagatatatataagactttttcctgatctcttatatattatattctgaattctgagagagaacccagaagaagaagaagaagaagaaagaagaaaggtttagtttagtgtgagttttggggtttaaggagatttgtagacacaatgcgtaattggcggggatgattttattttattttattgacgcataaagctacactaatttccacttcaaaccagataatacataaccataatttatgcctaaaataaaataagaaactttacagtataagttgagaatttttttttgttatgtacatacctgttgatatatataatgggaatacgattcataaaattaagtataaattaaaaagtaataaaaaaaggacaaaatttaaaataaaaaaaatgaaaaagagtatacacttaaaattttatttttttttaggggtaaaaatactcaatcttacaattctcatatattcgttactacaacttttattaactcataaatataaatacgtggagggtacaaatatattacatttattttattttttattttaaagcttaattttgcatctctcttattttatttttgaaataagtaatatttaatttttgatattaaatattaaatattaaattttaaaataaaataaataaatgtaatgtgtttgggtcctttatatgtctctatttattagttaagggaagtggtagtaacgaatataagaattgtaatattgagtatttttgtaaggaatattataatgggagctatacaataggtattgtaattcttacctatcaaatagatataatgatttatagccattgatttaatcaaagggcttaaattaactcttggaaactacaccatacttaatatttttttatttataattaattttaaatattaatttggatccaactaacaatacttcaaagctaataactccaaacctataatttttcttacttatttaccttataacttgttataattttaattaattattttttaattttgaatttatatattaatttaattttctacttaacaaaaattatagctaaaagagtacaaaatattcaagttatttaatcctaaaataatcaatactaatcaacaatataatcatagtgtaag

SEQ ID NO: 405296 - DNA, 822 bp, Cannabis indica
tcaaaaattcataaatcgatcaccacatttcagtttaatcatatattgcgaatttaaagtagaaattacagaaaaaaaaaacacacctggttcgaagttggtgttgtggacggaggcgaggaagatgatcagagactggatctagggtgtcttgtgggccttgtcgatcattgagggtctctgttggaatatatttcatcaggatctagatttactaacaagtatgttgattaacaccctaaatatgaattctctaaaacaatgtaattaaatacacataaagtttaagtaaccttacattgatggcagtggaataatatgtgtcttcccactcagatctctaacccttattccattatgtcgtagagtattatcaagatctgagcccgattctccttcaagtgttggattcttcatagtcttacacactatgattgagtacttgacttgctatgggtaggcatgtactctttcactataggctcaaaatttatgaagagggagagagaggatttcaaaaatagagaaggaaaggaggctctcaaaactcaagttatctgacagaatgaaaactaggttaaatgcattggaggaggatgagagcatcctattccttttatactattttacttacgactaggatttaaattatatggaataaaaaatgataaaacaatagcaaaataaagcctatagtggccgaccatatagacaggccccactagttataattttaccatttttcaaccatttatcttttatttcattaatgccatattttccaaatttaatcccacaaataacaaaaactatttatttaat

SEQ ID NO: 405297 - DNA, 622 bp, Cannabis indica
taagggtagcaatttgatcattcagtacgtctgaaacatctcatagttatccaaagttatcatatactgtccaatttgaataatatcaatagtaatcgagatcatttagattttttttagtgcaaaatattttatctatttattatgcatgtttttcttttacaaagagccataacttttcatttgaatgttatttattaatgcatgtgttattttattgttcactattacaattcatgcaatacaataaattaacaatgaaaaatataagacttcccaccataataattacaaccttaatatttttatagtataattgttccatacattattgtttaaaataaaatttttaaactattaaattaatttaaaagttaaattaataatgaataaaataaaataaatcatgtctttacaaaggtagcaattagattgtttaaagtacgtttgaagcacctcataattatttaaagttgtcatagactatcaaattttaatgagatcgactataaatcaagatcgttcagttatttttttagtgtaaaatttttcatctatttataatgtatttttttattttaaaaaaaattattattatttatttaaattaaatcataaaatc

SEQ ID NO: 405298 - DNA, 632 bp, Cannabis indica
ggtgaacgcttctatatgagaatattgcttaattttgtcaaacgatgcacttcgtacgaaaatattagaacagtaaatgggatcaaatatcctacttttaaagtcgcgtgctatgctttaggattattagatgatgataaggaatggattgactgcctgactgaagctgcactatgggcaacaggaaaggaattaagacacctttttatcacaatactcattcattgtcaagttttagatgcgttacaagtttggaaatctaactatactacattgtcagaagatataacttcattgcaaaggaaaagatttagaaacaaagatcttcaattaactgaacaacaagttgaatcatacactctatacgaaatagaaatgattatgttgaagatggaaaaaagtttgaaagacatagatggaatgccccttcctaattcttcattaataagagatttaggtaatagactaatcaacgaagaacttgattatgacagagaacaattaaatatattgcatgagaaatcatttgcttctctaaatccttgccaaaagtcagcttatgaagcaataatgcattctgtagaaaatgaacaaggaaatttattttttatcaatggacatggtggcactgg

SEQ ID NO: 405299 - DNA, 736 bp, Cannabis indica
gagtgagtatgagggctcccggagttacggtccaaggcaccgctgaaggaccttcccgaatatgtaagaaccagttggagtcgattatccgggactacgaggaacaactagccatccggaactcctttctgaaggaggactagttttcttgaagacccttcctggaagaacaagaaagccttccaggacctgcatccgcgagtcaataaattaccaggaataatattttgaagaccttttccattcggaagaactataccacatgaactattctttttgacatattatttaccatggggattagattcaagagcagaacaagccttccattcccttgtaagttttattattattattagttttctttttctaatatgacaaactaatgatctcctgaactaagaaacaaaatcaaggtgatttaattattcaaatgaacaatcaaaagtagattactgatttgaatcttctagatttcaggattaaaagtacttttcagataaatattaatttctgtgtactttcccattgaattaaaataaaagacataagctataatgttatgtgcgactattaagatagacaatggttgtacaagttgtacagctggtactgatatgatacttggatgagcagataaagattttaaacaaaagcttctttcatttcaattataaatatttgtttgacccttcaaattggggcatgccttagacatctttacacaaattatgtg

SEQ ID NO: 405300 - DNA, 879 bp, Cannabis indica
tgggacccttagtatttcaaacatgcagcttaagctttattttcatgggtgcggtattactgcaaagtggcaagttagaaatacttttttcttgttttcattaatcagaatatcttcatattatattttattaaaaagtaccaacttttgtaagtgaattttctaatatatttttactctctacttaagtttagcacataatttacatcaacttaaaggctataataggaacatctatatattgtaaaaaatataaaaataaaggtaaaaattaaaataattaaagtattgtggatatacaatgtaattttgttgatcaataatattgtggtatttaaagagtgcaagagcaaaatgttatcttttttttgttttttgtttttgttttttttttgtttttttttaaaaaaaaaaaagtttgtttgtgtgtgtgttttaacggaccaacgcctttctccaaaaattaaaataaaatggaccaaactctttctcattggtctttgctaagacgagttcaactatttaattttttgggccttaggccctttaaaagttctcttcaaaactataaggaagaaagaaattgaaaaatacccatttttttatagggataattacataaggtactatttttgtaaaaaaattacatttttatattaaagatttttttacatttttacggtttttcataaatataacacgaaaacaacaaaacaactacatgaaaaataacatcaaaacaacaataaaaaataatacagataacaaaaatcactaacaaattaacaagagtataacataaaaaaaatcgtaattttctgtaaataaaatcaataaaattgttaaaatatttaaaatttcgtgaaactgtatttttgt

SEQ ID NO: 405301 - DNA, 608 bp, Cannabis indica
ttttgtttgtcaagaagaaggatagattactgcaaatgtgcatcgattatcgagagttaaacaagttgacaataaagaataagtatcctttgccaatgatagaatatctatttgatcaactgcatggaaagactatctttttcaagattgattgtcgatctggttatgaccaattaagaatgttgggtttttgtgccctaactaaactctatttcaatatcatcttgaattttcatttatcaataaaggaacaaaattattttattacttgtttaatataatgcttggttcatatgtttgtttcatggtcatttattagatatatcaattctactaaatctttatcacattgttattcttgattattgtgttatctatacagtggaaagtaatcaagattacgtgattaaactttagtctcacgatttatcaatacataggatttacatagatatgataatcaacaatgttgtttacttacacttagctagtagtatctcttttccaaggtattggtaaagtaagcttgtattggatgtattattatacatcggactggaccgatattcacatggaaatatatcataaactgttgaaaattattttac

SEQ ID NO: 405302 - DNA, 989 bp, Cannabis indica
gagctcacaatcaattgagagtgggagtgagagattcgtggttaggtaagggcttttgaaactaatcgcaaggttatagagaatggaggaggccattgttgctgtagtcattctccaattttgatttcttcaaaaaaagagaggatcgatcgattgggattttgagacattctttgaattaatgaggccattgttgttgcggtcgtaaatggaagaggctattgttgttgcagttgttctttgattttgattttttcaaaagaagagaggatcgatcgattgggattttgagactttccttgaaatcgtaaggtcgttgatgttgcagccgtgaggccattgtttataatcgatcgatcgattcgtgagtacgtttttttttaagtttttttttacaatttttttgagttttttttttacataagaattataggttaatggcatgttaaaaaaaaattaaaagaatcgttaaactaagaattcgttagatacccacttttaatatataaaagatataaataagagatatgagacggtgacatgtcattctaaaatcactccaaatagttctatctcttctctttaattctctcacttttttagttttttattaaaaaaatatctatatatttattatattaaattaaatgttaaataattgacaaaatcacttaatacaattaataattatagacatatataatttgaatacaaaagaaaatataacaaaaaaatatatagctcaaacatactatacactaactcaaattattttctaaaaaaatatctctaatacttgtattttttttaaaagaagaaaatatctacaaccttcttttctctattttttttaacacttggtgtggtaaactctttttctgtatttttttcattctacttcatttgtcatacatattagatatatagggtaaatttatggtaggcacaagtatttttaccctatattatagggaagtaaattgaaccaa

SEQ ID NO: 405303 - DNA, 617 bp, Cannabis indica
agagagagagagggtggaaggggctcagggattttgggctttcaacgagaccattcgttgcctccatttagccaaatgcgttggaaatggctcatcgatgtggagccgagagaaatgagagagaaaagccatgggagatggacgaaaaagagaaggagagctagggagggggtgagctagggagatgaactaggtttttcgtcggccagaggtggctggccctagctttgttccggtaccgcacaacaagaacaaagaaagagagaggatcgggaaagagagaaaaaattagaattttagtttttctcatttagggttacactatttctaggtatacccaatttaattttaccctaattaattaactaattaaaataaaacaaaatctaatgtaaaataacatgctaaaaagaatacttaaaagaatttttcctaataatttatcactgttagaaatactaatttctgttggaatttattttaccaggatcttagacctactcagaagtatgttgtttaacaccctaaatatgaactttctaaaacgataaataaacacatataaattaagaaaaccttacattgatgcagcggaattgtctccttccactcagatc

SEQ ID NO: 405304 - DNA, 532 bp, Cannabis indica
ccatgccaaccacagagatcacactgcgccccgatgaaccaccattaaccttttgaatcagttcatcttttgaatctttgatacccacaatctctttttgtttgaggaagcaagaatttttacgaggatcataccacacatttactgatgtagattcttctctgaccgtagacataaaaccaaattctttacttttttcattaatacttcgaattttttgttttataccttgtattttagaggcgatgtcatggcgttctttaagttttataaccaaacaagcatttcttcggagaaatccgataaatttatgcttgtgacgaccttgctgttgtgccacgagttgtgtgtactcgtcaataacatcttccacttcaaatgctgctctccttagttttccaacccacactttaacaccattgctattgtcaatgctttgatgtgtttgggcttttacatcagcgtctttgaggaaagccataatgtagtctagatcacatttgatttcttctacgtcattatgcacaccact

SEQ ID NO: 405305 - DNA, 652 bp, Cannabis indica
aattattaccattaggcttatcatattacaaccatccccgccttatagaaatttcgtcctcgaaatttatttaaacaattcaggattttacccccgtatttatgattctaactctcaaattgttgtttccatcttgccgtttttctatagaactttctcaactagtggaattgtctcatttcatagtacttcatttttttagtccaaaacctggacaagatgtttttaccatataataaatttgtctaaagtttaacatcattacagctcagaatatgggtcgaatctgatacatattttctcagaatggagacatgaaacacattatacactccgaacaacgcaggagttaaggctagctaataggctacttagcctatttacccttataaatacgtatctaatagttttctcgtaccactaccacacttattaaggtacctaaccaatgatacatttaattgtcatttttaaataaacaccttgttagggaagagattattctaagataatctaacttttatcaaatatgctcacgatatgtttctaatattccattgatcttctcaggttacccacctttcaagaataaaatatcatactatttttgctttaacctccatggttcttcataaccttctttaattcttaa

SEQ ID NO: 405306 - DNA, 714 bp, Cannabis indica
acaaatctcattaatatttgaatcacgacccatttaacttaaactgctaaaactaattcaattcaacaatttctccgatcatatcgctcgaaacaatgattgggttgaggataactctaaactcgattttgcgggaaactttaaagctcaagacttttcttcttccttggataaactttatcacattcctttggggattccgcctcttcgaaccaatcaaagacacggtatgagttctacatatgaatgtaaagaactttatgagagtattgtgtatttatatttggcttcgaaactggctaacatggtttttttatttctgtttcccaggggacttatctattgagcgttctagctctcgtagaagggtggcttcagttgaaaggttaatgaataatgaccccaagatcccaagctgggacctttggtatcggcgatgttgtacgacgcggagctcgatgattgtagcgttgggagaagggcataggtcgatgacgtagaggcggctgttgctgaggattttgatgctttgggtagctacggataagagattcttgtagaagggactgaatttgacgaagtacgtaaccattgaattgaatagggatttctgaagattggcatcttatcttcaatggctcaattctctttgactattctcggaagttttttttcttcattttaatttgattatcatgcaattttctttgtata

SEQ ID NO: 405307 - DNA, 547 bp, Cannabis indica
ggaaaattcagaaaaattgaaaacatcccacaaagttggaatttttgggtgttggctgcccaggctgcacttgcatccctcgagtagctgcaaacaaccatgatgcgcgtgcaagagagttatttgcagggtcctccgtcgagtttcctcggcacctgcatggtcttgggcgcgcgcgggtcgtgtctggaaccgggggggggggggtgcgatcttcggatagggatttgtcccatatcacgtgcacagatgcagctcgatgtccgagtgcctggtgcactcgatgcaccaactcgaaaccattaacacccgattttcaaaccttcataattttttttttatttttatcggaatcgagttctgtaaaaaccaaaattgcttaatttttcacaaggaatccaaaatattttcagaacgaaaataaaattattttcatggaaaaaattcataaatcacatacatccatcaaataacacataaaccaacatgaactcatcaaaatcaacacaaaaacaatattcatcattttaaatccatattacatgaa

SEQ ID NO: 405308 - DNA, 1193 bp, Cannabis indica
tcctggggtcgtcgaaaactgtacttcatttgtctgtggtgtaacggggaggacagctctaggaaattacgttcctggcatgtatcctggtccactagttggataatacccgccgtaggccactatctgcgcctcttccaagttgatgtatttttagtcccttttttggaagtcttgtaggctggtagctccatcctgttgtagctcattccaaaaagcagttctagctagttcgtgtcccagcttggagtagtgctagctgttgtccatcatcaacttttttggtttttgaggtctcttctttgaatctttttatgaagttctttagggtttctgttggtagttgcttgatgttaggtaaggcactcacctcgaggttaatcttcctagctgccatgaattgtcttcgaaaattgacttgcaattggttccaacaatctacgaatcctggttctaatttttgaatcattcttcagccaatccgcccaatgttagtggaacacataaacattttgcgtcattactaagcctcatgactatcattacttgattgaatcaagacatgtggtcattggggtctgtatctcctgcgtatatcgtatctcagttaaaatttttagggagctctgcctccagaatgtttttggcataggattcccggtcttcacaatcaaactccgaattatcccctttttgcctacatgagatcttggcaatgtcttttcggaggattgctagttcggccaagatcccttcgttcaagatgccctcctacactagtatctcttgtttcttattctccaaatgattcctgagggcaccgcgtctattattgagcttttgccttaagtcagtagggggatgcacagatacactttttcggtcctctcggtcctaagggccagtgctctctctagggagcctgcccctctacgaaccttttccttacgggaaatcaaagcgaatttttcgcggatcctgagccttcttattctttttagggaaagatgtaggacttttctttgggcatccctccgagggatatctgatagggcttgattccctatttttacatctttgggtacttggcaaagactcttcctgtgtttcacctggtcttggaggcatagcctttggatgcacgtggattcctgctgtctctatagctttttgcatgacgaccattatctctt

SEQ ID NO: 405309 - DNA, 702 bp, Cannabis indica
tcgcaagacaacacgtctagaaaatattaagcacatatccaataacaatactcttaatttaaacgtgttataatgatttattaaatttcataatttatttaaaaatggtaaatctaatcacaataaattaatttgaagttaaaaacacatgacaaaatttcttaaacaaattaaatatgataattttacattacttttgttaaaatctagtggaaaagcaaagattacttgagtgcaaatattataatatcactaaaagatcccaagtttaaatcacaagaaattgttagagtggtaataaattgataaattagtgtaaaagtactataaagcttaaactaatttgattgcattaatggatgaaaatctcaattaaattgaataatataaagagaaacattgaaccttgatattgtttttcatagtgggccacaaaatgatttaatttgtgatcttctcttaatcatttttttttttttttgggtaaatctattttctttttctacttttctgagctttggggattgaggtgaataattatgcaagattgtaggtggaggaaagtttatgagagagactcttaatttcttttatatctttatatattaaaagtgcctatctaacgattcttggtttaacgaaatttcttggtttaacagaaagaatattctgttaaatttaacgatgttaataggtttgatc

SEQ ID NO: 405310 - DNA, 567 bp, Cannabis indica
ttttaacactaagtctcaggatgttattcaagttaatcaatatagtggagtctcaattgttgcacagacaatgatggtttctaattctaaagataaaagagtagtgtatggagacatgtcatattatggaaccatcaaagaaatatgggagcttgactacattaagtttcgagtggcagtgtttaaatatgattgggtttataataacaatggattcaaagaggatcgaatgggttttgaacttgtgaatttgcgtcaaataggccacaaagaggatcattttatcttagcatctcaaacaaaccaagtattttacataaatgacctcatgcatgatagttgtgttagcccaagatatgtttctaagagggggtgaattggaaatttaaactaacttcggtaaattaaaacttttaacacaaaattaagcaattaaccacttaatcaaataaaagcaagtaatatggcaagcaataaagagtttaagggttagaaattgcaaactctcaatttttacaaggttcggtagaactaagccacctacgtccttggtcttcaaagctatgg

SEQ ID NO: 405311 - DNA, 618 bp, Cannabis indica
taattatactatactttaaaatacaatattctgtatgtatatatgaagtggtaattacatatgaatttttaatattttatttggtaaaaagttagtaaatacacatgaaaataatatttttttagtagttaatatttaaaagagaaatttttttgtaattatacagtgtaattacacttaattctcatggctgaattgaaaagtgtaattaaaaccctcaattatttctaattacacagttacaatattattatataatcacccaaataggggtgtgcataaatcgattcaatccaatgagaaccgaccgatctaattacaatcgatagccaaacattggatatcaaattgtgatcggatcagattggatgttatttttaaatattcaattggatcggatcggatggtggatggggtgtccaaaaatccaatacatccacatccaatcaaattaattagtattttcatttaatttgaatgagttattagattttatatggttatacgtaaaatctatttgtattttttaaaattaacgttaaaatttcactttttttcttagtattggatagatccagcccaatccaatacataatggaattaaaattttggatggat

SEQ ID NO: 405312 - DNA, 700 bp, Cannabis indica
acctgattaggtgatgtgattttactagcaacgtactgggcctaagtacgggcatcagtgatatatgatgagtaccgaacataggtacgagctcacctaattaggtgatgcgattttcctggcgacgtactgggcataagtacgggcgttagtgatatatgatgagtaccgagcgtaggtacgagctcacctgattaggtgatgcaattttcctagcgaagtatcgggcataggtacgggcgtcagtgacatatgataagtatcgggcgtaggtacaggctcgtctgattagacgatgcaatattggtgccagattatggcacgagctcacctgattatgtgatgcaattatatgatatatgggtgcaggtttttagcacaggctcacctaattaggtgatgcaattgtgcaacatatgggtgccaggctatggtacgggctcgcctgattaggcgatacaatacaagattatcaaattaaagcatcgactcgcttgattaggcagcgtgacgttatgaagatagttgctttatgaggtaacatatatattatttatatgattaaatgaatatgaattctattattggtataatggttttgtattaccaaatatctatatactgatgtttattcgtggcagatgccagtggtgatttgaatttcatcttatgaacaatgtttgatggtttgattcttttt

SEQ ID NO: 405313 - DNA, 660 bp, Cannabis indica
aaaaatatttttcaggtttgacaactctaaagactcgattggaggccaaaaatatcacaacaatagttagtaatattgatgggattattgagataagttgattttagaaatattagagtattttagagaactcaaggttgaccaaatatcctaacattaaagatttcttagtggtccaaaaatagtaaattaattattattaataaaagttttattattattattattaatatcatattattattattattattaataaacgttatctattaatatatacatactaagtttttttaaaacataaactgtacgaaatactctctttcggtgcgatgaaactcttctctccattaatctattttcttcgattttcaatccgaaatctagtaatttaagctccggtagtagcgagatagtaaatcatcgaagagggagagcttaaggtaaggattaatttttttaaggttaatacaattggttttatatattggctttgtgatttagagtggttatggaagttttgacttcatagaattgttcttgggtagctatggaactatttcattgtttacttgttgaatttgagatgattttgagttagcaattgagttttgaaattttttatagcttaagtccaaacgttaatgtcatttttcattt

SEQ ID NO: 405314 - DNA, 689 bp, Cannabis indica
attgtaactcaaaacttttctcctgaattttctcgggaaacaaacagatcaaatttgataaattaattgactaattcttttttttttaataaaaataaaataatataaaaaataaaatatgaaatgaaataaagaataatacatacctttaagggaataaatttaatacaaaaaaaaaatgaaaaataaaaattctgctatcttcaatggattcttctattctagtagagtttatctcaatagagaataataatatttttttattgaaaaatgaaaatgagaattaattgttatttattttaattttttagaaaaataaagaaagaggatatattattatatatatataggtgttggtgatatcgagacaggacagctgtcagatgccacctaacccaactcacccactacattcaccttctttgggcccatctattgccacatcatttcatccacgtggcattttcatctatgcgtcgccttcctctccacctcagtgacacttaggggtgggcatccgatccaatccaacctttttttcctcatttgatccaatccaattagtaattggatttgaaaaatcatcatcagatccaatccaattagacctcaaaatccaatctaatccaattaataatgattttttaattgggtatccaattacacctaaatttcaatattagcttaaa

SEQ ID NO: 405315 - DNA, 715 bp, Cannabis indica
gtttacatttaatttcaaaataaaaaatacaattatagctcatacaataaaatacacattcaaatcattaatagagtaaaagtgcagttaggagaaatagacatggggacaagtgtgaagtgcatcactttgatatgagagagtctcttttctttggtaattaggaagccttcagtttcgtgacaaagaaaaactaataaaataattgcattaagaaaataaatattaattgttaccaaaaaaaaagaaaataaatattattattattattatttattaagataaagaaaataaatatattactttatgcaattaataatacctttactttgtctttaaaccctatttgtctcttcctttctctgcccaataagttcaccagaagcaaagggatggttttttttttgaataaagcaaagggagggttttattttgtcaacttcaacggttttattttgtcagcttcaaccataatcaaatggactattttattttgaaattaaatgtaaactttatcatttatttaatttaatgtatgtttatcagttttttttcctctaggagaattctaatagtcatccaatttaatttcagaattagcaatttaataccactagatgagtttgtatatttaaagaatgttttgtttcattattttcactcaacattttcttcttatattgtgttatctcttaagcattctttgaagtttata

SEQ ID NO: 405316 - DNA, 842 bp, Cannabis indica
attaaaaattaaaagaaaaaaaccatttcaagttctttaacaaatagaaaaatagagtttttttttattttaaactattaattttagtcgaatatacaatattattatataataattataataaaaaaaaaaatattccatttttaatcttcgtcaagtattttatgtcctgaaatgcctataaagatatttttgattataaataagagttgaatattttaatatatgcatgaatgtttaacattgaataatttacatataaatattaaaaaattatatattcatatatgaggcggtgacttgtagttgtacggagaattaagatcacttagccatgaatacaatagtcagcacaatattaaagtttaggaatctttaatcaatggttgctagtagggttcactgatgcccgttatttggtgcaagtaatctcaattcggattactgatgtagcatgatatccaagtgaatgtgatatatataatagagatgatatataactaggactgatatgaataaatctgtctttataaaacttatcatttactataaagacataattcatatcataatgatgatcaatagtagatcgatataaattttgagtaatcatgaactcatgttcatgttattagtttctttgattcactcgttaaagtttctcagagaagatgattcttacagcttcgtgttttgggaatctaataatgtggaagggctgggaacatggatctacaataatagaatcctaactttcctaacggattgaatgtttgttccttatgtgttaattctagaattagaaagttgcacacaaatttggcatctaaagtatacttcca

SEQ ID NO: 405317 - DNA, 630 bp, Cannabis indica
ccgggtgttcccggtctaggtacctgtccgggtcctgggtttgggtcccgggtggtcccggtcccagtccaggtccaggtctaggtctaggtccgggttccgagttttgggtcctgggttccgggtccgggtccgggttcgggttccaggtccaagtcccggtccgggtttcgggttcttggtcctggtccgggttccaggtccgggtttgggtcccaggtccagtttcgggtccgggtccaggtctgggtttgggtccgggtccaggtccggctctcgagtttgggttcggattcgggttcgggtctgggtcccaagtttggtttcgggttggaaattggtgttgactctaaatttttcgtaaatattataatacaagctaatacagattattaattatgcatcaaataatacaacatatattatattaaaaagatttggtcgtaataattaatacaaatacattattttatccaaacatagtgtaatttattatttaatacaatacaactcttatacagcataccaaacaagtaatttggtagatcctattatattggaatatatagcattatattgaattattttaatataataatatacttagtattgacatgtattaataaattg

SEQ ID NO: 405318 - DNA, 947 bp, Cannabis indica
atatcctaaactttataaaaatacataaactactttcctaactaaccatttatattgataatgtaatcaatgaagatcatatccaattaataaacaacatctaaattgtagattccaagcaatacaatttacagtggtgaatttcagtggatgttaattaaagtgttatcattcatttgtaatattggaattagatggagatgtctttgtagtatttacggtagccataataagaaaaaaggaaaatctacactcgcgcaattcctaactttctctcctttcttttatctttttttttaaacaacttcactgtataacttgaaagttttggagtgtaataacaaaaagctaatttaggattttttcccctttaaactttaacatgcaccaaatcatatcctctaaattatttttggccgtttaaaaattcccttttgaactatttgagattgttagattttaaggacttttgtctaatttcattcaattttactatttcagtaattgtttatgtactaaaccattttccccagactttgatatttatcaaatcatgcctctcgaactttgacatatactaaatcatgtcccctgaacttttatcatgttagactttttttttttactaaaattggataaaagtccttaaatctaacaatcccaatagttcagggggcattttttactaccttaaaagtttagggggcatgatttagtacatgttaaagttcaggaggtaaaaatcctaattagccaaaaacataccccttttataaatcaaatggggtgcaattataaaaagtaatgttttaattaaataaatgtagtaaatttagtactgaggtgtagttaaaattttgtaggatgtaaatttaataccccatgattaatagtttttatttacatttttactcttaccactaaataggataattaatactcatata

SEQ ID NO: 405319 - DNA, 480 bp, Cannabis indica
gaagaggcgtgctgtccgagtgtgtcccttgggtccgcgcgcgtacacgtgtgcacgctattttagatattttcatccaaattcaaaaaatcataaataattcataaaaaatccaaattgggctctgtaaaatcctaaattcattaattttttgtctattttccagtttaaataatttcagaacgaaataaaaaatattttacaacatacatcgcgattttgcatacaatcatcaaataagcacataaaccatcatgaaaccatccaaatcaacacaaacattgttttaaatccatatttcatgaccatggctttgaggccagttgttagaatatgtttaaccaggatctagatttactaccatgtatgttatttaacatcctaaatatgaatctctaaaacaatgtaaataaacacatataaagtttcagaaaccttacagtgggtgcagcagaataataatggctccttccgctcaga

SEQ ID NO: 405320 - DNA, 505 bp, Cannabis indica
tttttgagcacccaaggcctcaagaccccgagcaccctgggcctgggttgacaatttgtcaatgtgggtgccttcctagtatttgatcaaagatccaacttttgaattgaatttgtcttcatcaaaaataggaaaacagggccttctagaggaaaaacaacaattattgggcacaaataacagggcacagcccccaagttgacgcatgggactagccctatgccgaggttgacagtttgcaaacttgggccacaaatattgaagtttttcaagaattcttttgagcatcatctctgtcttcaaaaaatattaatattcaattatttctagggaccaaacagaattttggaaggggcaaaactaggacccatcgcctaggttggcattttgtcaacttgagctgaagaaacaaacaattaaaaaagaagagcaaaagaaaagataaataatttttacatggttagggcgttaattagccttagtccacggatcagtgttatttagt

SEQ ID NO: 405321 - DNA, 542 bp, Cannabis indica
actactcactcaaaacgacatgacgtttagattgacatcactcactctcactcaccttatacaagccatctaaaacgacatgccattgcaaataaaacgacaacatctttaatatattattgtccaagacaaattctgctagatatacataaagtaagcctctaaaacaaaaagtataattaggaagacacaaaaaatgatttggaagtttatttatgaaactcttaccagtgaattcacaagaagaaaagatcacaatgttatcaaagaattggcctttaactctttgtattgaaactctgtatttggctctgaaatacttccaagtatatacttggcagagcataatcttttctttccatgaagtttgtcaattttagcgctccttggatgaacattatgcagctgcagcatcagaattgtggatggatacaccgatcttgaccgatcaatccattgaacctgaatagggtgtccttctcttgcttctatggtgttttgttcgtgtgcctttccctttgcgaattgagcacaagaacaac

SEQ ID NO: 405322 - DNA, 996 bp, Cannabis indica
gtttggcttatttctgggttttgaaaatcgggtctgatgtgggcccgatgcccgtccgatggccagtccgatggggccagcccgatggtcagtcaattttttggaaaagaggaagagagagggacggtttggaaaaatgggaggggtattttggggtttaggaaaaagttatctcattttacaaattatgcataatataagtttaggggaccaaattatgagtttattaagcatgaaaatttaaatttcccttttatattgagtctatcaagaagaagccttctcacttatgaatgaaaataagaaatcctaaaataataatatagcacttgaattatgtgcacttgagttaaaaagagaataatatgagatattttttttaagaaaaaagtaatagtaagttgaattattataagcattttttttttgaaaaaacaaatataaataaatactcttgttgtttgttgtgtgcgattgagtgattaatttaaaaaaaaaataataatatttgaatataaaaattaataaactatatgtatgcagattttttttaatgaaaaattgaaagatgattttttttattaaggaaaataaattttggtacatttatttaaatttttttaataaaatattaggaaaaataataaataaaatttaaaattataaaaatgaagagaattaaggagataatagaaaaaactatttagagtgatttaaggctgcgcttcatacttctcctttatatatatatatatatatagatagatagatagatagatagatagatgtgactatataacagaattcttggtttatgagaaattattgggtgatttttttttaaaaaaagaaataataaattattagatttgtcacgtaaagagtcagcatgcatgtccttagttaaatctacatataattaatccacctaaagtgttgcaattaataataaatttattcatattgtttatttttttattaaaaattattttcaaa

SEQ ID NO: 405323 - DNA, 850 bp, Cannabis indica
aaaccccaacccctaaaccgtaagaccttaacaccccatacatcaaaccctaaaccccaaaccctaaaaccaaaaacagcaaacctaaaaaccccaaacacaaaaacaccataccctaaatcccaaaccccaaaccctaacccaaaacccaaaaccctaaaacccaaacaccaaaccccacacttaaaacctcattccccaaatacttggtccaagatcctaacctgtagatcctagtcataaaacccaaaaccccaaaagccaaagactctaaacaccaaaaccctaaccgttaatcccaaaccccgaaaccttaaatcccaaacctaaaaacccaaaaccccaaacccaaacacctcatgtaaaacaacttaaccccaaacccccaaacctaaaaaccccaaaccacaaaccccaaatcctaaacccaaaaccctcgaacctcgaacccaaaacccttcaaatcgtaaacccccaaaccccaatagaaaagttatagacaacgatcttgcttcgtcgctacgaaatttcactattttttaggatgtgtagggtgagattttgaaagaacactaacgactataagagtaaggaaaaaacttgttgaaatttatcctaaataaaagaatatttaaacttttgaaataggagtcattttaacaaaatttaacttcaaagcaatcttcatattcacgtgttagtagtacgaattcctgtgactagtggtgaaaaatatttcgagatgggtccgggccaaatttcacaaaggggtacaactattagaaatgtaaaattttaactatttcaattagaatgattattactgcttgaaaactactttttctcttaa

SEQ ID NO: 405324 - DNA, 873 bp, Cannabis indica
ttctttcattgagagcctctgtttaaaagctcaggaaaagcctcctgacataaaagtgatggatgacaccaaagataataatcctcaagaaggaatcaatcatcgtcccagaaaagaaccattgagtcctgagggatctattgagtgatcgcatgaacagacttcaagccccaggaagacccaaaattggggcccttggcttgagggaccttggataaacaacaatcgaccacttcctaaccaggttgatgaggatggcgcctacaacctaaccaaatacataccaatcattgaattagaaaattgtcatctcaggcatcgattggaggaagtaaacttatgtaatgctgagttagagcgtgaaatagctgtagtaaaggcagcgcgggaggatggtacccaaaataaacctaacttggggagaagagatttacgaggcaaacctcgcgactcactaaccaaggggcaagagatgacccagagatatactcaaaactctcaagagatacaacctgaggaaactgaggaaagtcttggggtacagcctgggatacgtggaacatcaaatgaaaatcaccaacgctctcttcaggttcaacatgaagacattcgcacaaatccatatagggagaataaggtgaaccaaaatctaagaggaaggtcaaggtccaaccgcagccacaacaggattgatctacgagagtatctgaacttgaaaaagcatgacctttgtcaacaactcggtccaaaactaaaggattcattccatttgcaaatggacgagttggaaaataagttcagaaggcatcaaaccacgaaaattggaagacaaccgggacgtgaaactgttgaggaacttgattcgaaagcctc

SEQ ID NO: 405325 - DNA, 604 bp, Cannabis indica
tgctgtttctcaaaagctaggagctcgagatgcatacctggctcgacacaaatcggttaatcagttcgagtttagtgatccaattggtttcgacactttcacagcctcgaaacctgttgatcatctcatcattgacaataacaccattacctttgctcatgtattgacttatactgttttggttgttgcttcaagatttagtgtactcttacaaaaggttttaaagttttaatctttggctttttgcttggtgttaattattagggtccatggctaaggatcacaaacattaacaccccttttcttacaaaaggttcgactgtcatgctcaatggtcatactgaaagaataacttgtatgaggtaagaattttgttttggtttccatgtgttatgggccattttgttagttttgttactctgggtaacgttggtttcgttggaggtaatgaaatgaaatgaaaataatttttattcagtttatttgtttgattgcattttgaggtattggaatgtttttagatggaatgatgattactgtaagattgagaaaaattttaatatttttttattaatttttaatgcatttaaaatttgattcaatt

SEQ ID NO: 405326 - DNA, 656 bp, Cannabis indica
gatattgtgatgttgcatgttagagttttatctgagttgaagcataattcagttgtgatatatgtttatggagcatggaatgtgagtttaggtcagaatttatgagttattaattgagtttgcagctctaattttagtgttgttcttgagtttatgttttgggatttgatgattcaaggtgtgaggttgaatttttttgatttcgctcaagctttggagctttgattggatgttgttgattaatgttagaattgacattgttgctctgttgtgatgatttctatctataagaagttaattttgggcatggttttattaaggttcgaatatatgtaaaagtgagcatttttagaccttataatctggttttctcggtttttcgaaccaactggccgcggccaaatttatggtcgccgcatccataaaacctagcagagaaccatcattttcccgattttgttttagccataacttttgactcgggactgcgttttaacgttctttatatcgctggaaagctcgtttcgagctctatatgattatctgtattttgaatgccaactttatattatgtgaaagtggaattagggataaaccctctttgtgaaatcttggattgtgtgactaggattaccggcacctgatcaggagcaccc

SEQ ID NO: 405327 - DNA, 538 bp, Cannabis indica
gtataattttatttttctatatctctttcttaaaactgaataatgatttcagtatataatatactagacataaacacctacttgtcttttcacctcgcaaagctcttcaaagaacgatgagtattcctgtatttaataatactgactgctctaagttcatcagtttatagttctaaattatttgagcactaaattattccaaaacaagttgattgtatcatgaattttaattacttttgtcattctataaaaagttaaaagttttaattgtatttttagacatccttataacaacacaaaattggtaaggtattacattttattctttttatttgtgtctaaaagtgataagaaagatagatacatctttcctataatagtttcagttaaataatgttcatcttatagtttcagttaacttactatatgagtatgaatatattaagattagcttataattgttaaaattataaattatattatttagatatacataataataatctcacctaataactaataatattttttctttaat

SEQ ID NO: 405328 - DNA, 557 bp, Cannabis indica
aaataaataaataaaattgaatgttagaataatatattgaaattgaaattctgctatgttggaatttaaaaaccaactaactttcctaactataagtctgttacaaaagaagacaacttgcacaattacaacaaccacaatatagttacaaatcaagatcctaactgtaattaacagatcaacagaaaactacctgacaactcatcaatccgagaccactttccctaatcttttcccagcagtataaatgactgctcttggttcattttttgcccagagctgaagactagagaaagagagtgaaccttgtaattgctctgagttcaaagataagaactcagagttgagaaaaagagataaaagtgagaatctgtgagaagagagagattgttcttgagaagaaaagaagtagaaacaggagataaacaaaatcaatagagaatcgagtcttaccagttgatctgtagctggaagctccaccaatcgtgtattggatcttgatttgaatagtgcaaggctctgctcatttttctgaggcgagctcaagaggactaccc

SEQ ID NO: 405329 - DNA, 687 bp, Cannabis indica
cagtataattcaattaacgggaatgtgattacatattaccctacagaaccaaacacagttttacatattttttcattaatcatattctccttcatatattccctataatcaaattattttgaacacctcatacccaaacgcccccataaaagtatttatatttactttaaacaaaaaatataactactcttagtaaatttatttaatttaagagggcttattataaaaaaaatatatttgcgatgaccatttttttattatttttgtatttaattattaactataataaaatatttaaattttaaatgaatttattttttcaatgagggctacaaacccccataagctctacttggatccgtctcctgaacagaatgcaatttataaattttgctcttctttgttttttcattattttttacattttatgttaatttaataaatagtgtatatttgacttcaaaaataaataatgtaattctataatgcactattttaaaagggatacaccgatacatctctatctgttttaatatctgaaataattttttgtcaaattcattctcatggtcatgtaaattatacttatttaagacatctttcaaaattttaagaaattcaaaaaagtttaacacgccgaaaattgcattcaagtagtgcgttacacgcgtgactattttattttat

SEQ ID NO: 405330 - DNA, 1450 bp, Cannabis indica
gaaaacactttctagtttcattagtagtttcttctaaatgttagtagaacattttaattatataatataaaatcaattaattaggtgattatatatagatcatgacatttactttttgtaaaatgtaatgaatgaaattttagaaacgtttaattactaggtagggaataatataaatagataaaagaaaagaaaaaattaaaaaaaggtaatgattggaaatgttaattctctcctatattgtcaacatcttgatttaagatgtggaccagttatcagtgattgaagtaaatgggagggaacattattcatgtgaacgtcgttaacttacaactaccaaattcagatactatatatatatatatatatgcttcccaactttattgtcaaactcaaataacattcactttcatttcacctctctgacccatatgtaataaattaaccacagctaatttaattataccacagcaaaataaatgtcatatatatatatataatatagctgcgtcaatggtaaaatttcattgattaacatatagaattgataatcacatgaactatattataaagtaataattctttcttttgaaaaaaaaaaagaaaaactcataataataatgtaggtgtttaagggagaagatctaagaaaagatatgtatcatgatcaattgtttatttgtttttattatagagaataaatttaattagtttgtctgcaccctaatgtgtataccacatttagcttatgtctttttctatgtatcatatcattaactcttctattattggcaatatttaccaattttaattgacaaccctaatatcattaactgaaacagttttatgacaatatatgactgtatactgtcactgtatagttgtgggaactgagattcacatttctttacatctgtgattttaaatgtatttttaattttcataattggccaaatttattgtaattatcaattggtatgaataaatcgtatataatacatgtataccgtatatatataaaagtaaatatatgtatattcacaaccccaattgatatactttcctatatgctgtaagtccatgcatttacaaaattttcacatgttacttttaactgtatatatatttcagtatttaaccttgaatatataagtatatatatttatggttgtacgtatgtaattatatgattaaaactatacaaatcttataattgaattttaacttttgtgatgttttgcttggatgtaatgtcttgggaatagtactaaaagatagtaatatatatgcatgaaataatttttaaggggtattatacacctctacaaaaaatattatttttagtgacaattttttaattagttataacaaaaaaaatttgtgactaaatgtaacttttagtcataataaaaaaattaatttgtgactaaatataatatttagttacaag

SEQ ID NO: 405331 - DNA, 578 bp, Cannabis indica
agagagagagagaagacgaagatttcaacatgaattgttcatcattgtagttcttttcttcttcctaatctctttaatttttcaattatgattatgcttatgattatagttgtgagtatggagtagtttctttttaattaagtgttatttcaaaatcctaaaatgtgaattattgatttgtgatgatgaatgttattcttgatttctctcatattaaattcttcctatttatttatttgaatgttatgaatattgtgaattcttgttaggtgtacaactaattaaggttttgcattgttctactatcatctcagaattacttctcacctaatagtttaggattctaagcagagtgataatttacaattaatagtaatgtcaaaggtattattgattgtgataaaaaatagaacctagattaaatgaattatatgtttcattaatttgttacctagattaacttatctccataaaattatatttttcctaagttaaatagattttatgcttcatggatctattgcttaataaaaaaaaatttaaattaattgagcgcttcgccttgattaattgtaata

SEQ ID NO: 405332 - DNA, 605 bp, Cannabis indica
ttttaaagcaatatcacatttttatgtattagggagaaagttatttggggtatattgaaaaatacctcttttattcatcaattagtcaaatctacctctaattttatatttaattgaaatatacttctttttatatgtgttgtacccaaaatactctgacataagagagtcacatggagactatattgaggtgacaggggtaaaattggtaaagtgttttaaaaaataagtaaaaatgataggatttaaagaaaaaaggtaaaaataaaataggacaatataaaaagggtatagagtataattttattttaagtgtggacaatagaagaatctctaattatgaataaacacttaaatttatacatagtattcactattgaaaaataagcaaaatttcaccaagggtgaaaacaccgatatgacccccacccaaatcatgacccctaccgattctccatagccaagtgtaggggtgtgcataaatcgatccattccaatgagaaccgaccgatccaattacaaccgaccgccaaacattggatatccaattgtgatcggattggattggatattatttttaaatatccaattggatcggatcggat

SEQ ID NO: 405333 - DNA, 516 bp, Cannabis indica
aacaccgctgttctccatagacaattactcctttcactgccccctaccttactatcatatggggaaccgaacactgcatggaccattggatctcaaattcgtgaagcagtcttatccacaaggaccacgcaaggtggcaccttaaaaacagatgtgccgcgtcttctccactccttttacagtagacacaccatccaggtgatatacacaagaagaggcgctttttttgcaatctagcatgtaggttcagtttatctagggccaacaaccatccaaatactttgactttggaaggtcctctacttttccataggatcttggtccaaaacaactccccggagttatcggatgaagtaagccagcagaacgctgatttagaggagaaaatcccccgaatccaaaggcgactatcttcaagaatgttaagaactctgacgtgctccatcttttgtaacaattcttattatcacttgatagccaaatggctttttataaattacaaactgtaacaactca

SEQ ID NO: 405334 - DNA, 773 bp, Cannabis indica
attgaaatctgcagtgatttacaactggtgttaaatcacgtatctggagaatacgaggctcagggagaaaagatgatagcatatttgagaaaaatacatgatctgctcgcacagtccaaaagctacgctctcagacaaattccaagagaagaaaacacgactgttgacgcattagcttgacttgcgagtagtaatataagtcatagagaaaatctggttcctattcagtttctcgaagaacctagcatcactggcacggaggagatcaagaggattgatacatccccaaactggatgacgtaaattgcaacctacctcaacactggggaactcccaaataatcgaattgcagctcgaaacatgagaaggaaggctgcacggtacatcatagtaaagggaattatgtaaagatgaggattctccatgccactgctcagatgtgttacccaagaagaagctgcacgacttctgtctgaagtgcatgatggattttgtggaaaccacgcccccgggcagagtttatctaagaaatttctaaggcaaggttatttctggctgacaatgatcgaagattcaaaggcctacgttaaaaaatgagataaataccagagattttcaaagatacctcgagcaccgccaaatgagctaacccaaatgcaaagtccttggcccttcgccatttggggaattgacttgatcagataattacccaagggtaaaggtggagtgcagtatgcagtggttgcgattgattactgcactaagtggacaga

SEQ ID NO: 405335 - DNA, 897 bp, Cannabis indica
aatatggatttactacattttcaagaattttgtagtttacttttttccaagcttgggaatctgtaggaagtatgagttttccatcttccactctcgtggtctcatgcctaataattttccagaatgttttgcactacgatataatcgtttaagtcgcggaattaaaggcatgtaccacatcactttttgttggataagtttcctattctccttactcttgtttagtttatggagcgataaaccgcaagtcgggcaataatctatgtctgcatattccttatgatataaaatacaatcgttcggctttgcacaaattttttcatacttcaatcctacagaatttagagtctttcacttcatatgtagattctggaaagcagttgcaagaaaaatatctttaaaagtagctaaaaattgagtaaaatatttatcgctcactccattttttactttgatgctgtaaaattttaccattgttggtaatcttagtttgttacaaccatcgaacaggggtttacctacatcacttagaaaattatcaatttttttaggataattaagaaattcctcctgtgcttcgtcaagcaagtccaatagatgatcatcgaaatcattaccctcatatcatctacccatcgcttccctaatggatatgaatcatcaactaaatattcaccgtggcaatactaagtagtataacttctattgaaatcttgtaaatacacatggtccttaatcatcgtaatattttcattagatctattacaacaatctacactgacaatgaatacgttttggattttagaattctttaaggcaaactctaaaaaatgcatcgaatcctacttgaaatctcattgtgtctctctcctcacgcatccataatttatccataac

SEQ ID NO: 405336 - DNA, 1447 bp, Cannabis indica
atcttatgcagcaaaaaaataattttatttttgtccatctaaaaatgaatagtcacattttaggggacattttgcctcatgagataaatgaaatcaaattaatttcaagttgaaatataattcatggttatcatacaaccataaagcataattatgaaagagcgagaaacaacaaacatcaaagaacaactaaaaagagaatacctgtggccaaccatagtgaataatccttcgaacatttaacttgtcaatccccataccaaaagcaattgttgctacaacaacctaaaggcgaaggtaaaggaaatatcatgagaaaactataaaattataaaattccacaaagttatatgttaggaacccacatcgactattatgggattagttgatgatctataactacttaggcaccctcctctcttaggctagtttttaggagttagttctactaagtgattgttacaaatggtatcatgctccttcaagtgcgaaagggccaacctgtggaaaaagcccagagtgggcccctatagagtgtgtcatcgtggatgtcggctctaagggggattgtaagtacgggattagttagtgaaatataactatttgggcaccctcctctcttatgctagcttttgagattaagttctacctaagtggttgtggaactgaaatcattctattggaattaaatctatagcataagtaagaacaaggaaaataatcaatttcatagggaaaaacaactgattgatataatttattagagaaaggaaacaagaagccacaaaactatgattgtgaaatgaactgtgtagtattatacaaagtatgaaattcatacctctattgtgttttcttgaaattccatgtggacctgcctcagatgcttttttggcaactttatagaaaaataaacttgcaaaattactttaataaactagaacagataacggcaaaaacatggacatcaaatcggatgcagattatcagccagcttcaaatggggacatgaaaatataagttatttctcgctagtaatgaaatctactggatccctgaatcctgctccgtagggtatccaggcagaaaacattgttccatagtaaaaaatagtcttgcagctcataaaaacaaaacaagcaaacatattttcgcattcatggcaaagaattcttatgcgctacaaggttaattttgtaggcagccaacagtaaattcttgtggtatggtatcccgaatatagctttgcagagtcataagaatattcaagcaaatatatattttggagtttatggcgaagaaatccttaagagctaaaggttagttttgtaggcagacaataaaccacataattgattatatgaggaaaatgctgctcaatgaatcggttgattcaaaatttcgaaatggatagatgtcacaaatatttcttacctatgttactcta

SEQ ID NO: 405337 - DNA, 928 bp, Cannabis indica
ttttaattattttgtcaaaaaaatttgttgtcataaaaataagggtaaataccattttggactccgtattttgcaaaagttatcaattggaccctctgttttgttaaatgacaaaatggaccctgtattttctaaaatcttacaaataggatcctgaactgattttttgtcaaaataaaatttaataataatctcatgcaagccgataggttgcatggccaattttctcagcgataaggtatgggccttcccaatcgtcaccaagaactccatgtgctgggttcttcgtgtttggcatgactttttgcagaaccaaatcccctactcgcaggcttcgctctttgaccttcgaattgaaatagcgagcagttcactattaataggttgcgttctttagatgagcatgatcccgcttttcttctaagagatcaagttcaaggagctgtttatctacattttcactaaggttgaacacatctcttcgtagggatcctgccccgacttcgactggtaccatgacttcgcactcataggagagcgagaagggggtttcaccagttgtggatcagggagcttgtattatatgaccataaaacttatggaagctcttttggccatacccctttacgctcttcgagtattcccttgatggtgtgcttaattatcttattcactgcctctgtttgtccattgctttgtggataggcaaccgctgaaaatgcctttttaattcccaactcatcacaaagctggcgcatctccttacagtcgaattattttccattatctgagattaatttgtaaggtatgccgaatctacagatgatggaattgtacacaaactctcgcaatttaacagctgtaatagtcgcatgggcttttgcttcagcccacttggtgagataatcgactgcgctacggcgatttt

SEQ ID NO: 405338 - DNA, 671 bp, Cannabis indica
gtgtttcggtgagtgccaaatttgggatttttgagtttcactgtttttagaaattcctaggagatcaaaaatcgtatttattgtcataacttttgattcgggtgtctgttttggacattctatataccatttcgaagcttgtgacgagctctacaatatggtatatattttagagccaaaatataagttttattttagtgcatttatacggcgcggtttggtagaaaaccctagattgtcttatgtgaatattaagtagtattttaggataaacacttattggttgccattgttgtgacatagggccgagatcattaggaatagttctccacttgggttggccaacatgtatgaacctggattaaaggtaagaaaagtatattatactgcatagtacgttgtattgtaatacaattagtattgttgtgaattgattgatattgagattaagatgtggttattattgttatagtgaaaagattgattggttaagcaatgataatgtgatgatattatgaatgtgataagcaagctcacctgattaggtgatgtgatgctcctggcgacgtgtagatacaggcaccagtgacgtatgagtaccgagcgtaggtatgggctcaactgattaggtgatgtgatactcctggcgacgtgtgttgggttttatgccc

SEQ ID NO: 405339 - DNA, 692 bp, Cannabis indica
atgggtatagaacatagtaaatagtaattaggtaattaaataaagggtattttctattttttacactttcaaaacaggtttttttttttttttttttgtcatttctacgaaattttacataaaaaactcttattgcaactagcgctgcaatctaaattgtaacaaaaaaattgtatagaaactcctattgcaactagcgttgtaaccactttataaacccaaaccgtaaaattaaaaaaaaaattaaaaaaaataatatatagaataattcaccttaaaaaaattactgatagtcctcttcattaattaatatataatagtcaaataaataataattgtgcatttcacacgtgtgaatgatgaagattttgtgttggagactattccattcaaaaaataaataaaataaatagagaaaatattgtttttttttttttttttttttgtattacaaatagggaaaatattgttgattagtagtaaggcagcgtaaaacatggaataagttatatgtgattacgtagatatccccaattaagcacatggcatctgtattgctattcagttttttcaactgtatattagaaaaatacaaataaaaattatatagtgattctatagtacaatcctttaaaattttggcatttagaaaaaaaatttagtttaatttttttttatatttatgtacgtta

SEQ ID NO: 405340 - DNA, 541 bp, Cannabis indica
ccaaatgcttgcaagaatggagtgtgtcccgttactattttttcagtagttctatgagccaaaagtacttgaggtagttcatcgacccatttacctttggcagcatctaacttcttcttgatagtatccttcaaggttttgttaacaacttccacttgtccattcttgttcctctcacaaaactcggtgaataagtcaccatcgatttgagttccgttatcggacactatcttcttggtaattccaaacatgcagacaatgtttttgacaacaaagtcgaggactttcttgcaggttatggagacaagaggttcaacctcggtccattttgtgaagaaatcaactgctaccactgcgcacttgcctccccctcgccctctggtaagttccccaattagatcaatcccccatatagcaaataggtaaggcgaggtcatcatcctcagttccgtttgtggtacaggaggtatgtgtgaaaatcttagacacttatcaccttttttgacaaactcgtgggtgtccttgttgattgttggccagt

SEQ ID NO: 405341 - DNA, 578 bp, Cannabis indica
aattgctacatattatgttattctaaaaatattttttggtgacatatggcaagaaaaatgatatcacggagttgtgtagttccgagtcatagtagtcgacctgggaggggtccctagccctgcacccacgttgcctctgagaactacaaaatggaagttcggattccaataagttgtttctaactcggtatctttcaatattctgtaccataaagacatgagacaaccaagtccaagccttgagagctgaaaacacacgaaccaacacttcaaaagtcaacctgggcacctagggtttcacctagcgcccaagttgacaacctcaactagggttttagtttttgggaccatcttagtgaaaatcatttaaaatttatattgggacatgaactagacataccaggaacatatttgatatattagaattaaattcagagaacttttattttttagcacctggacacccagtgcctaggcaccacagtgcccatgttgataatttatcaatctgggctacttcctgttggaaatattttacgaggatctagatttactaccatgtatgtttcattaacatc

SEQ ID NO: 405342 - DNA, 775 bp, Cannabis indica
ggatcatataaatatatttattaagtgcataactcaattgtgaagtgtagaggtcaaaattgatgaagaggatcaagctattatttttttggtgtctttaccaaaatcatatgagacactagtgacaacattttttgttggaaagactactttaactgtagatgaggtgtcaactactctttaggagacatatagtatcaagcaaccaagtagtacgtctcatactgatacagctctagggacaaggttagaagcaagtcgtggtgggagtacatcgagagaaagatatgatgacagaagggacaatcacgctcattcatgctctttgagggaagtggagtgctactattgtcacaaaaagggacatgttaggaggaattgtgaagagttgagcaagcatcttgaagcaaacgcatcaagaatgcaaagacacatcaaattccacaaatgttgctggtgaaggctttgaaagtgactctgatgttctctcagtcatagctgatgaaaacttttctaacttttggattttagattctagttgtttgttccacgtgtccgtataaggattactttgacacttataaggcatatgatggttgtacttttttgatgggcaatgattctatctctaaagttcttggaataagaactattaaggtgaagatgtttgatgatgttgtgagaacactgactgatgtgagacatgttccaacattaaggaggagcttaatctcattgggagctttagatactcaaggtgttggaaattatttta

SEQ ID NO: 405343 - DNA, 583 bp, Cannabis indica
aaatataatttaatatttgtatagacctctttcatggtatatatatatatatatattcttatgtgatacactaacccaacatcatttttattagtagtatagaaattaccacctcacacttaaatctatatatagggacaccttaaagctaattaaactaaacatagtacctgctctactataagatagagcccatgccaatgaacagctcctctacaaaacaaattttgttgaatctattatgagtcatggagtagaaacatgtattcataccatgtatatacatatagccttttattacttgtccacccatatactaagtttatactcaacatgtattgtccaatcacatcgatcataaacatcaaagaaaactctctatgtaaaatatgatcatatatacatatgattaaatttataagtatttaaaaccaacattgcttcacactcataaaatcataagggacaaaatctcatatgaaccactaaatctattgacgctcagccatatacaaggcatcgaacagaagtttttaatgttttgctcattgaaaactatattcaatactcattcacttatctc

SEQ ID NO: 405344 - DNA, 523 bp, Cannabis indica
attattaacttgagtacactttacatagcatattatagttcaaataattcaaatattaatgagatttgttttattattattttattatttataaataatattttattattttattaaataaaaataaaaagtcacccatgaatttctcataaaccaagaatttcagttatataggcacactttatatagaatagatatataaatatatatataattatataaacatatatttcccttatccggttagagatccatgcccatctataatgattttagggtgccttcggttaagttttgatactatattaaactagtaaacatcccgcatttcgcggcggatatataaaatattttaaattatatataaaaaataaattacgtattttaattaataataattacttaataaaattatattaaaattttaactttactactaaaacatttgtgacaatacctaaaatattaaatttattgctaataaatatcaaaatttgaaaaatagtaacataaattctcattt

SEQ ID NO: 405345 - DNA, 522 bp, Cannabis indica
tgggtacgagtctacttcggagctcccaggaaggatgccatagattgctctaattgaacaacatgttggattcttagtttacaattttttgaactttatgtgtatttttatgtcatgttgttttgactttaggtttatgtttgtgtttgtttaagtaactttttggagcagtaatatttttaggagactcttgcctattatacttttgaagtaaccttttggtttactagcacattatgttgcagtttttaacttttgtatttttgtaagacaatatgttaatcttttgaaattggaaattagttttagtgtactgaatctttatgtgatattgtttaattttgattatgagtttataaaccaatgacatttatgtataccattataagtggtataaaccaatatgatggtttataaaccaataaaatggttgtaaactaattacagttagtaactgtacatatatttggtaacttgttatttttaatatattatttcatatttcatatggaggaggcaaaa

SEQ ID NO: 405346 - DNA, 542 bp, Cannabis indica
ttcttcttgggtaacacatctgactaatggcatggagacctcgtctgtacataatcccctctactatgatgtaccgtgcgaccttccttctcatttttttcgagctttcattttcgatttatctaggagtttccccagtgttgaggtaggtttgctattggcatcatccagttttggaaaagtgtcaatcatttcaatctcttccgttccagtgatgctaggttcttctagaaactggataggaaccaaattttgcttttatcacttacattactactcacaagccgagctaacatgtcagcagtcgcgtttttcttcccttggaatttttctgggaacgtagctttttgaactgtgtgagcagatcatgtattttgctccaatatgttatcatcttttctccctaagccttgtattctccagatacatgatttaccaccacttgtgaatcattacagattttgatatgttcggctttcatctcctgggctagttttagaccagcgatcaaagcttcatattcggcctcattattggatgct

SEQ ID NO: 405347 - DNA, 1101 bp, Cannabis indica
aaaattacaaaaatatagtttgtttgaattttttaatatttttacatttttttagattttatttacataaaatacagttttttggtgtgtttttctgttatactcttattttgttgttttttttaaatagcttgttcatttgttgttgatttttttgttatttgtatattatttttgagataagttgagaaatatctctgtatctattaattaaaaatatcatcatattatattttattaaaatgtatccacttttatgaatgagttgttcaatataccctcttttaagtctaccacataatttacattaacctaagaaatataatagaaaaattatctataaaagtagatatatcttaaaaaaatataaaaataaagataaaaattaaaacaaataaaataaaatagatatacaatataattttatcttaagatataagcctagcccgccttcacgtaaacccgcccataaaagatcaggtgtatcaatcaacacactcatttcacttttttaggatgttatcctaaactttaatataggggtgtgcagaaaatcatccaatctaattagaatcaactgattcaatcccaaccgatctaatagaatcggatatctaatcataattggatcggatcgaatgtaaattttgaaaatataatcggatcggatcggttgttggattggacatcaggtctaatggataaccgaccaaaccgatccaattatcatccaatgggtcatccaattatatttatttatttttaaaatacatttataattttatatatttaatatattttatttaaaaatatatattaattgatttaattcatttaacacatgagattaaagaaaaaaaaccttaaatttaaaatattaattctcatcttcctaaatgctaataaaattgtcaatgcgtattgagtaaattttatttagtgattttattatgaaataatgagaagtaagttggactaaattaatatttattatgtatgcatgatgttagattattaagtttccaatcaatgcattcattagttagaaccaatccaattcaatatatccattggatcggatctagatcggtatgactcaat

SEQ ID NO: 405348 - DNA, 797 bp, Cannabis indica
ttaaaaatactcttcttaggaccgtatatcccacaaaatttttttgagctttcacttgtttgttgaaataccgagctactttttgctgatgggtcatcaactttatgttgttcgtggttcgctactcttcaatttcatcaagtgattctgcaaggagtacgtgatttgcttcttgtctatacgttattcttctctgggatggtggctcaagttctacgggcagcattgcttcatatccatatgccatggcaaatggaggctattcggttgccgttttctcaatcattctgtacgaccatagaagtttaggaagttcctccggccagttccctttaccgtcctcaagtcttttctttagtgtatccttcaatgtcttgttgactacttcaacttgaccattttcttggggatgcgctattgcagagaaacttttgatgatgccatggttcgcacaaaattagtgaaggacgggctgtcaaactgtttgccattgtccgagactatattgtatggcaatccgaaccggcaaattatgttcttcagaacaaagtcttgaacttttttggatgtaatggttgctagtggctcagcttccgtccacttagtaaagtaatcaaccgtaaccactgcatactgcactccacctttgccattgggtaattgtccgatcaggtcaatttcccaaatgacaaaaggccacggactttgcatctaagttaactcattgggtagagctcacggtatctttgaaaatctctagcatttgtcatattttttaacataggcctttgaatcct

SEQ ID NO: 405349 - DNA, 623 bp, Cannabis indica
cctattcctattctcaatccccagtcccattgcacgacccacgcccattcccattccaatttctattcctattcccattcccattccaatttctattcctattcccattcccattccctagtccattcccataacgattccccaaaccccaaaaccccaaatgcaaaaacttcaaaaccccaaatcccaaaccctaaaacccaaatcccagaccccatcccctaaaccgtaaaaccttaaaaccacatacatcaaacggtaaaccccaaaccctaatcccaaaaacaacaaacctaaaaaccccaaacacaaacacaccataccccaaatcccaaaccctaaaccctaacccaaagacaagaaacactaaaacccaaacaccaaaccccagacttaaaacctcataccccaattacttagtccaagatcctaaactctagaccctagtcataaaaccccaaaccctaaaccccaaaagccaaagactctaaacaccaaaacccaaaccgttaatcccaaaccccaaaaccttaaatcccaaacctaaaaacccaaaaccccaaacccaacacctaatgtaaaacaacttaacccgaaacccccaaacctaaaaaccccaaacc

SEQ ID NO: 405350 - DNA, 521 bp, Cannabis indica
taaaaaataaaaatatattgaaagtaccagtgtaagaaatttataagaattggtgttttatgtaattatcttttttttatatatagtacattttgaattttttgataaaatcaaagattgaacattttggccgggtttgacatgaactcagccaacctgcccggacccgactcatgcgggtcgggtccaacccagtcagctctttcaagcgcgttcagtcctgctttttcctaacctgcaggttcaggttggacccatacccgccaacaaacccaactgattttttttttctattttcaatttaatatatgaaataaaataaataatgtattttttatttaagattttattaaaaattatatgtatatgtataacaacaaaagtaaatattaaaatataaggttaattaggaatttctcctcccgaactttgacatgtactaaattatgctccctgaacttttaaggtcgttaaaaattctctctgaactattgaaattgttaaatttaaggacttttgtc

SEQ ID NO: 405351 - DNA, 631 bp, Cannabis indica
gttttgcgagttgtgcttttagcacctggaagatttttcacattccttcgtccgctcgaatatcttgtttcctcgcaggatattgaagaatgggacacacttgtctgttgattttgaaacaaatccgctgagcgcagtgatttgaccagtcaaactttgcacttccttggttttagttagccttcttatccaggagggcttgaatcttctcttgattggcttcaattcctcgagcattgacaatgaagcccagaaactttcccgagctgactccaaaggagcacttttaagggatttagtttcatgttgtatttcatgaggactttgaagcattcgtccaggtcatctatctgcccccaaccttcctggatttgatgaggatgtcatccacatacactttcatattttgcctgatttggtctttaaacattttgtttaccaaacttggtatgttgctttagcattttttagaccaaacgacattacttcgtagcaatatagacccatatctattcagaaacttgtatgttcttggtttggtggatgcattttgatctgattgtaccccgaataagcatccatgaagcttaatatttcatgctttgctgttgcatccacgagttgatcgatt

SEQ ID NO: 405352 - DNA, 544 bp, Cannabis indica
tatattttaatattttcttttaattttataagtaatctatttataattttatttaatttttcttttatacttatttataagatatagttatatttttattaataatttttttcaaatataatttattttaatatatgtgaagttatttatttatctagaaaataaatataacctaaattatttttgaagaaaatattcgaattatatttctttagcaatcttgagccattgttaaatttttattgtatagttttttatcgatgtaataagatcatatgatcttggatttataaaatttataaatttatgtatttctaattatacacatatgactccttcttaggaataaattaagttcataactattgaacctgaacctgaagttcaatgttcatatagtatatatgggtttaaacaattattgatttattgtgatatattgaaatccctacaggtgtaataatattattagatatcacaatttttataggattctcttgatcagggggagagaaatacagttgggatcgatgataatttttga

SEQ ID NO: 405353 - DNA, 690 bp, Cannabis indica
gggaaggtcattggtcctaagccggctagtggagaaagacttgagaacgctatgaagagtattttgaagtttaatcatttattttaggttgaggaattgagtgagaagaatgtctttcaattcttttttggaagcaaagaggattgacagtatgtttttagtggtggaccttggacgtttgagaagcaactattatgttttgtgaagccaatggaattaggacaggtatctaagatgacttttgaccatgcatctttttggatctcaattaacaatgttctgcttgcatgtatgtctgaggtgtttgctcgtgaatgggagagcttgataggggaggttgaggatgtaagagtggctaatagagttatgaaagttcgtgtgcgaatcaatattactagacctcttaaacgtggcttaacagtggccactaatgagaaggggacggaggtatctctactctttcaatatgagcacctctcaaaattttgttatgattgtggtatcattggccataaagctttggattgccctcttaaagactttcaagctaatgaaacaggactagttcagagtggacgctatgggtcgtggtgtgctccaagctcttcgcctagaattcagagacagtggggtggaagtaaacaaactaagtttgggggtgagacattttatgaacatgagagaagtggg

SEQ ID NO: 405354 - DNA, 534 bp, Cannabis indica
tttttttttcttgtcagcgaacaaatattgttagaatattataatcaatacaaaatagtattgttcaaaactgttcgaattttgttttaaaaaaaaaaaaaacaaattgttcgactgttgagcttgtttttataatctacaagctagaaaaactataatgtgtaattaaatttaaataatgacttacttgaacaaaattttatgatcgaattcatttttcttttaatgtataattagtaccacgtacgtagattatactattggttaaaaaaatgattaattatatttttattagaattttttttatattgaatttgcaatatttttttgttttgtttatttatttttatgatattttattttattttattactttattgttttaattatttaaaattttgggttacattacacttgtaacgagagtatatgtttatgaagtattaaacttaaataaaatgtgatacttagtatttttctccatatttttaagttaatattgaaatttaagtgaataattggatatatatatat

SEQ ID NO: 405355 - DNA, 571 bp, Cannabis indica
attaatgattttctcattaaattttgaaatgcatttaattagtaaatgtagatatttgaaacaaaaaaaaaatagattaaagttgaaaattaattatttaatgaattttaaaataacttaaatcaagttaaatttttcattaatgatttattaaaataaatagactaaaatatatcatatatattttcattagaaactaagtaatcagttaatgaaatatctagatggttattttagtagacatttggtatttgtctaaatatatttaattaaatagaaaattgatattaaagttgattttatttaagatacttaaatattggatatttttcttaagaaatttaattaaatagaaaaattatatttgtgttgaaaattaatttataaattaattttagatcaacataaattagaataattttttaggatttcttttattttagaataattttattttagatcgattttaattggattttgaaagtgtcatctaataactgattcaatccaattagaattgaacaatttaaatccaattcaatcataattagatatttaattttttataatt

SEQ ID NO: 405356 - DNA, 710 bp, Cannabis indica
aatactatatcataatagaaatattttagagtaaatataatttcatacatgtattataatttaaaataaaattattaattttacataaataaatttacaaaatacatgtatatattttattaagatgtaattattcttatatagaggtatactttgttaatacgggacttagaaaatgtataactaattacaatttagaggttattcttatttataactggcccaaatcgggacttgatttttttataacaaattagaggttattcttgaatagagtattcttaaatagaggttctactgtatcaataactacaatacataaaataaaataaaaaaaacttaataaattaatatgtatatatatgttcatataacggtcggttttagttttttcggtcagtttattacccaaaaaaaaatcgaccgttcaatggcgattttaaccgttagcagttttttttggttttcgatttccctggttttggttccaacaatgttcggtagattggtttgaacagttttttaagttttctagatttcatgctcagccctagagttgaccttaactaaatcttttgtaaatattataatataagctaatacagaccatttattatatattaaataatataacttacattgtattaaaaaaaaattatcttaataattaattaatataatataatgttttatttaataataatattatt

SEQ ID NO: 405357 - DNA, 1567 bp, Cannabis indica
atgttatgcctatcacaagtatcactaatatgaagcaaggggaacaaaaaagcttgtgaagctacatctagcgcttcaacgttgaagacatcaaattagggaaagtgtccaaagatgagctcaatattaacgtagctgctggagtaaaccgtggaagtggactatgggagaacatgttgaaaagagaatgtgatggcatagatgacttttacaagagagcggagaagtacatccgtgtggaggagggtaacagagtcttgaaaaataaacacaagtgagtgttcttcaggatgcttgtcagacccttatagggtctgataggcgatacccccaacacttgtaaattgatacatttgagtgaagcctttaacatataacctgtaaacattaaacatccaagatattcttcagagtaaagttctttaatttccaatagacaatcgaggagagcactccttacaatggaaatcctatctttaatacattgtactaacttaaagagggcaccaaagttgatctccaaaaatagaaaatgcacccaggcgcttacgtatttgaattatcaataaaatattaaattttcactttacaggtggcattcattactctccacctacccattcaacttgttcattatatttgtcaatcgaaattatcaaagtgcctaacaatgttataaaagtgcctagcaatgttgaataaccagaaaggggttaaaaaaaaggaaataggaataaggaaggagtatggctatgagagggacgcctctctaaaaggagtaccaattttctagcatttagaaatgcactctaagcaccacgaatgcagtagaaggggttgagcattgcctaagaggccacaagctctcctaataaaatattataccattaaaggggttgagctctacctaaggggtcaaagctcccccaataaaatcttaaatcttaaaaaaggtaagcgttgcctaaggggccaaactcccttacatctaatgagtaactgagaagaggtcgagactgctctaagagtttatactccctccatgaaaaggttacaccagagaagaggttgagaaagtttaagtggcaaaatgctccctcaaacaaatgataactcataaaagaggtcgagaaagctcaagaggctaacactccctctacgtgacaaatacccaccatgaaaaggagtagggatagctcctagagccaacactcccacataaaggatcgtagcaagaagacctcagggcataagcacctaaaggggtagccattgaactgaacgatgggggcaaagatcatcaaacttagtctacaagaacacttataagaatttgtatagactagggggcaactgttaacctcaaaaattaacaaggctaactttcaaaataagtcaacattaattcaagatattagcaggactagctttcgaaggtagtcacgggtcacccactcaacatgcatgctcaagtagccactcgcatggattctcaagtgggcactccatatgcatgcaaggcagccacttggtatgcgtgctcaagtagccacttggcatacactca

SEQ ID NO: 405358 - DNA, 707 bp, Cannabis indica
aacttgcatcagatgaagtgctgctattagcaaaacttgactttgttgactggtataatgctcaaaaataagacttaggactcctaatgaacctaattgggttcaggttgagcattggacccctctagattttcctttaaccaaaattaatagttgatggagcactttttacttacgagaagtgctttggtattggcttggtcgctacggtctatagctggtatggttattcaagccaagactttgaaaaaggttggtgcatttcagcctcatgaggttgaagccattggagtaaaagaagttttgagttggatcaaagacaatgaatggacgagcgtgattgtagagtcgaattgtctaagagttatttcggatttacaaaataaaaaaattatggcttctccttatggccatattatttcagattgtaaggctttgtttgccgatgtgataatatttcttttaattttgtcaaacaatctgctaataagattgtgcatgcgttggcgcgatcttctcttatgaaggctaatcgtatctttagtagtatttctttacctcctgtaattactttctttgttttgaaagatttgaattaacgaagtttcattatcattaaaaaaaataataaaataatattagttgttatttataatattaaataaaatagtaattattctacaaaaaaaaaaaataagtaattaatt

SEQ ID NO: 405359 - DNA, 185 bp, Cannabis indica
gattgaattcagtgacagaaccgaagaagccaaaatgggccaagagagaatgagagagagagatatataaatgaccaatttttaccggaggcgtcaataaacggtcattcgacaaccgatcccacaccaatccaccccgcgtcgtccctgtccaacagattcataagatagaaagcatgaggata

SEQ ID NO: 405360 - DNA, 530 bp, Cannabis indica
tttttataataatgttggcgccaaattatatttttattagagtaattttttaaaaaaattattcatttcactatatatatacacgaagaaaaattatttattcttcttttaatttaatttttttcaattactagagaaaagctcaatataattgttcctagattaattatatactgttgttaaggtaaattgtacttactttgctttgttaaacttaagtatgtatatatatgtaacgtccccgttttaaacttttattgggtctttacacccacgtaataatgactcttatacacgagtacgtcactctggctgggaataatggctcttatacacgagtacgtcactctggctgcttcatggactgatgactggccctacagaccaacataagtgttttcagcatgctttgtcctcactcgcacgcttctttggaaaacttcccaggaggtcacccatcctgaaattgctccaagtcaagcacgtttaactgtagagttctttcgagataggctaccaaaaaacaagat

SEQ ID NO: 405361 - DNA, 521 bp, Cannabis indica
gaaaaattctcattgctgtcacatgttcgttctcagtttcagaaaacaacatcaatgtgaaaatcttttgaggccacttgtttccatcagtgaaaggctcatctcttgctttagcgaagcccctgttaagtgacaatttggcattcacattcaccctttccttggtagattccttgatccaaaggatccgaaatcgattatttacctttttccttttaactattctgaaggattcttgataaaactctccaatgatgaatgactaaacagggatgaagagcggcataacaggaggtttcatttgaagtttatacaacaaaaaaaaattaataatcttcgaatgattagagcatgtttgatattgttttctgtttttttgttttaaaaaaatgtttttagaaatgagaacaaaatataatttttgaagtttttaacacacaaatcatgtttggctagtgatttttaaaaacaatattgatcaaaagtgaattggtttttaaaacagaaaacaacattttgtt

SEQ ID NO: 405362 - DNA, 552 bp, Cannabis indica
acaatccgactcaacaacaacctgtgaccatccatttgttttactccaagagagaacttccttgataccaatggcttcgacaatatgaggttgcaaagagccttctctagataaatttctggcccccaagaccaaccccgcagcagaccttgcaatcaagcccaatccataccgcccttgggcagaaaaaagtgcaccatccacattaactttgacaaaagggaaatcggaggctgtccattgctccacgggtaactttgacctaggtaacattgataagatgattatttctcattattaattataagagattttcactaatacaaaaatatttaaattttttcatttttaacttacaatatattaaaaacataaattagcctttttataacaatgtgacttcatttttttttatcaaaataataatgtaaaatattaaaatttacaaaataatctcacttcatttattttccgaactattgagattgttaaatttaagaacttttatctaatttcattcaattttactatttctatgtactaaaccatgct

SEQ ID NO: 405363 - DNA, 566 bp, Cannabis indica
ttagactaatagtctaacatatatatatattctatttgtgaatgtttgattaagatgaggtcttataagcctcataaaaggaatatgtactccaaaatagtaaggaactatactttactgtatactctagtaattaaaaaaaagctacaaattttgtgatcccacattatggttcaattttgagacgagaaactttaataattttgaggatgttgagtttgggggagaaataagattattatagatattgttcttgagaaggaattgacgttaaactcaattccaactatcacttttgacaatgtttaggttttcatgactttcattgatcaataagtgaatccagaaccttgataagacaatatcaaacaacttctcattcaagatatggtaaatgtttcagataatcaaactcaacaacctcaaaggtcagtgtcattaaagaaatccatgagagaaaggacataaggaaataatggaatgatagacgatgatccaatcaacttttatcatgccatgaaggttccaactctcgaaactggactgatatcataaataaagagtac

SEQ ID NO: 405364 - DNA, 570 bp, Cannabis indica
ttgtgtctcttcctcttgtggttagcagcatttccatataccagaaatatccatacccaattaaaaagaaggaacactaaaatttaatgcttaattatgcaaagtgttcatattaatcagcctttattagttaccattgcaattggagtagcttgctgcactttacatagatgttagttagagtttcttttagtagcttactagcttctatgtttgctgtgatcaaatccataaactagatggatgataaattgttaagacacaaaagaattagaccatctccaatagagatgcgaatgcaaaatatagctcactttgttaaaagtttactctaatagtgtgttaaattataatgcaaaaatctcatgacaataaatgctatgttcattaaactatttttaatattttattattaaattttagtttacgggtccggggtcccggatccaagtctgggttcgggtccgggtcctgggtcccgagtccgggttcgtttgggtccgggtcttgggtctcggtgttaggttttatgccctaaataaaactccatttcaatgtaatctattttat

SEQ ID NO: 405365 - DNA, 560 bp, Cannabis indica
ttcgtggcggtttgtagttgccctcggttggtagttcgtggactgtaaagatttagggattatagttttattttgaatgtatgtaaattctcttttttttttaattattctgagatttgttttatgttgaaggaagttatggaacaatattggtcattatttgagatttacagaagcaatctggaaaaaatatttaaacatgtggaggaacttgcatatgcgtatactataaaaatcaaaattatcatctttggacattgcttcaacattcaaaaacttgcttttgtgaaatggtgtgggaagatataattaatataattaattaaattattttgataaatttataatatataaatagaattttaaaatattaatatttatttttttttataaaaatagatatagtgacactcttaaagagtagccgattctgacaaagtatgactctaaacgcctatagtgacgcacttagagtgactgtaaaaggggtcagtgacacatgtgaagtgtcactaaaattgtttttccagtcaccctcatattagtgacgcgcagtgaag

SEQ ID NO: 405366 - DNA, 745 bp, Cannabis indica
agactccgacccgaacttagatcttagaacctgtactccacgccccgacctcagtgctagaaacagaacacagtatttttttttttttataacaaatcactttcaaatacagcacatttttattttttaaaaataaaattttaaaaacacaaattttactttaatttttataaataaaaaattaaaaaacaaataaaaatattactaaacataaggttttcgctaggaacgatagaaacaaaaaaaaaatataaatttggacaccataaattaaaaagtctggcaatctgataaataacaacaacaataataataataatagcaattttttttaaagaataataattttattaatcaattaatttcagccatgacaatagataaaacatcactaaggtggtgtttagttcacatgaataggcattggaatagacttgctattccttaagagagttcaatcaagtgtttggttttttttattgagaaatgatagtaaatgaccccaaatcataggactacgttagtttatgtcctcatttcaaaaaaatatagcaaatgaccctaaatcataagattatgttagtaaatgtcctcatttcaaaatcattaaattttattttttagaattagaagcaaattatttaaacattatggtatatctatattagttttgttaaaatcttttttatttaaaagttatgccaattttttatgagttgttttgggttattggtatattgatttt

SEQ ID NO: 405367 - DNA, 555 bp, Cannabis indica
aaattgatttaaatttaatttttacttacttcacaatcacataaattcaaaacaaaccacacaattctaaaatttaaaacaaacctcttataagattttaagatagtatcattcggttacttactctgttcttgttagaaacttggcttcagcgctttcaatattttcactataattagtcatcaatatgctcatctttagtagctataaattagaatcttcagtacatttaattaatttggtaaaaaaaattcattcattgggataagataaataaaaaatccttaaagaagaaagtatttttagttaatgaaattaatttgacgagtatatataaaaatatatatatatattgttgactggatttttagccaaccgacgcggagtcgtaataaatgagatttagaccaaaatcacaataataaatgcagttaataatgtcggaattcgtaataaatgtaaataaaagacaccggaatttaaagaggttcggccccggatgtcggtaatagcctactccccttgagttttattgatctgagttgcaatagtcaa

SEQ ID NO: 405368 - DNA, 597 bp, Cannabis indica
ttttgacagtgaaaaaaccagttagatctttgttccaaaaccaactatcactcgcaagattaacactcaaaggcacctgtttgatgagctcaacatcacgggaatcaaacaagtcctcaataagctccaaatcccattgtctactacttggcttcatgagttgagacactttacaattggtcagtgccggatgattagagaccacacacgggttatcctcagacaaaagccaaggcgtgttaagcacctcagtagatgaaccaggtcctattctcctacgagcaccatctttgagcagcgtttgtgactcaaagacactacgccatataaagctcgaattgccacccaactcggcctccaagaatgtacagttaggaaaatatcgagccttatatatccggcccacaagggagtcctgatgcagcagtaaccgccaaccttgcttacccaacaaagacatattatactcacgcaaactccgaaaacccatccctccagaggtcttatatttgcatagattcctccaactaaaccagctcacccctttcctaccactcgaactccaccaatacttagacataaggctttccagatgtg

SEQ ID NO: 405369 - DNA, 1066 bp, Cannabis indica
agagaagaatagtaatattaatataatgagatgagccaaggaagaaccattgcaatgacagtaaggctatacaagaatcaatgattactcagctattttggagaagacattttggatactttgtttgaaatttatgacaaacatgatagatcaaagaaattgactaaacaagatattaggcctatctacttttcttgctgttacttaacaaattgtgaaccgttaagtttttttttgtatgttttagattttgctgtattttgaaaaggtttccttgcaattaatgtagtgaaaaagaatcaaggttcattgtttcaaaaaaattgtgaaagtgctttattttattttttattttttttttgtgagaaaaaattacattttgcacgattttattgcaataataagttcgaaattaatttatattataaacacaatttattgagttttgtatatattattagggtttatacaccacatacaaaaattttaattttttaatttttttttattgtggagtgaaatttttttcagaaatactatgtttttttttaaaaaaaaaatattatgtaagtcttatattgtgtactgtattaaacttttattattgttttacagttattttttagttattttactgttgttttaattgttttattttattattttacggttgttttaaaaaaaaacaatttgtaacaaaaatttttgtcgcaataaaaatgtaatcttttatcgaaaatccaatatttttgttcaaacctctatatttttacaaacatgttacatgtatttacaaatttgtatataaatatgtaaaagttgtttacaaaatatatatatatatatatttatatatatatatatgcaatttcgtaagattttaaaatgttattaaaattttgtgcatttttgaaaatttccctaattcatattgtgaattattgggcctaaaagccttaacagggataagttgaaaaataccacttttattaatcaattgatcaaatttacctctaattttatatttaattgaaacatacctctttttatatgtattgtacccaaa

SEQ ID NO: 405370 - DNA, 651 bp, Cannabis indica
ataatataattaataaatttattgtaaagttaattaaaaaatagaattagcatttaattcaaattaaaactaaaatttatataaaaaaaaataattatctaattttgttaatatttttaaattaaatttaaatcttcaaaattatttttttccaaaaaaaaaaataattaatcaattgatttaagagttaattttaaccattactttaagggggcgtttggtacgaggtgttcaaaataatttgattatagggaatattatgaaggagaatataattatagggaaatgtgtaaactgtgtttggttgtgtagggtaatatgtaatcatattcctgttaattagattagactgtttggttaagtacaagaatcttatatattattttaaaaaataaaaataaaaatattttttatatatttatttaatgttaattatatataaaaataaaataattatttattaaaaaaatttatttattaattagtaaatattaaattggggaatcaccccatatactatttttttaacttttttttttttttcaaatttacggtttaggtttctaaagtggttgcagcgcaagttgcaatatgggtttctatacgatttttgttgcaatttaagttgagttgcaatatggatttctatgt

SEQ ID NO: 405371 - DNA, 1131 bp, Cannabis indica
tctcaaatcccgaagtcggtggttcggaatgagtccaacacaccactttcggaaagtggttaacaatttctcatccggtggctccaggggatcaaaagtcgaagatggcctatgtctcctcttcatctccgtatagtcaccgaaccatacaggaggctttctcttcctcttccgactcttaaccactgcaggttgtgcctctatggacagaatctcaccctgcgactcggtgtcatgtacatggataagaggttgtgcctcgatcggagtcgctggagctccctcataaggatcgtaatcgtcggggaagacctcatcctcttctactgggggtgaagcagctggtggtggggtagatggatctgctggggcctccggtgctgaagctgtcgttggcggacgattcaacatggccaatatgtctctgagctgctccataattacgttctgaccacccttcagctctacatggctggtctcgtatgccttcttcagctcgacatgagcagcatacagaccctgagtgtcagcctcgatcctatccaaccgagccactaaatcagtgtactcggcaccccgaacgcctgatgaagatggtgcactgggctgaggttctgaaccagtggcctgaaaaaatatatatcaaaaaaatacggtaagcatacgatataccctccactatataaaaaaataataaaaaaaaaaataagcatacagattataaaagattaataagagtacaatataaaaatacatcaaaaagatatattttctatgaataaaatcgtaaaagtatttaaaattttgtataagtgtattttataatttttgtgtatatatgaaataatctcttttggaagggataattataccatatactgaaatttttaactttttatttttatattgtgggacggaatttttttcaaaaatactgtgtactgtgttaagttttcactattattttacggttgtcttttagttattccactattatttttagttgttctattttgtgttctactgttgtttataaaaacatagttttttttaaaagattttcgagtgtacaatatttttgtaaaaagttaacttaaattctagtatttttgtaagttttccttttggaac

SEQ ID NO: 405372 - DNA, 506 bp, Cannabis indica
ggctgcaaagaaatgcatacacaaattcgttttaataaatcaaagtcaaattaccaagatgataaaaaaggctatcattgagcccttcattgaaattcgatccaaatacaatacaaaaacgaaagaaacaaaagatagaagaggaaattctaaagaattcccaatttcacaaaacagttcacatcaccctaaatttcctctctgatatattactctttaacaaacattacctaaccaaaataacaaccataaccgctcaacacttacctccctacgcgtaccaatatgccctgacactaatctgattctaagcaattttatatattgtggatgtacacatcaaaggacaaatataaacatctattacagtacccaagaagggtagcgcaaatggttagccaagtagtttgctcccgcaagtatgaggttcacgtttctcttaggtacctacatagcaattgctatcgtttcctgcttcccataggttaggccaggattctagtttc

SEQ ID NO: 405373 - DNA, 501 bp, Cannabis indica
ctcgggaacccttggacttagtatctttcgaggcaagagggtccacggtaggttgttcctcacagagatcaatgaccttttcagctggtgccttctctttggatggagtctcaccgccgttagacttcttggccggaggggacaagcccgagcttcctctcactcacttcttcagagcctcaatcatcttttgagacatttctatacaaataaaaaaaaataaagtcagaagaaattataaaatatatgaaggcatgaaaagaaaaattaagaaaaataaatgcaaggtgaagtactttggatgctcgcacgattatttgcccgaacaagcacagatggggcgtcatcatctaaagagtcttcctgctcttccaggacggctttcccttttccctctacaagagttgatgggcaggcaggtacatcaagctccataatctagatagtatgttctatgggcctctactcggttgggagggttttcttcttcttgagcagcct

SEQ ID NO: 405374 - DNA, 443 bp, Cannabis indica
aaaatttgaggtagatgagttgtactgttatatatttataaatatattgatcggtttgactttgatatataagttatatttcttctaaatatatgatttaggtttacttatttgaagtggatcataacaatttgacacgatcgtgttgttgagttttattggttaatttatgtacgtatatacgacatgcatggtattgttgtattgttctagatcagcaattgttatgaaaatataatatgcatgtttgttttatatatcaatgtatatgtatgttaactactttgggaaaatgaaaagggaaatttgacatatacttaatattttatctcttaactaatacatatcaccattgaaaatatatgaccactttatctaaatccaataatacctctctcataacttaaccccatctctctcgcatttcagcacatgcatcggac

SEQ ID NO: 405375 - DNA, 502 bp, Cannabis indica
tttaatatttcccttatatcattgaaataggaaactaaaatgataatatcacacacaatatcttaaagtttaattttctaaattaaattaaatttgagatattatcatagaagaaataaataattattattctccaaattttagaataaatcattaaaataccaactaaataatcctaaaagaattttaaaacttaatttgtcataaaaagtggtaaaattctaaagtcatacaaaatgatacaaaattccaaatgaattcataaaaattaattagaatattaaagaggtcattcacctcacaaaatttcaaagaggtttctaacctcacaaaaatctccaaaaaaaaaatggtaatattacctcaaaattcataagtgcactaaaattcaagtttataaaaaatggcatcccaaaaagaggtcattcaactcttaattatcaaagtatcacaaatctatattggaactacgtttgacttgttgcgaaaatttataatcact

SEQ ID NO: 405376 - DNA, 612 bp, Cannabis indica
tcacctcgtaccaaatctcatcacctcataccaaagatgatcacctcgtaccaaatctcaacacatatcactttggccttaagagtttcctcaccttgtgcatcatctcggcctaaggaggccctcaagacactcacctcggcccaaagtgatcacctcggccatgtaactcctcatcacctcggtttgaaactttaaacctaaattcaaccatgttatgttcatattatgaaaaagacaaagcataaaagttttagaactctttctcaacttccaaaacacatcttgaatcagttcatttggaatttagatgtgagtgttatgaatattttactgagagatgttgaagcaagaaaataatcacctcatatcgacccaagggggctctagcacctcatcttggcccaaggaggttcaacatgaatcaccacggcccgaggggcctcaacatgcatcacctcggccctaggggcctcaaaatgtcatcttggccttaagggaaaggtcctcaccttagcacgtgcttctcatgactcgttgtgtaacgccctaaataattaggcacgctacccaaaattcttatgaaaccctaatctcctaatcgggattact

SEQ ID NO: 405377 - DNA, 799 bp, Cannabis indica
gcaatcaaatagagagtaaagaccacttattctttcaatgcagcagaactggcagcttgctccaacaggtgaaggattggattggttggaagtcccctgcatctgatctgaatgctttgatccgaagcattggcaggtccaaaagaagcaaatttcagcagcaggttctctcggctgctgttgctctggtttggtatattttatttggctgcaaggaaatgaaatattatggcagcagaacccgaaaactctgcaaagtacaggaacttaaatggcagatcaaaacagaatttcttgtgtgttaccaaaaaaaatcaaacaagaagatagaatgtggcttgatagtttataattgtttgtatagatattttgcatcctttcataggagtgcttagcttgtaaaaaaaaaaaaagaagatttgtgcaatgaaactttttgattcatcaaaaaaaaataaaaaattttatttaattaatttttagatcaacataaattagaataattatttccatgattattttattagaaaataaattagaataattttaaaattaatttttgaaaatatatatttttttaaattacattagatttcaaatttaattagatatatatatttatagaaaattaaatttaacttgaaaattaatgttaattaatttttagactaacttaaattaagtaattttcataatatttttaaaaaattaaattctaaggatggaaaataaatttttatatttagatctatctaagttagtttttaattttataaatattaaattaaaatttatattt

SEQ ID NO: 405378 - DNA, 685 bp, Cannabis indica
ataaatataattccaacactaggtccatcttctgcccctttcggaagttccatggtccctggaaatagatgattctcaatattttctgaagataaagatgatgctcgaaagaattttgagaaaactccattttttgcggcccaggttggcaaattgtcaacctgggcgcagagctagccccaagtgtcaacctgggcgctaggccccattatttgtgcccattaactgttatttcccctggaaggacctatttcctcatttttgatgaagatggatttaatgtaaaagtcaaatattcgatcaaacacttggaatgcactcagattgacaaattatcaacttgagcgttgggtgctcggggtctcgggtgctcaaaaatcaacttgttccgaatctgattctgatgcctcaaacatgttcgtggtatgtctagttgatgtcttaatgcaatttttggccactttgcactaagaagttctcagaaactgaaaccctagttgagaaatgtcaacttgggcgctgggtggaaaccctaggtgcccaagttggcttccgggttgcaagttcatgtaatatcagctctcagaccttggattaggttgctctatatcttcatggtaccaaatattgaaagatagtgggttggattaaagttattgaagtctgaacttccatcccggagatc

SEQ ID NO: 405379 - DNA, 749 bp, Cannabis indica
ataattaaataccattattgataaattatgtgaaaattaaacaaaatcattcaaacatggaaagaaaactggcagaaacttctaattctacaacaataagatttaaaatataagactcacaagtaaaagagactactagaaaaagtttagttgggttgatagttttacaagtatttagagctatatgactcgtatttcagccaaactttaccaaataaacatcaaacactatcaaattcaccattcgctttcataaaacacctttaatactaaaaatcccatctaaccaaacacattaatacatttcgaccacaactaccaacaccacattcaagtttaatttcataatcaaaagacataaataatcaactctaacctcaaccccctaaaacaaaaacaaagaaacaactttgatggctttatcatcatagaaaaatcaatgtaaaagaactcaaaatagtaaaaccacaattgggattggtagtagccagtaggtagttaccaaagagtactaaataagtacagtcaaaaataagagcaaagtaaattgattagactataacaatgagctaataataataacaagcacaatctaaaaatatgttaaactgaagtccatgatgcatgaatttcactatcactgaaaatatccttgtaataaaaagcttaggtcaagaaaaagaaagaaagaagaaaaagcttatcataacattaaattctatgtatatatatatatatttcattttttt

SEQ ID NO: 405380 - DNA, 1243 bp, Cannabis indica
aaataaaatatttacccaaaaataaaataaatgaatgtcattaaattttgtaacaattaataaagataattaagaatgtttcaaatcacctatctaattttgtattaacttgagtcaagtcaatagtatttctgcaaattacaaaaatataactaattttctgacctaaaaaaagtcaaaaagttatcaatttaatttatacttttctttttaattacgagacaaagaagaaaacaaatcttttatttttaattagcctttgtaaaatagaaaataatgtaattttttttatgttttagacaaaaaaaaaaaaaacaaaaaatagattattaaagtctaaaaagtaaatatcaaatttaaaatatttcaaattaataaaataaaaaatatttacagtaaagaaactaaattgaaatataatttgttaagtattaattatcttttaaccatgaatattcattgaaagtattaattagaataaatattgatttaaagttagtatacatgtctcatttgttaattgattagacatcaagttgtaacaccaaattaaaggagtattgtcatgggcataccaagatatataatactacattttataattgattagtgattttatataatttttattaaattaaaataaataatgaggcccgacattaaattataccaataacgatattatatccgtcaacttatttgaatccgtttaacaatgtaaaggaaagtctcgtaatagttactcagcttgctaggcgttataacttcctctgatcttgaatgggaataataaaacatttgatcgattaattaagtattaatattaatttaaaatgtatgagagagagagagagagagagagagagagagagagtgtacttttagaaatggaggggggtaaaattgggtttatgaaaatatatcccactttacaaatattgtatagtatgagattaggggtccaattttaagtattattaagtatatatattcaaatttccttttttttttttaaatacatttaaagcgaaatgtacaaaaactttcttaattttattatttcgtggggcccatataaaatataaattatttataataacgtccccttaatttacattagtgtacttttactgttgcataaggtgtgttccatcctcattttttttgggtaactttcatcaaccgacgccattgatatgaccacataattaattatatctatatatatatatagtatagtaat

SEQ ID NO: 405381 - DNA, 635 bp, Cannabis indica
ctttttccataaaacttaccatgcataactgataattcactactacaaaacccccctttagaggcagtttttaagccttttcagcgtcggttttggcgaaattcgctactgacgctgttcagggcgacgctaaaggattttaaaaaattggcgccataggggtatatatgacgttggttattagctaggaaccgacgccataggggtatatatggcgtcggttcctagctaataactgacgccctatgtggcgtaggaactgatgccatatatgagcgttttccaatttttttaattttaaataatttattttaattatatatttattgatttatatattattttatttaatttaaatttaaattacatatttattttttaaaaagtaaattaaatattatttaaattagttttaaaattggctaaaatacataatttcattgcataaaagtaattaaatattacacaaacattgtaaaattagtctaaaatattaataaattaataaatctaactacaagttaatctaaaaaaattacatagggaagaaaaattcttgggcttttgaacctcaatcgtcatcgtgaatcaccgacatcaaccgttctatccactgtcgctgtaatggtgacaat

SEQ ID NO: 405382 - DNA, 542 bp, Cannabis indica
tagaagggtatctcaaaaaatggctggttgtatcccagtaacctaagcgacatgtgttttcgagcatgatcctgaaatgactgggaaacaccgaccgttctgaggaacctaactaatcacaacctgcgaatatgtcacgcatctccagctggcgatgtacctcaaaaaatggctgggagaatcccagtgactcaaggggcatgcattccctagcatgaccctgaagttactgggaatcacccaccgtttcaagcaaatctgctagccaaagaatacgcttatattggaacactggcgtatgccacaaatggctgggtgtatcacagtacctcaaggaacatacgatcgcacgtatgagcattggaatactgggacatgcccaccatttgaaagacttaaccaatgttcccgcaacaaaatatacagagtataaaatcctaggttttaaacaacgactagaagcaataaagtctctgtgaaacctagggtgagcaggcatgcgagtattcaaagtgttcatccgaatacccgcgtgtattcaa

SEQ ID NO: 405383 - DNA, 664 bp, Cannabis indica
actttgagctttgagttcaaagtatcaagctttaatggcaactcgagtattgatggattattctgtgaaattctggttggaaatggttgtttatgcattgtataggtaccctggagagtttggttaagtttggttaagttttgagttcaaggggagatttttcgggttcccagcacagaaccagaattccggttctaggggacctgtggcaaccagtcgaccggttagtgacccagaaccagacttctagttgggaatctgccagttgggggaatttttggaaccctagttttgcccaattttgagatatttagagtattgccatgttgtttatcgatagggaaacttttagtttcaaatttaagtccccggaaagtgatttagcgagtcactcatctgtgttacaattaatgtgattagggcatccatctagcacgagcatttccgttcaggtcggccagcacacttgaattcggaaaacaggtaagaactgtatataatatgtgatatgaatatctgagtgtatgtatatgttatgtgtatatgcatgcttaaaatgttattcgcactaccaacacttatacgattatagtatagagtgcgttggtacagtgaatgttatctgagagtacagtgataccagcataagtacggtgaggtactg

SEQ ID NO: 405384 - DNA, 1079 bp, Cannabis indica
ccaggtttggaatttaaatcttgacccaatgaccgactggttttctagcttattgaggtcttcattggttcctcttgcctcaaaaatggtgagttacttcgttgcagacttggcacaactccccacaaggacatgggcttggctctaacctcggtaagtctataccttgtaatttatttctcttttttccactattctttgctaactgatgtgttaaaatttagaacagattactgctgaagccggtcgcctatccaagaatctaattgatcaaggatatgttgttgctaaacacgatggcatagggggaatgctcaagaaacttaaggaagcgggggagcagaaggagaccctccataacaacattttggtggagaaggcactcaaggagcgggagcagaaggctgcagaggaggctcgaacgacactgaaggctagctaagatgagttagtcaaagttaaggatgacttctagggttgtcaagttatgagcctctcatattctatttataggattccttctagggttagaatttaaattatatggaaattaaaaaaaaaaataatggctaaattatcccttaagtggccgaccatataatgggcccaactagtttcaattttgctatttttctctcacaaatactatattttagttttaaacctttaaatgtcaaatttatttatttaataattataattaattatcaaataaaattatcatttaacttatttattaattagactttacaaagtctcttaattaacaaataaatccaaatatatattttcttctcaattaagcccttgcttaatcataaataagacacagtctaatttagaattttaattatttaattaacaccaattaactgagtctataagccaatatcatcttaactagtatggggaccatgagcctatataatcaagcttctaataagtagacccgaaatttatcaagtaaatttcttaacttattaattcctcatgactccactatagattcagaattgtactcttaattatataaaacgctcgatatgttccaaatatagatacactattaattatctatt

SEQ ID NO: 405385 - DNA, 790 bp, Cannabis indica
attggtggagcaagctattttctgagtatagtggatgactatacaagaaaggtttggattttcttactcagtaaaaaaatgactctgatagcacatttgtcaattggaaaaccttgattgaaaaccaaacaaataagaaaattaaattgttgagaactaacaatggtttggagttttgctctgatgagttcaacagatattgccaagagatagggataagaaggcacaaaactattatcaagacaccccaacaaaatggcacagcagaatgaatgaacaaaactttgatagaaaaggtgaggtatatgctgacagttgttggtctgggaaaatagttttggggagaagccttgaagactgtctactatctcatcaatagatgcccctctgtagcactgaatttcaaaactcttcaagaacagtggacaggacatgctctaggagttaatcacttaagggtcattgggtgtactgcctatgctcatataagacaagacaagctagagccaagggctttgaaatgttgttttattgaataccttgatggataaaagggtacaagctatggtgcttagaagatggtttcagaaaatgcatcataagcactgatgtgatttttaatgagaatgaaatgcctatgaaagaatcaaacacaggaaacaagactcagacaaaggtcactgatagtacgcatgtaatatcccgataagtctaatgttaaataattagagtttatatttatattatgtgttaattaggtaataagtgagattatgatcctactaatcta

SEQ ID NO: 405386 - DNA, 680 bp, Cannabis indica
accacctttttttaacactttttttcactctatgacgttatttttgtaaaaaaaaaaattacaagcacttattctatatttttttctctcttttacattttcttactacacacattcaaactatttcatactaattttcactaattaatcacatgttataaaagtatcttaattaatttttttatcgtttaccaataacattcttttcttagacattttttcttatattttttaacgctctttctctttcttacgaaaaattaggagcactcctcttatatctttatcttttttacatgattaataaaaataatatttttttatgttttgtactttattcggagttcatttatgaatgatttgcatattgcaacgaggtcgatgtcttgttatttttttttgttattttgtagctatcttttcgttgttttatagttgtttttgacgtttgttgtttatgtattttatagttatttttatgtagtttttttattgtacaacaattttttagtttatgtgcattagttataatgcatatttttagtttattatcaataaagatatctctaattctcattatcaataaagatggatggcaatgcttttaaattggagtataaccaagttcacaatgaacttatgatcggaactagtataaatctcgtgtgttgttgtgtctg

SEQ ID NO: 405387 - DNA, 1065 bp, Cannabis indica
tggttgggcgtctcttcatcccgaggtatgagatggaaaaaccccagacacggacggcttaatcccagcaaccatcacgatcttctccaactgatgagcgcagatcagggtggagcggagttcatccgcttcccagccattagaacgaaacgtgtaattctcctaggcaaccaggcccttcataacctcctccagggtggccagagcagccgcccccttcttagaagacttagttcctaacgcaggggtagacatgtttggttctgaaaaaaagaaagaatccagcagctagaccccaaaccaaaccctaatgttaaaaaagggaatggggtcccctaaccgctggaaagaggccccctccggatgtttgccaaaaatggaaactcaaaggattttccttagcaaacatcaggtgcaaaaatcccaaaggcagcgaaagcagaagaaaagcaaaaaaacgcaaaatgaaggaacaaaaatcgccccatgccctaaacagtctctcgacagaggggtcgattctaaagaaaaatggaggaaaataacaaagacacaaataaataagattctatgcattacacagcagactagtcagagttatctcccagaaatccaacactcaaccaagaagttttatcctaatatgcaaacaaacgataaaaggcacaaagtgtccagagaacttacatgaaagttgagagctgggggtcggcgtcagtcgacggtatagggtggattgacaacgacggaggaagagcaacaagaaatctatggtgtttgaaattttttctctccaaagagctcttacgaaaaaatggaaaagtagttaaagtaaccaaatgaagggaaaagactggcttttataggccagaacgggtgcaaagtaactgtgatcaggcaccatcaaacagtgggaatcgaatcgattcatattctgcagatctaacggttgggatgaatgctcttcagggcagctggaaacgcttgagtatttgtctaacacaaattaaatgcgtcgtatcattaacggacgggaagcaaatcgttgcctgcaaaaagcaataa

SEQ ID NO: 405388 - DNA, 565 bp, Cannabis indica
cacttcttcactttcacatatactataaacaccaccttccacaacccaccatcagcgcaacatatatcaccatttcaccctactgtttatatccaaattacacacagaaaaaaagtaaacaaaactcaaactaaattttgtagatcttgtttacatatagatcttgtctctaaaaattgttcaactaaacgagactcgaaatctccaaaacgagccatggagcttcaacttcggtgagctctaccacaacaacagaaagacaagagaatatgagagatcacaagaatgttaaactttctacagattatgagctaacaatacacattaaatgctaatctttattactcataatcaacaaccaagatcaatatttatttagagcatcaaaaatcataaatacacatacctcccaatccatccacatgagtcatcttgctttaatgcctccaacaagaatcaccaaccaagttttttcaagattgaacccaaacccttagagccacaatgtggagcaatcccctattttcttattaccataaaaccttaaaaccactctaccatcaat

SEQ ID NO: 405389 - DNA, 284 bp, Cannabis indica
tggtggacaacatccaatctaattcaattgaactgaattgatccaattacaattagattggattggattgaatgctaaaagttatattttgattagattgaatcagttattggatgtcaatttcaaaatctaattgaaaaccgatccaattcaattcattacatttatatatgttaaaaattatttatatttatttatataataaaaaatattaaaaaatataatatgtattaattagatttttattagatttttttgtgttgaatttgtaacacttaattgtt

SEQ ID NO: 405390 - DNA, 973 bp, Cannabis indica
aatatgtaatcatattactgttaattaaattacactgtttggttgactacaggaattttatatatatattattttgaaaaattaaaataaaatattttttttattatatctatttaatgttaattacatattaaaaataaaatagttatttattaaagaaatatatttattaattagtaaacattaaattttattgtattttttattaattaaaatgaacatttctatatattttatcactatgttatttatttttgttcgatatgttatttatgtacaccatccgcataaaatttttgtataataaatatatatatgttattgctaataatataaaataactcagttaaaaaaaactgatctcacagactaaatatatatatcgtaatattttatttataataaatgataatattattggtatttaaatttatttattaattcaaaaatattattcaaattaatatgatggaaggtaataattcaatcctactcttttttaaggtatgaacattaccctcctcaagggtagttatattactaggggaataacattccaaggctaaaccctccaaacaaacaaggtaatgtttcacattaccattcccttactaggattaacctattccaaacagccccttagtagtatctgctctgcctttgatcttttctcaaccaacgtaaagtggtgggatccagtgtagcatttgtcacttttaataaatattacccataaccaacaacagactcggaaggggcgtatttattttctacatgatataacatgttaaaaattactaaattagatttttattattctagattattattcttaggattttatttacctaatagtttatgatcatatgttcaagtgagaaattacttttaatggtattatgataggctatggtagcgtttggtaacacttttttaatcagttttctgttttaaaagtggaaaagtgaaaata

SEQ ID NO: 405391 - DNA, 785 bp, Cannabis indica
gattttccaaccaagccatcgagaaatatgatttcccgggcctctttgtcctactatttcacccaactttggcattgaaagaaaaattcatatcaaaattatatctcaaaatacaataaaaaatatctaaaaataaataaactaaattataatcataatcatatttcttaccagaaatatccaaggacaactaaagaggttccacttaatatccttctcacttggattattcttcatatctttttttgtaatttgctctattattttctcatatgccagctttccccaacaataattgtcaaatattggtagattatccactagttgtagccattcaagatctatagccgaagaaggacttggcattattagaaatgcactgagcaaatagataaagcataacttcactctgtctctagtctttgattctctagatatgctatctagagcattggcaacatctgttactttaatagacatcatgttcttgaagtacttttcttttaacttgttcttagaagaaacaagctccatttcttcaggtgtcgggccaccatcagtgtacaatccagatacaattgcaaactcttggagagaaaatctcacaggttttccattaatcaaaaaccataactcatgcctcttttggcaatctaccctcctcaaaactatctggtttactaaggtgccaggaaaaagccctttagtatcgaggtccaagagacgacccaattgggagtaatgtttaaaaacatcctggtcagactttgtgagccaattcttta

SEQ ID NO: 405392 - DNA, 747 bp, Cannabis indica
gttagctttacggagtattttgaaagtctacctacaaacatatgaatttttatattttctggtgcttcacatgcttaggtactttcttataaaatgtctatgaatatacttttgtgagatacaatgcccttaatagattcaacaatagcctcagaaggttttttcttgttatgctacatagtttggtagagagacagtaatttattgtttgtggtaaaggtaggattggattttttgaggtttgatgttaattgttattataagtaaattcaatttttttgtaccattaaaacttgaggtgtttgtccacattatgtttttctttgtttgctcaaagtaattttttagtcatttgaaaattaatgtggctataagcactattttttaagtaaaaattgaaatactcggacttaatttctagagtcctcgtgaatgggcacacttttaaatttcttaaaactggctaatattccttatatatgcagtttagattaatgattaggtttaaaaatcaataagccaagatacgaatttgtatataatttagaatacaataataatagataataattagatatgtgtaccagattgattaataacaattacctcaatttgatagtgtattactatcaactaagtctttctctttagttctctaaattagtagttattttatttacctgattatcaaaagatatacaattgtgatgagacaatatgtatctatagagttagggaggggagtta

SEQ ID NO: 405393 - DNA, 391 bp, Cannabis indica
ggttcgggtcccaggtccgggtttgggtgagggtccggtccgggtcccgggtcccgggtccgtggtcctgggtccgggtctgggttcgggtccaggtccatgtccgggtctgcgtttgggtcttgggtcctgggtccggtaccgggtctgagtcccgggcaggtctgggaccgggtccgagtccggccaggtctgggtccgggtcctaggtcccgggtccgggtctgggtccgggtccgagtccaggtcacaagggatttgagtcttgaattaagttttttttaaaataaattgaaatccggtcggatcagatccgatcgagaaaagaattaggcggggtggagtggatctgatccaagatccaataagtatctgaatgttttggatcaga

SEQ ID NO: 405394 - DNA, 520 bp, Cannabis indica
tggttctgacggatatttacatcatgggaaaatggtagttcaatttagtgggagcgctaaacatagatatagaattatagcttctataagtatttagaagtgagacgatgatttccttcgagcttggactgaatagagataaatgatttgaggcctcattttagtaattatattagtttactgaagtatcttttataggttgctaagtgttttaaggataaaatacattgaagagtagaacggtaaatttgtctgtattcagtgtagatcatctatagatgatctttgactattaggattgtaacaatgaataatcataatgtatctatatcgtggtacatatagagcgttctatataattgatagtgctattcaattccaaaatctatagtggcgcaagacggaattaataagttttaactcggttatattggtggaatttatttgataaaagtagtcccctcactagttgggataatactgcttgcagactcagttaattgattttaattaatcaatt

SEQ ID NO: 405395 - DNA, 631 bp, Cannabis indica
gtgaacaatccgaagagcacaccgtaacttagcaattttagcttttgcatcgtgagtcaccgaagaaatccctataattttgggatcagatcacacagatatggcaagctgtcagaatcccttgattagtgtattctgtatttgatatgcaatctttccaattatatcaattgtaatcagaagggaaattcttccctcccaagcttatagccctataaatattgattcacattcactaggcaaagggtcgaaaagcttgtctaagaattcatattcagagatattattgtagctctaagaaaagggattattttctttgttcttaagtcaatacaaaacaagaggattagtctattaccgaactgctcggggctggacctctataaaattttcgtgcctttacttactttattatatcacacacacattatactacttgtcgcttacaatttagactcactgtcgttggtcaaaagcgaggtcaacattttggtgctttcattgaaagttgaactgaagatcattctcaaatctaaatacaatggtggtacagactcgaagaggcatggttgtttcggcaaatccacaggtggtggatcctacactgcagaacccaaggaacacaagggtt

SEQ ID NO: 405396 - DNA, 783 bp, Cannabis indica
aaactatgcaaatatctaggggtttaaaaaataatccagggtttaggcctcccatataaaagctttaaccctagcctagaaacctaagttgattctaagcttgaaacttgcctccaagctctaagcctaagtctaacaatctctctcatactcacttcctgtcttacatgcctacactagcatcatcttaacacttgagtttttccattattgattcataatttgtattcctaagggtgctgtagcagatcctacctaaagtgatctggatagtattaaccctcggtgctaatacaactaaacggggagtaggtcattacccgctatcataagggggccgaacctctataacaaattcgttgtttattgtttttcattcttattgtgaaaacacatggcaagcatcagatctatacgaccccactatcgattgaccattttttgaggttaacagtttggtgctttcattgagagcgtggatatcgtatctgatcaaatgccatgatgaacacaagaagaactcctatcgcaccatcatcatctttgggtctccgtcaagacccacagattgcagatccaagtactcaagttccaatctaaactagaatccccatgaacactacaaacgtggtgaatcctatcaccacaacaagtgccaccagtctggccactatagctggccaaattgatatagacatccagtggaacaagtggcaggcccttgcctcaaagagaagacccaccattggtgcctcctagtgaaggaaggacctaggggcgaca

SEQ ID NO: 405397 - DNA, 701 bp, Cannabis indica
atatcaacatccttggtcggccaggaaaagcctataggccggccagggtgagcctataggtcgaccagggtgagcctataggccggctaggatctgtgcacaagctggttggctaagaagtgacttctagaccaaggagccttcgttcgactaagggaacccgacctcttcaaggaaacaatgtacaaagctgtcctcaacttgcaaaaggctggcctccacactttaaggctgacctcctcttggtggagatatagtgacctaccaggtcctacaggccttatcctgccagatcctacaagccttgtcctaccagatcctagcaggaccatggttggccaagattgacctggtaggaccatggccggccagacttccttgtaggtctacgggtggccagtattgacttggcaggactccatgtataactctacacgtggacacaagacatgggttgggaattgggccctaaaagcccaacagaatagctgactaatatttcgaatcaagggcattttgatcttttgtaaatatctaactaactacacgatttctaagggatttaaattgtaaacctagggtttaaggtttcctatataaaggccttaaccctagcctaaaaatctaagttgcatctaggtcactaagcctcaaaattgttctatgttaaaaccctagtctctctgttggaaattatttta

SEQ ID NO: 405398 - DNA, 533 bp, Cannabis indica
tttatggcagaaaaaaataaatggaaaagatatggaaaaaatattaattcaatgaaaaaatatgggaatccaaaaaacatataaataagcttaaaatggaaaatcctatactttccaaactgaaaacataacagaatccatctcaatcgatctctctctccctaatctctacggttttctctctgctcgtcacgtttggaatcgcactatcattagccgcgattgatcactgccattcgatctgcaaaccgaacacaaatgcaaagatcagtcgcctctgatcatcttctccaaaaccaacaacgatcgccgcctctgatcgtcttctccagctccggaaagttcttcagctcattctaatcatctcaaacgcaagcaacatgcgcagaaagtcgatctcaaaaccaaaaattttcatcgactgaagacagagcttcagcaacgatcatcgacctccgatcgtcttctacagctacgatcatcttcaggtaagttcttcaattgcttcttatcctcttccttatctttataac

SEQ ID NO: 405399 - DNA, 1524 bp, Cannabis indica
acttactctaatcactctagggtttcggttttgaatagagaaagagagagagggttttgaaaataggaaaagtgaaggtggctcaaaattttactgaaggaaagagtttgcattatctttttctttgaggctatcactacctatttataggaaaccaattacggttaggttatatttatttatcattaaaataatgaaaaaataaaatagtaaattgctccccaagtggccggccatggatattgggccccacttttcaattttgcaatttttccaattattcatcttattttctcaaaaattccatttttctaatttaacaacttaaatgccaaatttaattatttaataattaaaattaattaataaataaaattgccatttaacatattattaattagacttaataaagtcttaattaacgaataaaccatagaatctcttttcttcacaaataagacctagcttagtaaaaattcataaactagtcatagtctaactttataattataaccatagaacttggaatttcactctcagttatatagaacgctctatatgctccacgatatacatacgttattagttatccattgttataatcccaataaccaatgatcctctatagatgatttacattgcatagggatttatttaccgttacacccttcaatgtattttatcgttaaaatacttagccacctataaatgatatttcagtgaactaacataatcactgaaaagagtactctgtttagccaagctcggaggaaatcatcatttcactttcatgtccaaatagaagctatggattccatatctttgattagcgctcctactcaattgcactaccttgttctcaaaatatacgtatcaccctgaccaaaaagtaggcttataactaacaaatcaaagaccatgaataatacttttaagatcgaacctatccatgtcaggattaagatcatttgatctaagatcaactaggtgatattaaattgaatacatattacaataaatttatcatatctaattcaagttcaatataacccaagctttactttaacaaatgcgctggaaaggacatagcactgatcgaaggtgcaagtaaactatgttgtagattatcatatcacttaaaccctatgtactgataaatctaggaatatttttaatcacacaatcttgattactttccactgtgacgacacaataaacaagaatatcaatgtgataagagtttggatgaatttataaatcaaatgaacatatagatgataacatgaaccaaatgacacactaaataactgatgaaaatacttctgtctctttgttgataattaaatgataaaaattacattgaaatagagttttatttaatgcacaaagcccaacatatgacatatttaaaaatactaatagaaaatagaaaatgcataccttattaatcataaccataccaatagtttgacgctcttcctaatcccaataggataatttttttatttttttttaaaaaaaaaa

SEQ ID NO: 405400 - DNA, 959 bp, Cannabis indica
aaaaggaaaagtccagctgatatcaatagctttatgataccttagtggacgagctattttgttaaatgttgtatatacatgcattgaaataaagcattgctattgggtaccagtggtgctcagcaccttccataggtgtcaccttacgattagttagcgatatttcctaaaatttattttcttaagttatatgggacctgctatttaattacaccaatagcggtatgacactaaggagagtgctaggcaccagtggtgcccttaagcaattctcattgaaatatgtggtgagggggttggaaaattgggatgagaccaagtacaaaccttgcatctcttgtctattgtagactcttagtctcaattaagcatcaagtgtgctattgattgaaaacaaaggtagtggtggttagtgtgtaatatccttaaagtgctctccctctctctctctctctctctcttgataattttgtttttcatgtctctgttccaggtaatacattacgagcttccaaacaattcagaaatatttgttcatcgatcaggccgaacaggtcgtgcaggaaagaagggggctgctattctaatttacacgcatgaccagaacagggctgtcaggtttattgaacgtgacgtaggatgcaaatttacagaggtgacagtctttcctttgctatggttctgttgtatttatttgtttggagctggttcagtttactatctcttcattattatttctcttgtttagcttattgaatgaaatattcaaagctaggttctggtattgggcaatttcattggctttttaatttgcatgattgtatatttaagggaaaacctatgatgcaccagcataatatggctgtatttatagataagttttagcatattactatatgatttatgggatgtacgtaatttattcaggtgccatctgatactaatttattcatgtttat

SEQ ID NO: 405401 - DNA, 535 bp, Cannabis indica
actagttattgaggttcaaatagataatataatggtggccagggcaatgatcgacgatagagcgccatcaaacatccagttcaagatgggtctaacctaagaaaacatataaccatacgagcaactcatgtatggtttcaatggagctggtatcccaccatgtggcaagattaagctgccgcttatagtcttcactgcttcgaagcagaccaccatcatggccacattcatagtggttgatgtgaagtctctatacaatgtgatgctcagattgcctaccctttatgaccctccagccatctccttagtgtgccacttttccgtcaggtttgcaataacggtttttattggttgtctccttggcaatcaaggaactgcccgcgagtgctacaatgcctcattgtcaatcaccaagaagacctcctctactgccacgactttaaaggggacgaaaaagacctcatttgatgttataacaccagaggggatgagcaaggactctcccagaaaagccagagagacgacaaagacctct

SEQ ID NO: 405402 - DNA, 1036 bp, Cannabis indica
ttattacaaattcaaggttaacaagataagatcagaggatgaaggtttgggaattgaatcctgcaagaaattgagctctaattttgatagtaataacgagttgcataacgcttctccatgcaacttagttatccttgctaggaagaggttgtgataccagaatattgctaggattacctccatggtgaagataatagggttctacagaattgtcgagtggatttctcgatcaaacaacctgtagactctgattaccttgagtaattagattgtgagtattgtcggcggctgcctaagtaggaacactatctctagttcttgttgcttcatcgtttatagacattttgtatggtggaagaaatcaataaccaaagaactttgagattagggattgatgaaagattgagttgtcgatgagaacacaacgagagaacaagacatagcgattttaggattggaggaaagcataaatttcttgctttcataccatattgtataaagagagagatgaatgaaatgtaaatggttgaattgaaatacaagattttatggtatttatagaacaagaatgaaataaggtaattaaactagctactctaattaagaattattttaactaaagacaaagttatttgcagagattaattagctaatagagagccaacgaacaaaatctaattgtaacagcctataactgcttaacaaactaacgcctaattaactaatagtaataattttaaaatatattaaaatttaaaaaaaaatgtaaaacataaaaaaaaaacatagcaagtaaaaaaaacacactataggaagattgatacaagtaaaattcaaagataatgagctactcaaatcttcgagacacaccactgaaaaaagaagacggagaagaaaataatacttaggcaaaagtgttgggttttgtgccctaaataaaacactttacaatctgattagttatcaatataagaaaataatacttaggcaaaagtgttgggttttatacacaaaatctgttaagtccagatcatat

SEQ ID NO: 405403 - DNA, 550 bp, Cannabis indica
actacatgtctatttacatatatatatatgatctgaatcaaaattacacacactagagtataatgtatagtaaaccatacttagtaattctgtactaaagatttacttactttaatacactacagactagttttattcatatcatataatcttaattctcctgcatatccttacaagattatatcttctccatatgaataaggaatttttagatatttattaattatacttctataatgaatgtattcatttatcttataattgtatttcatatattgtgtaatatattgtctattaattacttatttttagagcataaattccaacaagtggctgggttttctcgatatcttgtagggaaggtggagccaaagataatagaggtattgggaattaaagaagctctcagctggttggagacttaatctttctcttgtgttgcatgtgttagacaatttatatgtataaactgaaatatatgtatgtgtatataaaatacggaattaaacaaatgtatacactatataacttaaggatcgaaatacctcca

SEQ ID NO: 405404 - DNA, 533 bp, Cannabis indica
cactgcgagcttagggcgtagtttgatgtatgacaaagtcggctagtactccagggagtggcggggctcctacccctcctggatcaggttttagaaagggaggtagtggttcagccatggaccagaagaggaaattatccactgcatctggtggctcggggagaagcaaaaggttccgagggaaccagaatcgaggcggtcgttagggtagtgctgagacttgttattcctacccggagtgtcccatttgtaagaggcatcatccgggtgagtgcaaaggtcagggattcttttagtgtggcagtcagaatctttagtaaaattggatagaccgtgtgatagttatgaattagggtttggaaccctattacctggcggagagttagttatctccaaaaggtggattaggtctatgccgatcagaatagatggtagagagttaagtgctgacttgatagagatgagcctagtagatctcgatattattttaggaatggatttcctatctaaatactcagccagtattgattgca

SEQ ID NO: 405405 - DNA, 853 bp, Cannabis indica
cgtggcatcacatgaatggtcacacatggagtcaacttggaacatctgctcgggaggataggccaagcatgatgcctcgctggcatgcccaaagcaagatattcagcgatccacgcagagcaaccaacacatagcgaattcagctttcacatcataagtcatcagcacaatccctataactcagggaccaatttacgtggatatggcatacacacgatcccactgtcaatgtattcagcctcaatcccacgatccttgcattcagcattgatcctacgatctttctgtttatacacattgtaacgagaggggaaactcttccttcccaagccttctagccctataaatagtgatgtatgttcactgggcagggggagggtcgaaaaagcagttgagctaagactatactattatctaagaattatatattcagagatattgttgtaagagcaataagaaaaagaatctttctcctcgatcttaagtcaatataaataatgaagattaggctattaccgaactgctcggggccgaacctctataaaattcctgtgtctttatattgctttatcgtatatctgttactataaatcgtttatcgcttataaaatagactcattgtcgttggctaaaagagaagtcaacatttggtgctttcattgagaggaggatcacgaatccctctttattaaacatttaaccgccaatacgatgttgcaaactcgtagaggcctgactgatctggcaaattcacagacattggatcctagatcgcagaacccagggagcacaagggttccgtctgctgttaatcctggacagctggcaagcgtcgggaatggtgaaacagttc

SEQ ID NO: 405406 - DNA, 512 bp, Cannabis indica
cccttgcagggcacacataggctacgtacagccttgtccgcgtgcgcaaaaggctgcattgtagccttcgtgtgcgagcgagcagggtgcacgggtgggcttcagacagcagaggcccttcagacacgcacgtgaagcacgcctcagacagggcacttagtcaccttgtcgcagcacctacgcgcgcatgagtggtgcgatgacactaagtacatccgatttttcaaaacaccttaactctctcattttttatcggaatcgagtttcgtgaaaaccaaaattgcttaatttttcacaaggaatccaaataaattattttcatggaaaaatttcgaaatacacattcaatcatcaaataattacataaaccaacctaaacacatccaaatcaacatacaaacaagattcatcgttttaaatccatatttcatgaaagcaactcatcaccatggctctgaggccagttgttgggaatattttaccaggatatagatttactaacaggtatgttg

SEQ ID NO: 405407 - DNA, 1099 bp, Cannabis indica
tctttcggcctgtctttgagcagaaaagaggtggtgttttctttgtaattcaagcaattttctctggatttagtgatcacaagttgttggtaagatttttatagctttcttttaagttttctgaatttttgagaaaaatttgatagttacatgcttgagaatttgtaactgtggccgttgtttgagcttgttagtgatttctgaagcttaaatatgttttaatatgttgattcaagcatgatcttgttgttgtttgtcgattttaactaagtatggagttttgaacccaaaataggtttcaaggtaaaatgatgaattttgttgctgtgcttgttgtagatgattgttgttgttttcagaggcttatttatgcatatttaaattcaagcaggttttgatgcatgttagtggggtttaaccaagcttgagttttgaactcaaagcttggagctttaatggcaatttttgtatctgtgcttactgggttgttttattgctttggatatgttccttgggatgtatagagcaagtctggaaagtttgatatggtttggggttgttttggctaagatatgaatttttatggtttcctgcactgaattggaattccagttcagtatggcctgtaggaaccggaattccggttggtgtcctgggttcttcccagaaccggaattccggttgtagaaccggtctgccggttggggtgaaattgggagccctacttcgtcccatttttgtgttgtttaacgtattgccatgctttttaccgatagggaaactattagtttctagtttaagtccccgggaagtgatttagcatgtcacttaccaatgttgtgattattatggtttaggagcctgtaattcgtcgagcagttcattccactcaggttgaccggcacacctaaattcggaatcgaggtaagattagtataacagtatgcatatgtatttacatgtttaacgtgcatgttaggaagcctgttagattacattagatatgtatgttggcttcgtaccatctgacagtccacatcggtacggctagagtatgactaacgtaccgagtataggctgatattatggtcgatggtac

SEQ ID NO: 405408 - DNA, 680 bp, Cannabis indica
gcaagcccgtgccatagcctggccctgtacatcacataactgcatcaactaatcaggtgagcacgtgccaaaaaattgcactcatatatcatataattgcatcacctaatgaggtgagctagtaccacaacttggcaccaatatattgcatcgcctaatcagacgagcttgtacctacacccggtacttatcatatgtcattgacgctcaaatctacacgtcgccaggagtaatcatctaatcagacgagcccgtacctacgccaggtacttatcatatgttactgacgttcgtatctactcgtcgccaggatgaaaccctacaactatttcattcaatgtcataacctgataatttacgtatcactgacgccgtatctacacgtccccaggagtattgcctaatcatacgagcttgtacctacgcctggtacttatcatatgtcactgacacccgtatctacacgtcgccaggaagaaaccctacaatggtttcattctatgccataacatggtaattttcatatcactgacgctgtatctacacgtcgccaggagtaatcgcatcacctaatctggtgagcccgtacctacgctcggtactcatcatatattattgacacccgtacttacgcccagtatgtcgccaggaaaactggtatcaccgtatcaggtgagccc

SEQ ID NO: 405409 - DNA, 1026 bp, Cannabis indica
ataataaggtggagaagtaagaaaaaaaacaactttttatttattcaataatatattgttataacttttgataataaattcaaaagttgtagacaatagtgatctacaaaatttaaatagaactattccatggccactttgcctgtcaagcaattccttgaccaaattataaagtaaaaacatatctgcatgcatgaatcatggcatgcatttactgtttacattaaatatcactacataagattaagatatattactatattatatataattggcaaagtaaaattatactactttgacaacatacacaacacgcacagaatgatcaagaccatcagaccaagtaatatctccaaaattatacccactaacagcccctttgccatcaaacgacacctcaaaggaagtcttgttcaagctgttgctgaacacaatcctatcaggattaacctttacaactaagcctttgggagaattgactcgaacagtgtatgttgaggtggaggctcctacattggtcacagtccttttgacgactgtaggacttgattgctgtcgtttaagattgccaatagagatggatgggtaattaatgtctgtgatcagttctggctttgagtttttagggcattggaataaatttgctcccttaagtacggattttatttttgcctctttataaccgtagtaacagaggaaattgaaatagtcttgtgtggttgtatcgaagactagccctgggtctagagctttcatatggtttaattctccagatccagcctcgtgtgggcttgccactaggtttagttcatttcttattggtttgcctgtgttgtcatatgcacttgctgttggttgtgcccaaatgagaaacaaaaattcaggtcatagctagtgtaaatttataggttttatgcattgcagtattaaagaaatatgtgagacgcaatatattaaattatacatataccaactatagtacatttttcgtggtattgtcacacactacactactcatggctctta

SEQ ID NO: 405410 - DNA, 662 bp, Cannabis indica
tttttttttttttaaatttgaagtctaaaaaagttagtagtgtgaaagtaaaattagctcttaatcttaaattatttgtacgtatgctttaatattagaattaattagattattttgaagtgaggcaaataaaataaaataggcacgtgtagtttcacgtgagtagaagaaattgacaaggacaaggacatgctcctcttgttttgggcacagagtcacagactccgttttctctctcaatctctaatctaatctatctaattataagaagaccccacaaaaggtacaccagaatgaaaattgacagtttttgtagtctggtgcaacctttgtccttttaaccttccccaccttatttttcacataataataataataaataaaaacgaagaggcgaggcggtcccccacccattcttgtatctgggtcatattcatatccatccacccggacccggaccccgaccaggacccgacacacggctaatcgcacgcttcgcacgtggtttcaaagcaactaaaaacggaccagagagaaacaagagaactcaaaattaaacaaaaacaaaaattgctccacgcgaagaagaaacgttttgagtctctttctctctctttgctctggtttgaaaaaaaaaaataaataaataaaaaagaataaga

SEQ ID NO: 405411 - DNA, 500 bp, Cannabis indica
agatctaagagaaaacacttagatatttcactatgagagctttaagagaggaaacactgtgttctttgttctcatgtaaatataatccaaggggagtaggctattaccgaactaaaggggctgaacctctttaaaacctggtgttctttattgcttattgatttttactctattatatttctaatcgtttattaattgactcactgtcgttggctaaaagtgaggtcaacattttggtgctttcattgagagcaaaaatccaagtttgttctttgtcttatgtttcaacagacacacagaatggtggtgcaaactcgcagaggcttggttgatcagagtaacccacagttgacagatcctgctatgtagaccctagggaatacaagggtcccacgacgaaccaatcccgagtagcctaacacacagccacctactatggcccaaggtgtgacttcccctctggctgggatcacaccaggtgtgcaagagattgggaatac

SEQ ID NO: 405412 - DNA, 634 bp, Cannabis indica
taaacaactcagaaattctcactactttctctttctctcttcatcttcttctttcttctcatctactttatattattttatattattttataacataaagtagtttataacatagataatatactactataaaaattaatgatatagatagatagtatacttcaataaaaattaattttgtaattactgttctttttaaagcatcattacaataaattatgctacaaccaaaagtaattaacaaaaatctattttatctagtaaaagataaaatcgcctaaaactaatagttatttttaataaattaaaaataaaaaaataataaaataatttataacataaataatatattccataaaaattaataatatagatagatataaaatactccataaaaattaattttgtaatgaaccgaaattatgctacaacaccaaatttaattaacaaaaatctattttatctagtaaaaaataaaatcgcaaaaaactaatagttatttttagtaaaatttttaatatttgaagtaataacagataaaaatttataataaccaattaattaaataatgatcctaataaaaacatgtaattaaattgatgcgtgtcgtaagccacaacaaatttactatttt

SEQ ID NO: 405413 - DNA, 699 bp, Cannabis indica
agaaaaagggagagtaggagtgagaaaattaattcctattttctctaccttcagttgcttactttctatttttcaggcttgttaatttatgatataatctatcctatatatagtgttataaataaacccttttaatcatttatttaaaataaaagtaaatatctaatttgattttaattagaatctaaattcaaatataaatatctaacaactaaataacaaatatcagttagatcttttattttgattattatctttttaattaaacaattatccatccaataattcatttaattaataagttaaagataattagcttaatttaatttaaattattttaaccaataaaataattaaactaaattaatcatggacctttacatgtcactctacacgtgtagattaggcctacacgtgcgggccatgttttaaggtctaaaattgatgtctcaattttttcatgcataaaatttattatttattctacgtataaataataatttattaattctcattaatctcttatttcacaaggattaaaataaatattattttctctaaaataatatatttttctctttaatattatttagtaataatattatatttaactaagtaatatagctttaaccaataaaactaaatagttaaatactattaattatacaattcatattctataattaatcaaaacaataa

SEQ ID NO: 405414 - DNA, 676 bp, Cannabis indica
ttttatttttaatttttattgaagtcgagtctaggtccatgtctagggctgggccgtggtccaggttcggtactgggaccgcgaccggtcctaaggtccaagttagggtcggagtccaaaatattgattaaaaaaaattaagaaaaattttaagtaatttttttagttctcaaaattttaattaaaaaattaaaaagtaagaataattttgttaaatatatttttactttttaattaaaaaataaaaaataaataattaaaaaagtgttacaaaaaggactgaaacaatttaaaaaataaagtggcatttggttggatgtaataaaatagaattgaataaaaagaaaataatcttcattttatttgtttggttgcacattaaagtattagaaatggaatgctctttccactattttggtggaatgactattccattttaaaatgaaaaagaaataccatttcaatacatgatgacaaaaaaatttaatagttcctttataaatttttcttatatattttaaattttattctattctaattcttatttatattttgggtgattctacaatgcacccccttaaaagagatgtactgatgcacccttagcttgtttcgacattcaaaaaaaaaaaattagtctaattttttttcatattcatgtatgttataactattt

SEQ ID NO: 405415 - DNA, 934 bp, Cannabis indica
acctcttcctcaaccttggcctcagaaggactacccggacgcccatcgtctagctcctcaacctcctggacctcagcatccccctcacgatcctcctccatcgggacggtcaaatcctgttcggacctgggcagagtggcgagccgagccacttgaggatcagtagcgttagccagacgcgtggttttctttgtacgagccatcattctatggctgggtacaaggtcagaagaatgtccttcgctagaaggaggactagaagaaatacgagggtgatcttcgtgcagaagttgaagcaaatcctggtcggtctgatgtctgagttctcaagactcacctaagttcatctacaaaagacaacacacgagatgagtgttggtcggaatatcaaacgataaacaagcaaatatgccgaccaggaagtagtcaacagattaaagaacgactatgtctaaagaaaagtcagaactcaagaagtcaaaaaaatttcttgagttagggaaaaaaagttcatggagcttagaataagcaagatgaaaggtggacgaaatgcagttcagagacaagctctatagctgtaaacccacatgaagatgtgataaaaaagaatcgcagaagtttctaaccctagggtttcctgatcatttttctatggcaaagtaaaagttgcattcgaaatgtaaacatgcaaagataagcataaaggaaatcagaaacttactcaagattcgagtgtctgggttcgagcaacgtcaatccaaccagcagttgtatgaaggcacttcagcgactttgaagccagaaaactttcttttcgctgtggagcttacttagcaaagaagggtgatgaaatgagtttatgtgccaatgctgtgggtatttatagccaagtcgcgaaaaagaggtaacagtctcaaagaaatctcagacgcct

SEQ ID NO: 405416 - DNA, 728 bp, Cannabis indica
taaccgattttctcacctttaattattcgattttatggctcttgtctatgttaggaaagattgtattttcagctagacttttcttgtatggaaacttcttgtaagagaaaaaattctcttatagaaagttagttttttaaaggaaactttgtctattatctttttccttaataaattcgattgtgtcttgatataatcagatcatacacactgtactgtttatggcgggtatcaagacccaatataagatcagactcatttttggcaagttttcttttctgatctgatttgctgcgtcagaatccgcatctgatgctgcaaatcaagtttttcttaagaaagttttgtacagctgtagattcgtcattgtggttgtctctatgttctataaatagaacctagagagcagccattcgaatcaactcttctagttttcattttttgcatttttcttatttatgagaagggagttctttttgtgagaatctagttgttcatctaggttctggtgtttttcatatatgttcttactttgtcttagagtttgttagaacgacttgactgaacaagagagaatggtcttcgggagaagacttattcaagccttacttcgagaggaagttgcacacttcaaaggcgaagggagttcgttgttgaaggtgtttcataagtcagattcataaagtacattacaaaggattgcgataataatttagagggagtctaaa

SEQ ID NO: 405417 - DNA, 547 bp, Cannabis indica
catcacatcagtagacttttaagcattaacacaagtctagagacctgatttggtgtagtttaagagtattaaaataccacccttatcaactaacatatagttcctcttcttgatcttaagatttacttgattatcttccaatgttccttttcctggattaatctgataccaactcattacttccactcaatagcaggtgtctggtctaatgcatagcaaaaacatacataagatctctcactgttaatccttacggaattctttccttggcccttatcttttctggaatagttgaaacttttccttagataaataaaatctatgtctagaagtcgaaaagcttctatagatgtagccattaaaaatttctctagcatcttactaaagtaagttgcttgcactagagtaattaaatcaccaagcataccacaagccataggtttagataaattcaaacctttgattctaggatcatgaagttttgttaagtccattgaatagacttattttaaaaaatttctttcttgtccttgtaatagaaaacctt

SEQ ID NO: 405418 - DNA, 1262 bp, Cannabis indica
tttttactaaaaaatccagtaccttctttgatgttattgttgctagaggcttggcttctatccatttggtgaagtaatctatcacgaccactgcatattgtactccacctttgcctttgggcaactgtccgatcaggtctattccccatatggcaaaatgccatggactttgtatctgtatgaactcatttgggggtgctcggggaatcttcaaaaatctctggcacttgttgcacttctttacatgggcctttgaatcttccatcatagtaggccagaaatatctttgccttaatattttctttgataaactttgtcccgcagcatgattgccacaaaatccttcatgtacttcggacaggagccgtgcaactttttcttttgttacacatcttaacagtggcatggagaagcctcttctatacattacacttttcactacgatgtaccgtgcaacttttctcaccatcttttgaggctcgtttctattgcttggaagttctccaatattgagataagctgctgtgggagtcatctagtttggtgcagtatctatcattttgatttcttccgcacatgtgatgctgggttattccaagaattgaattggaactagattggccttatttgtcaccgcactgctcgcaagctgtgctaaggcatcagtagttgtgttttcatcccttagaattttctttagggtgtaacccttgaattatgtgagcaggtcctggatcttgttgagataagtcatcgttttttctccacgagccatgtactcccttaagacttgatttaccaccaactatgaatcactacagaatttaatctatttggcatgtatctcccgaggaagctttagtccaactatgagtgcttcatactctgctttgttgttagaggctttgaacccaaatctgattgctttatgtagaggttgctgttgggattttatgccctaaataaaacccatttcaatctaatctaacttgttatctataaaagattagaagtcatttatgtttacatgttgttttcatgcttatggtttaatgtgtacaaaatctgttaagcccacaatatatagttattcataattacagtgatgtaaccacagtggaatgtaattgtgattatatgcttcaaaagataatgtctatgattcatcagtgcactggatttacactgatgtgataatcatcgataaagtatacttacaccttggataagtgttatgttctttctagaatattggcaaagta

SEQ ID NO: 405419 - DNA, 1111 bp, Cannabis indica
caggttggaggaagagaagaaagagaaataggaggagcttggggctgaggttgagaagcagaaatccgaggtggtgaggctcggggagaaggtaaatgccttagagacagctggtctccagatattttatgacttttggaaagctaataccaaagcaaactttgattacctaggcgcttccatagagatgtttcttgactactgcgttgcacacgcgccctacaaggagcctgaggcaaccacttccacttcacctaccgataagaatgttgggctccttccacctagagtgacagttctcaagccccttcaaatccagctgacccatacaaagagcctgtgactcctgacgtctaagtgccttctttttattatccttttgttgtatgttttttaggctaataggccttcttttaagacaaggtgaccgaccaagcggtctttaaacttgaaatatatttttcattttttgaacaaccagctgactaggcagcctttaatcccgagtttgaatgcttttgttattcctaatgaatttcatccattttgtataatcatcgtgcaattgtatttgtttgttttttaccaaatgctttgtacaggtataagcgccccccaagtgaccgagcagactcatgactcttggtcacttgttactttttacaagtatgcttttttgtctgttcggggttttgggttcgaccaaaccttttgtacgcaattagatggtaaattaacaacatcctattaatttcgactcaatttgaattttgaaataaatatctttattcatttattgatcaaaaatgtgtttgttaccgtagtaacttacattagagctattagatctaatctgatcttttagcttaacatgaaaaataaaacaaattgcaagaaaattagaaaattgtactttaaatggtggtcattcgacttgagtacttttcaattttgtctgaacctttgggcgtagtctgcccagcaggccattcacttaaaagtgagttttctttcagtacttaatatggtcaactgacctggtacttctattggtagtattttctaaaatgttctctattccaataccgtggtacttgaacaagttgcattt

SEQ ID NO: 405420 - DNA, 524 bp, Cannabis indica
tattagctttgaattattaatttgcgataatgtatttgaattcaacttgcattttatatggcatgtatagaatttcataattttacatgttttgtgcccgacaacattggaacacggtgtttggctattagaatcacatcctagtacttttagtatagcagggctgtatagttagacattgggaatgtcggaaatagtcgagattttagagttgacaaaaatacccataaatgattttatgattgtttagtgtgggcaagggcattttggtctttttgcccattttgtattttgtcgttttgtggatttaattatgtaatacaatcaggtttttaatttgattttggctgatatttcaataaaaaaaaagcttatttttattcatttatacaaaattgaaaaaaaataagaaaatgactctctctttcaactctcttcttctctctcacgaaatccctagaaccagctagggtttgctctaattttcttctcaattcaagcaagttcagcaagatcatagtgta

SEQ ID NO: 405421 - DNA, 900 bp, Cannabis indica
ggccttccggcaattctccgtcgcgaccaatccccctacgtcaaggtccttcttgtcatatgtggcgaaggtcttggcccgttggaggaagagctgagtaggcgcagtccgctcataaggagggatcctaacccactccgcaagaagctccggatgttccacagccaggaacccggaggagaagaagaagcggtgacgatactccttgacgtgtttttgctggttgaaggggaccgggccctcattcaaagggtgggcccggaagccataaaagtcgtccttaagtttgtcccccttcttagggacagaaacgagttcataaaaatacaatatctctgccggactgggagagccccagccccgggcagagtaaaaaataaataagcctgaaagcaggcggtaagcttgtggaataagttggtatggcgcaaggccgacaaatacaaggaaattaatgaaataatcctgaaggggaagcatagccccggtcatcaaatgcgtctggctccaagctccgaagcctccgtaattgtgattgggcgtctccgcgtcgcggggcggccggtggtacgtcccggaagtcgcaggcttgatgccggccaccaccacgatgtgctccagctgatgagggcaagttaaggtagagtgaagctcggccgcttcccaccccgtggcacgaggcttatacccctcctgggcgacgggacccatcatcacctcttccagggtggccaggcgttttcctcctttcttggaagatttggaaccggatgtagacattttggttctgaaaaagatttaaaattccagcagtcaggccccataccaaaccctaagtcaaaaaagggaatgggggtcccctaaccgctggaaagaggccccctccggacggttgtcaac

SEQ ID NO: 405422 - DNA, 701 bp, Cannabis indica
cttcacctaactccaaccgaacagcttcgagttctgccatggcgtcctcagcatccttcctgaccaagtccgcctccgcccttatagtgtcagacaaagccgtgttcctggaagcggcagacttagcccggttcatgtaatgggctagcatctccttccccttcttggcctctggaagcaccgggaaaggtggagtaggtgcccgcacccattcaggttcactcctaacaagctcatacccaacttttggtggtcaagacctgtccaagcttcctccgcgagaatccttggacttagcagtttttcgggtagtggggtttgtagcagttaactccttggaaagatcaatgaccaccccagtaggcctcatttccttagaagaggacccctcaccgcatttagacttcttggccagaggagaggcgctagagcttctgcccattctcttcttcgaagcgtcaagcatttgccgagacatgtctgtacagaaagaaaaacaacatggttagagataacagacatcaaaaacataaggcataaaagtcaagaagctcaaaaacaagacaaagtagtatgcaaggtgactacccaaacaagactcgaaagtccatcatcacctaacatcgatcttatttcagataaaacaactttcccttttctgaacacgggaggggatgcgcgaataggtgaaatgggctccc

SEQ ID NO: 405423 - DNA, 844 bp, Cannabis indica
tccttcgttttggtttttttagttcatgatgttcgtactcttctctttatccttaaataatgttgagttgtgttttgtcaacgatctgcaaacagttagctcatgtttagccagggattcttgtttctctacaggtcgtgtgcttcagttagaggatcgttccaacgtagtgcgttctattgttattaacgaatagctaagttaataaaattagactaagttttattacaaaaaaaaaaaaaaacaaacaataaaacaactaaaaaataacaatggaataacagtaaaaatttaacacagtatacagtataaaaaatacataatatctcttttatttatcaattaaccaaatctacctctaatttataatgaaaatacttctttttatatgcactgtacccaaaatacattggcataagggagtcacatagagagtatattaaagtgacaggagaaaaattaataaactgcttaaaaaaataaaaatgatagacttgaaaaaagagtaaaataaaaaaggacaatataaaatggatataaagtctaatttcttaaaaaaaaaattagtatatgatataaaatctcaaagaatattaaaataattaatatttttgtctcgtaaacttatgacactacgttactaccaaatgatgcctcaaatatgtcctatcatgcccttttaaaatataacctttgtagcaatgtgtcttttcttgtgtgaaattttattttaaaaagtaagggtaaattgcggcataaatatgtaatgtttcagattttatatatttaaatacctaatgtttatttttggaggaaaaaatacctaatgttataattctcttac

SEQ ID NO: 405424 - DNA, 1059 bp, Cannabis indica
gaactctggtctcatcgggaatagtactactattactactactactaaatcttcggacgacgtcgtttcgtcgagcgtgattaatgtaaaaaaactcacaccagtacaaccaaagttttcttgattcaaggaaccagcggcgtagaaacagaggaaattcagaatcaacagcttacaacgacggaggtaagcactattgtaaaagaagatgaggaattaaacacgattgaagaaggagaagaagaagagttgaataagattgaagaagaagaagaagaagaagaatatggattttcagatgagtttaacaagaaatgtgaagattttattagaaaggttaaagaagaaattatgtctggagcacgataggttcttgaattttgattttgaaatatcactgatcatctaatcaatggtttagattagttcgtaataaaatgagacaactattttgtttttaatctcattttctagtttggtaaggttttttttgtttttttttttttgtgtgtagaaaatggtttgtgggattgagggattgtggattaaggtgttggtaagtaatcaccatgtccaactactaagcttgaacatcattgaatgtgtctccagcttaattgaagtgtcctcctttaaattttgtttactgaccatttttatgaagatgataagttaaagataagagtgctattcttttctaagaaaaataaaagaaagagttatttaatgaatgctttatgtgttaattatgagaagcactactacaacaacaaaaaattatgtacattattattaggtgctgtgtctaattgatttggctatccattttaatgtgtatcttgactttcaaaaaaaaaaaaaaaagaagttgaaggtatattctaattgactattgactatgacctaatttttaagtctaaagatgcttaatctttaaagtgatgaaattgtaaataataatcaaacataattaagtaaataagaacactaaaatttatagtataattcttgatacatatgaagtacttcaggacttcaatactaatgaacaaactttat

SEQ ID NO: 405425 - DNA, 585 bp, Cannabis indica
ccttggtttgcaaatccatgggatgttcttggaacatcacgtcgatgttgttggtcccatgtattatttgggttaggttgattatccattgggacatcccttatattcccaggttgttcttcctgagtattcagggaattcccttggttattttcttgtctcctggtcttggaaccctgagtttttcgtcgcagtctccttatagttagacaatgttggttttgaggaactgtcccctgtgcagccctggctgctgcgactttttactccaactcagtgtttcgtcagtttgattcagccaagcgttatcgaagttgcctattctctaattctactagtggtacgtatctggttggatcataggcgtcctcactccttctttctgggagttaatcaccagcagcattgaaattaccatcatttctttctgaacgtggtgttttagacgtgttggttctctgggaccccataggttctttactagtacgatgggttgtttcctctggacgattactgtaatatcccgataagttaaatggtaaataattagggtttatattgatattatgaattaatcaggtaata

SEQ ID NO: 405426 - DNA, 689 bp, Cannabis indica
aatagtgttactttgcaaaacactattcattcttaagacattattttaataatttctctctcatctttctaatttttccatttaatatttttaacattcttgtttatataaaataaaagatattataaaatataatatttaaatgatatagagaaaaaaataatgtaaaaaatataaaataatgtgttaaatataaaatataaaatataatgaagttgatgtacggtgtaatgtaaaagcatgagttaaaatagaaaaataaggctttggtgaggtatttaaaaaaatcactacaagaaatgtcacttttgcctagcacatttttggtgccgaaaaaacgttggtattacgctggtaaaatagaatttacttatgatgtgttggcaaaggaagttggcaaatcaacgttggcattagaacttttgccatcataaataaaaaagttagattttaaccactacaaatgtacgctggtaaaactttgaccactttgtcaatgcagtttgcgaaatacgctagtaaaagtaatttttaccagcgcagtagcgaactatgctggtaaaagtgacatatcttataatgaataaaattgaaaaattattgggactgctcttatatctccacttgaattaaagaattaaaacacaatttttatttgtttttttttaaataaataaataaatcaatta

SEQ ID NO: 405427 - DNA, 695 bp, Cannabis indica
attgtgtaattacctccaattaattaaaaattcaattgtatgatgattttctaaataattttatttttataatcgtgtacatttggtattttacaaattcataaaaatttaacattctaaaaataaaactctaactatttactgtactcgtctctctcttttactttataaaaataaattatgttgaaatggtatgagatgcattaatgcactttatttttctaggatgctgcataaaatcttcttataatatataataatatattaatatatgtataggtcatggattcaatctctcaccacttttttttttagatcggtcactcattaaatataactcatttatttagtaaattttgactttcaggaactaacttatatgtatttggagcaatatattcacacagtgactaataatttatatctagagtaaatattatatactcacatgctaatattttatagttaagtgagacatcgtcttattatatactatcagtacaataaaatttatcaatagccgtaatattattagcgatgggcaaaatttgcccctaatagtggtagcattagcggcggaaccagaattcactgctaattctacttatttattttatttaataaaaaaactattatcggtagactccgccgctaatagtattagcggcgagccccaccgctagtaatataaaaaa

SEQ ID NO: 405428 - DNA, 654 bp, Cannabis indica
gtatcaataatttcgatttcttctgtgccagtgatgctaagctcttcgaggaactagataagaaccaggttttccttgtcacttacattgatgcttgccaatcgagctaacgcgtctacagttgtattttcttctcttggaatttgtctgagaccgtagcttttgaattgtgcgagaagctcatatattttgctcagatatgctatcatcttttctccccgaccttcatattctccgaatacatgatttaccaccagctgtgaatcactacagatttcgatgtgttcggccttcatctcttgggctagtcttagcccagcgattagagcttcgtactcggcttcgttgttagatgctttgaatccaaacttgactgcagcgtgcaggtgttgccccccaggcgtgacaagggcaattcctgcaccagatagttgatctgtagccgacccatccacatgtagtttccaggtcagtttgtcctcactgtgactaggctgaggtatttctaccggctcggggttgctttctggtatgctttcttttttgcctgtgcattctaccacaaagtctgccaaggcttggcctttgattgctgttcgaggttagaaagtgattttgtactggcccaactctactgcccacttgagtagccgt

SEQ ID NO: 405429 - DNA, 520 bp, Cannabis indica
attttttctattatttatttaaatttactatagttttgaactaaatttttaaacacattctgtaaactaaaataaaagttacatagtttaacagatagaattgaacaaattctctatctatttttttttaaaaaaaaaattaatctcaatagtacctaattaaatacatatttttgttctaatatgtatttcaaaaacataataataaagagtaattgtcgacatcaaaattcttttaggttttactttttatttactttaacctttttttttttttgttgacaatactcctttaactttacttctgattgtaaatttaagccgcctgttaaaattctaccattaaaagttagttggatttccattgtggacacttttgtatgcgatatatgtatttattaactttgaaattttagcgccacgtgtatacatgtgtacacaatgacaattccaattaacatttaaatattgaatttaactagtttttcaaatttgtaagcagaagtgaagttaagggagt

SEQ ID NO: 405430 - DNA, 472 bp, Cannabis indica
tcaagcctccattgggccttctctcatagactcatgctcttataaatgggtacgctactctagctccttcatggattgataactggccttacagaccaacacgagtatttttatcgtgctttgtcctcactcgcacgctttttgagaaaatttcctaagaggtcaccgattctgaaattaccccaggtcaagcacgcttaactgtccagttctttcgtgatgggctactagaaaagaagatgcaacttgttgatataggcagtactaatcaatccatttatgcactcttcaacagtgtagtctcacacctacacaatctcagaatcatcatacttgaccttccccaagcgatgagagattgcacagcttaccccgtattttcccttacagatcacgggactactgactgtcacaaccaccccttacattgggtgctagcggaattataatgactccttccgttcagtatatc

SEQ ID NO: 405431 - DNA, 744 bp, Cannabis indica
ttagttatactttcatagagaaaatatatgaccattttcttttcttttaataaagaagaaggatgatctttgaatagtcatataatcatgcatttgttttttttttgttttttttttttttttttgagttcataatcatgcatgttttggtatgtactttccttgagaaatttttggcctttttttttttttcattgattagattatgaatggaatgtttattgtgagtttatttcttttcaaaatttagttaccgtagtattcatttagtttttgtgttactgaaattgcttcaattttatagagctaatttggattttaaataaaatttgtccttaactattgagatggttagatttaaaattttttatttaattttattaaacaagactttgcatggataaatatttaagaggtaaaatttcattcttctgaaagtttaaaaaacatgatttagtagatatcaaaatttaagagacaagatttagtatatggacaatctttatatcagtaaaattaaatgaaatttctttaaaatttaacaattttaacaatttaaaaaaaaaaattaacgacctaaaaaaattgagtgcgcataatttattatatgttaaaaataataaaatttaagaggaaattacactctataccatttttatattatcctctttatttttactctcttttttaaagttctatcatttttacctattttttttaaactattgtacaaattttgcccct

SEQ ID NO: 405432 - DNA, 604 bp, Cannabis indica
atgcatttacatcttgatttggataatggcacttgattctgtactcaccatctacactacacacatttcattatattttatatctaacatatgaattatgcaattaagcggacttggaaactctttcagtttctactctgattcaggggtttcccaaccagtcttttactttgaagtttgtcttatatacttttgtacttacttaattttgattccatctctttttttactttttcttttttttttacttgtcgaatgttaaatgttgtttctttcataaggcgcattccaagtattttttaccaacttctaattgcaggggagctaatcggaaagtcattgacagagaaggtaatactcctcttaagctcttcaaaaaatcacacttcattgacaatgagctacttgctcttttagcagaaatagacagatgacaatgtgagatatgatgaaaggtaatttcaaaataatgtattcaaagatgggatggcaacatgtaaatataacaccttcatgaaaaactggttactagcttacttcaaccttagtcagtaggagagctgaagagttgtcttgcttggtcacgagcttcttaggtccgtcc

SEQ ID NO: 405433 - DNA, 518 bp, Cannabis indica
aaatgatacttgttcttgacaatcagtttattcaattctcgctagtcaatgcacatacgcaaagatccatctttcttcttgacaaataatatgggagctccccagggtgacacatagggtcatgaaaaccctagattaagcaacccctgaagctgaattttcaattcttgaaattctactagagccattctgtatggtgccgtagaaatcggttctgctctagatactaaatcaataataaaatcaatttctatctactgtggtaaactcggaagttcatcaagaaaaacatctaaaaattcccgaaccaccctgatgtcttttggctgaactatctcaggccgtgtggtatccaatactgcggccagaaacccaagacatccatattgtaactattgggttttgtgccctaaataaaactcattttaatataatcagatttactaattaataaagatcaaaaatcgcttttatgttgcatggttcacataatttatttcatgattgtttaatgtata

SEQ ID NO: 405434 - DNA, 598 bp, Cannabis indica
gataggaagaaacatggaagtctgtctatgaaatgttggtaaaatcgataaaaagttgagaccacacaacagacctcgcagagtgctttgaaatactgaaaaagtacaatatgaagcttaacccgaaaaagtgttcctttagagttttctcaggtaaatttctgggattcataatcaaggcgaggggcattgaagcaaatcctgagaagatcaaagctttgatagatatgccatcactaactaaattgaaggaagtacaggccttgacaagaagaatggttgctcttaacagatttatttcaaagtcaactgataagtgtctaccatttttcaatgtattgtgaggcaacaaaaagttagaatggacaaaggaatgcaaggatgcctttaagaacataaagaggcatttttcaacaccaataaatggagagacattactcttctacttggctgtctcggaatatgtggttagtgtagcaatagtgcgagaagagggaatgcaccaacaacctatttactatattagtaaaaggttactgggggcagaatcgaggtatccccctcttaaaaaacttgccttatgcctaatccacgcatc

SEQ ID NO: 405435 - DNA, 525 bp, Cannabis indica
aatgcattaataaaatcatcatccctacctcattaggagcgggtacccgcagaacaccaatactcacaggtacaatttttatccctaattatgatgtatatataaaatctttgaatacatatataatgcacttttaattttaacttcaaacgtaccatgaaaatccatattattttctccttaaaaaatatattaactcatattttctttcaaaaaagaaaaatattaactcatatttttttaacgtttctttttattaaaaataacaaattgtagaattaatgagaaaaaataattagtatttttactcccaaacatagacattgtcaaatcgtgccccttaaagtatatgacttgttaatatcccccctaaatgttttttttttttgaattaaacgtttatacattacaatgcataacctgggactcgaacccaggacctctaacacacacgcactctcctatggccacttgagctagcctcaagtggttaaaattaggggtgcaacacgaggacttcccagg

SEQ ID NO: 405436 - DNA, 799 bp, Cannabis indica
agagagagagagtttggagagaggaaggtaacatgtcatattttttttccaattttgtaaaataataaaaaccttatgaattatctactagaatgaggtgtaaaatcaaattgtttaacttaatatggtctcacaaaaagacaaagagtcaaatggtcaaaaagaccattttatctcacgaagccataaagtcaataaccacatggagtattggtcatttctaaaacttcagatattctcgacatttctaatgtctacctaagtcgcccctctattactaaaatctaaaatgtgattctattggccaaacgccgcattccaatgttgtcgggcacataacatgaaaaacgtaaaattttgtacatagcataaataatacaacctgaattaaaataaatctccataaaattaataatctagtttcataattaagcccttattatctactaattctaaattaaaactaagcggtatttacaatacctgaaactgggggattgggcagcttggagaaggtttcaagagagatattccatgataagtataaatatgagaagggataaagggtctccttggtgaagaccattaactccttagaacccccattgaactcttccattcatcataagagagtagtgtgtgcctctaatgcatatcatcaccaagtgaacaaatttactagttttatttagggcattcaacagatcttcaacaaattaccagtctaccgtgtcataagcttttcttatgtcaattttgatggtgcaccgaggagagacattttttcttctgtaattct

SEQ ID NO: 405437 - DNA, 755 bp, Cannabis indica
ttttttaatttttgaaatggagtattagattttgatctttaagaactcttatttagctattgctacattggtgtgtcatttgaatgtgattatatatatacgtattttctgaattttcttaattaggtaacgtatttgataattatatattgcaatttactgtatctttaaccaaaactcatataaccaaatttaagtgtttctatacataggctagatttgtaaatttgatataaaagtttttattctcaaactttatgaaaaatatggtatgtgaatcagtttaccataactaaaatggaaagcaattaattccttattacaactattttaatttaaaatataaaataaataataataataaaattaaaaatatggttaaaaatatttttaataatttaaatttctttatataaaatatctatataatattttttttttattttaaagttaaaccaataaatttaaatttatgattaaaaatatctataatattttaagtatttaaatttaaattaaaattttgtatataaaatatttatataatttttattttaaaatatatataataatattataaaattaatgaagaatattctgttaagtaataggatattctgttaagtttaacatagaaatctaaaaaatatcgttaaaccaagaattttgttgcatagacacattttatatagaatagatataaaaagggggtaagttgaaaaatgcctcttttattcatcaattaatcaaattta

SEQ ID NO: 405438 - DNA, 701 bp, Cannabis indica
atattgtgactttgtgaggttcttctcggttctcctttttgtcatttatttggttacaatcttcacaattttttatctaccaatttaattaccttatgcatggccaggatactagctttaaatttcgtatgattacaatgttatttttgtattagttaatggaggaagttgatagttctaaatatataatattattacttgtaactttgtagaaaaacattaaattaacaaggggaattttttatttataggttttaaggtataagtttgcataagtgttgtttattatataaaaaaaagttattttatagaaaaattaaaataatgggaaaatagtataacacattgattacgcccaaacttgtcttcacaaagcggttgttgtagtgtagcatgggcggtcgtgtccacagagagatatcttatcaaaaagtgattagtagaactttaagcgcaaaaagtaaataaatcgttggtggtttttgagaaaattttgaaaataaatttaaagcaaataaaattggtagaaaattataataaaaaaaatgataaggtttcaagaatcacctatatgtttggctcatttatttgggttttgattcacacatataacacaattaaattattcacttcccaataatttaatcggaagataaaacttgaagaacatataataaaaaaaaatgtatttgagtaatata

SEQ ID NO: 405439 - DNA, 716 bp, Cannabis indica
ctctctctctctctctctctctctctctctctctctctctctctctctctctctctctctctctctctctctctctctctctctctctctctctctctctctctctctctctccgacagaaaaaagccacaagatagctttgtcggtccaccactcccttgacctctctcatctctgttacgcgagctccgcgccagcacatctcgaactttcacagaaaagggccacaactccacctctcccactgcctctcttatcgctattacgtgagctccacaccacaacatctgggatgacagtgtgagcttcgaacgacgtagttttgattttaatgatctagcatgctatgtctccacttcaatcgaaattctaaagttatcaactccaaattttgtcctcatgagagttacaaatttaagatacaacttactcgaagtgggtcctgcttatgcgactcaagctccaaaaattgacgaccgaccaccaaaatcaaattcaccattagatcatcatcaacggtcaaaaatttcctaaatatatttttccatttttttgaatatattattattattttataggacatccttacctataaaaagagagctctcctagctaatttttcacattgtagaaagtactcatatgctgagagcatctctctttagtttatctctctaagctttcagacttagccaattttttgttggaaattattt

SEQ ID NO: 405440 - DNA, 877 bp, Cannabis indica
aattttataattaagccctaattgtctgctaatttatcactaaagacaagcggtctttacaataaccttattctcgaatcaccctttcaaggggaaaacaactatattcccttggaagcagtggtctgccatctccacttccaaattctttggtggtttaggctttaggtctcttgttattcacaatcaggcgcttctcgccaagccaacttggagaatttggtctaaccctgattctctccttcactcaattcttaaagccagatattttaagagctcgaattttttgtctgtcactaaagggcataacatctctttcacctggagaagcatcctttgggggagagattgttggaatatgttttaccaggatctagatttactaccatgtctgttatttaacatcctaaatatgaatctctaaacaatgtaaataaacacatataaagtttcagaaaccttacagtgggtgcagcggaataataatggctccttccagtcagatctctaacccttgtatcatgtctgtagcagagtatcaccaagatctgagcccgaatctccttctcttgaaaatggattcttcacagccttacacattatgattgagtaccacttgatgtgtgtgggcactaactctatcacttatagggtttaaaaatatgaagagaggaagagaggagagtggttcgaatatggtatagaatagatggctcaaactttttactaaaggcaagaattcatcttttgatatgaggcatcactatctatttataatttcataggcaaccacctaggtttaggttagaatgatttggcattaaatattgaaaaattaaatggtaaattccattcatgtggccggccataggatgtg

SEQ ID NO: 405441 - DNA, 842 bp, Cannabis indica
tacttaaacttaaaaaaatactagatagagaagtttatttcgttacttcgttttttttttttttttaattttgaaaaatatatgaaatatattttttttaattatatcaactcgtattattaaaaataatcaattttctaagttgtcttaaaagcaatcctgatagcttaggttttactttttcagttatttctgtaatttgttattagatttttacaactaattttgactctcaccaattgccaattggtatattcgctctgtaatcaagacaatatatatatataaaaaagttaagaggcgacacaaagtagaggtgggcatcattcaatccaatccaatccaatttaaatccaatccagttacaaaaagttagatatccaattacaattggattggattggatgctaaaaattggattctaattggattggatcaattattggatgtcaatctcaaaattcaattaaaaaccgatccaatccaattacatatatatatattaaaaaattatttatataataaaaaaatattgaaaaatataataaatatttattagatttttttttaatgttgaatttgtaacacttaattgtttagtgtatttattttcatgatgttttgttctattttattacttaaatgttgttatttaattatttaaaacttttagctacaatacacttgtaaaaatagtatatttatgaagtattaaacttaaataaaaattgatacttagttttttacgtatttttctttatatttttaagttaatattaaaatttaggtgtgtaattagatatccaattaaaaaaccgatattggattggattttgaggtct

SEQ ID NO: 405442 - DNA, 545 bp, Cannabis indica
cacacaaacactgctggattagcattgtgggttcaaacaccaccatcttccgcttacaatcaattgttgccccgtatttaaacaagaaatccattcccaggattatattaaaatcagataattgtagctctaattaggttggcagtttattcataaccgtcaatccaaaaagataaggacctaatccaccgagtagatacaattaggtctcccgagggtaatagggtaccaaaccccaaagcatacacatcatatggttaatgaaaactttcaattactctactcgacaaataagagtgactatctaccgaatcaaataatacagagtaagaacaaccatttatagataactgacctatcaccattgacggactagcatcagcgtcaggctgagtgatagtaaaaaaatgccccagattctggttgttattcttctttggttcatctttattagcctggggacaatctctgataaagtggcccaccatgcgacactaaaaacaagtcttcgcccgtcacttaccctgatgatgcttcttgcgatt

SEQ ID NO: 405443 - DNA, 369 bp, Cannabis indica
tgacatttataggattgaaattgtaaaatatggtatttgtgaaaaatagataaatggttgagaaaaatggcaaaaatctaactagtaatggacccacataggggttggccactaagtctattttttgccattattttattccaaataattcaatcctaaccctaagtgaattagtataaaaagaaaagaatggtcttataatctaactaatgactcttgacctagttttcttcttgtcagacaactaaagaatttgagacttcttcttcttcttttctctcagctatatatcttcttcaccattaaaattcaagctttagtgattgagtgcatgcccacccatagcaagttagtcctcaatcatagtgt

SEQ ID NO: 405444 - DNA, 1110 bp, Cannabis indica
atgttgttttcttgttattttcatttaattttctttttgtttttttgtatttttataaaataacgtaacaatattaaaaaaaaattaaacgtaaaaatataaaaattggtgtttaatataagggatttttacattgactactgaaattttacttttttttttcaattttactgtaacataggtatattataaaactataagaaacacttctcaatgcgtattacacattgatggtactaaacaaatttaaatataaatattaattttaaaaatattaaaccattaaattttgatctgatggcgaataataaaaaagaaatttgaatttctatgcttaattaagctacttaattaaaaaatatatatcaaaaaatactttttttacactatatcaaaattatatttatatgaaaaatatttaagtcaaactcaactttttttatcatttttttgctgaaaaaaatttatttttattatttgttttcagctgatggaacaaccccagcacatataatgtaaaaatgagaaatttttctaactaaattgaaaaattaatcataaaaactcaaatttttctaatattactcattcatgggtaatacccattaagagtgcacccatatacaaatatagatagatagattatatatgacaaaaaaattaattttgttacaaataaaaataaagattaatagacttatttatactatataggagtaaggttggacatatgatcaaatccaatcttttttttactcatttgatctaatataagtagtaattagatttaaaaaattatcatccgatccaatcaaattagacctcaaaatctaatcaaatctgatccaattactaattggattggatcagttttttaattagatatttaattacacgcctaaattttaatattaacttagaaatataaagaaaaatacgtaaaattaaatatcactatttatttaaatttaatactccgtacaattatcatcgttacaagtgttacaaattcaacaaaaaagaccataaaaaatataaataatatattttttattgcttttattatataaattaatataaataatcactataagaaaaatgaacattaat

SEQ ID NO: 405445 - DNA, 1143 bp, Cannabis indica
gactaaagcgagtcaacacaactaaataatacaaattaggtaatttagaaaatattatggttagatatctaataaaatatctaggtttaatttctaaatttattattatttaatttgtcatataagataattttaatataatatttcaaattaaatgataatgttatcatttaatttaaaatatgtctaacattaaaatatctaatcttatagttaaataatttgtaaatataaataaattcacaaatcttaaaatctaaccataataataatttatgtagaaaaattaatttttaaatttctaaagcttcaaatataaaaaaaaaaatgaatttttgacatctaatgataaagttttatgtgaaaaattaatataatattttttattctgatatttcagtttttcaaattgaaaatttgaaatatacataaaaatctaataaattttggctttatttttgccaaaaaatgaatttttgatcaaaagatgcatgaaaatcggacaccatgcaaactgccctgtttcagcatgcacaagagctttatggtccgaaaaacacgcacatggtcgaagaaaaaatagagggaaacaggggacgttgcaaggtccctatgcgcgtgcgcgtccaagcagcatcggctgagaaaactcagcttctgagcacacttccgcgcgcggaaggaaggactgaccgagggatctcgcccaagattgacacctcctttcccgatttttaaaaattcatatttccttcattttttatcgaaattgagttccgtaaaaactaaaatttcttaattttttacaaggaatctaaataaaatattttcagaacgaatataaaattattttcatggaaaaatttcgtaattcacatacattcatcaaataacacataaaccaacatgaacacatccaaatcaacacaaaaacaatattcatcgtttcaaatccatatttcatgaaattaaattattaccatggctctgagaccaattgttgggaatattttaccaggatctagatttactaacaagtatgttgattaacatcctaaatatgaatatctttaaaataatgaaataaaacacataagggtttaagaaaaccctacattagttgcagtagaatataatgactcc

SEQ ID NO: 405446 - DNA, 585 bp, Cannabis indica
atatttcatcttttgccgattgagagcgttttccttagaccgttgaataaattcagaagttgtgaataattgacatattagtcgccattgttcttcactaagttcattgggagggttcttgactgcattttcaaagtcttctgggttttggtaatattttttgaaatgtgccagtctaatattctttctcgttttgtatttctcggccatctcagctatcgaaatagctattagttttggattgctgtccatctggtaataatgctgcgtatgacaaaaaaaaaatattaaaataacattgtaataatgacatttattaatttagatataaattttaaaatatctacccgaagtttggttaagatgaggtgttcaaactgctccgggacattttcccaacttgaataatgtccaggcacatgcaatgtaatctctcgccctatcaaatgagaaaaagttttactctccaatcctactattttgtttgagacattgtcaacttctaatggcaacgagacaccagctttttttcttctctcttctaaatttaccaaaacattcttcccacggcctttcctcgattca

SEQ ID NO: 405447 - DNA, 531 bp, Cannabis indica
cttcgttggaaacttaaggcacggatgaaatatagatgtaacagctgtaaggtcatataaggctggtcgacccaacataacattaaaggctaatggaacatccaatatccaaaattgtgccattacaattatgctcttcgaagcttgcccaacagtgaggggtaggcaaatttgccctacaggtgcaacactctggccagagaaactgtatacgggctaaaggcagggagttaaatctttgagttggagccccattttttcatacggtgttttgaacaagatatttgtagaggctccattatctatcatagttcgggccactattttattggctatctatacttccacgagcaacggatcgttgtgcaagaagttaaccttgatagcatcatcttcactgaacgttatggtgggttcccctacctgtggtatttttggtttcctttcttcaacggccaggaccacttccttttattcgggcatacctttcccgggctttgcctgaatctttagctatgtgcgggcccccaa

SEQ ID NO: 405448 - DNA, 1051 bp, Cannabis indica
agtaacgtttagtaaacagaggtccaaaatggtattacctaagataagagggcttaaaagaaattttggaaagatccctccacttcaccacttttgtctcgccattcatttcatttctttctccacttccccacttctagttaattagattaccaaataaagacacatgttattgaaaataagggaaaaaaattgcaaggggagagaagcatcatccaaaatccgcgtagaattttaaaagtttcaccattaaattcaatccaaaagtgtcaaataatgaattaagtatatcattatatgacattaaaacaagaatgaaattaaaaaagttacgcttgtgcatttacaatacataacacagcacatgaatacattactataaatatacataattctttttctgtcattgacaaaataaacattattatacccttttgaaaagatacatgttatattggcaaattcttaattagctcatgagtattttgaggatgatatttccttaataatacgaaataagcaagaaaaaaaattgttatgaaagattttacatgttatgttttatcacgcaatgtggtcggtgattatgccaagttaaaaaaaaataatgcttaaaaaaaagaaaaggaaaatgtatgtgttgtaatttcaggggaaataactttaaggattcaatcataaacctgcaataatctcaacacttgaacattaataatgaacataaaccaattaatcaacacaatgaatcaaaccagaaatcaatcaaagaacaacacaagattttatcttggttccggtcctagagatcaacatgatccctggccatactccagctgagaaacatcaccaattcttcattaatatgtgaataagagagcatcaatacaattgcaataaccaaagcaacacagctcagatggcactcgacacacactagagaaaacagtcacagttttctctctatcaatccgagtacaccccttgttcttgaccctcttcaagaatagaactctcaacttagaaccataagcaactctctctaatcctctct

SEQ ID NO: 405449 - DNA, 248 bp, Cannabis indica
aaaaaaaaaaaaaaactccatcaattaaaaaaggcatttaaaattatttaagaaaaataagaatacgtgactcaattcaaataaaatttagtggaaacactagtgcacttcttttatagaaagggataatcccctacaacacactatacttcttatcatgtccacaatagtatttataaccaatcaaagcacaccaaataagaagtattagagtatccgtaattagggtctccaccgtagaatttctc

SEQ ID NO: 405450 - DNA, 561 bp, Cannabis indica
aagactaaggaaatgaaccatgcctttttggactaaagtgggggtggaacatgctaatatggtgcaaatctttgtgttgccaaattctggaagcgaaatatcttaaagggaaggacttccttagttgtcgttataagaattcggattcttagttctagaagaatgtggttaaagccaactctatcttgaagaaaggtgcttgtatggtggttggggatggtagggatacagacatttggggggacccttggatccctcattacaaaggattttcccctacgcctgttggtgtccctgatggtggtgttactaaggttggtgatatgttgataaacaatggtaattgggatatccgtaggctcaacagtctctttgatcctgagacggttgctgcaatcttaaagggtggtaatccctccagccttggcaaggataggtggatttggactctagaaagtagtggccaattttcgtgtaagtctgcttaccttacccaggtcaaggaaaggtctcctcactgtgatgtcgctctttctctctggaataagctttggaatagta

SEQ ID NO: 405451 - DNA, 567 bp, Cannabis indica
gagagagagagagattgtcaaatctgtattttgggtatagcctttagttttaaagtgttagctattgtgttctacaaaaatatttacttttagtcacaagttttgttgtgactaaaagtgaaaaagttgtaactaattataaattatcattcctatgttgtgactaaaaggtatgtagctaaaagtatcagttacaacaattataatttgttgtgactaaatataattttagtgacaacttatacttaaatactatgttttagtcacaagtaacattttgttgtgactaaaagtcatatttagtcacaaaagtgttcccaaaaataatagtttttttatagtgttgctaagtgtgcaaaacgaacaacaattaacttgaaacacaccgttttagttattaattaagtgactgttgttcatccacaacaatacatagcagttttttaaaaccatcgaaaaagtcaactataggctattgtggacaatgtcccacatggaataaatgatagagaattgagccatatataagaacatgggctactccgctcattgccaattggttttgag

SEQ ID NO: 405452 - DNA, 557 bp, Cannabis indica
taagtatattaaccctacaatataggtttatagagtaatcactctatcactctcactgttacttaacaaaatagtctaacacttccaatcgtccattaaaataatccatatataaacattttattctctacattcacaaaaagaaatttgcctcgcgtacaggagataatcaatccttttacaggtcacaatttttgggttgtctatcttaaataaaactaatttcaatataatcaaatatactcattaataaaagatcagaatttattttatgttgcatggttcacatgatctatttcatgattatatttaatgtataaattctattaagtccaaaacatatgtaaatatatatatttgttcatgattatagtgtcatcaacacagtaaaatataatcatgattatatgttcaaaagtttttttccataatttgttagttcactgaatttagactaacatgataatcggtaataaggtatacttacaccttggataagtgttttgtcttttccagggtataggcaaagtttaccagtatcgaatatatggagtata

SEQ ID NO: 405453 - DNA, 562 bp, Cannabis indica
aagcagcaaaatagagtttcaaaagttaacactggtagacccataacccgcttggtctgaaatggcacaaacatgtacattcctcgccctgctcctgaactcatggttgatcagctaatgtcttaccctttcctgcacagtagagcacctgtgagccaagcccagcaagacagtatataacataacaacaataatatgctcattgtactatttaaacaataataccattcatatatgtctgtgtgtcacagacctgcatgttacactcacatgcctaattatgtctacgtggcttagacccatgtgttgcgctcacacatctatttatatctacgtggcgtagacctacgtgttgcacatctaaatacaataaggccttagaattggttcatctcggttatggttaccgagtccaacctgattataccttaagcgcataattcttgaatctcattacatataacataacatggcatttttacacatatattgtttgaaattattttaccaggatctagatttactaacaagtatgtttaattaacaccctaatatgaattct

SEQ ID NO: 405454 - DNA, 519 bp, Cannabis indica
aaaatatacattattatattgatatgaagaaaaagaaaaagaattgcattttaatatttttaaatatatttttttttctttaacaatggtatcttttatattgttttaaaaaaatgagatttttattttggttttttatttatttgaatagataatatttaaaattaaataaatattaaaagggtaatatagtcatattagaaatttgggttctctaaattcaaggagagggtactaaatgtgtagaatttgtaaataaaaggtactaaataatcattattaaaaatataaggtaccaagtttgttttttggcaaaacataaggtaccaaatgagtatttaccccagtaaaaatagtgtatcaacaagccagatcacttaataagggattgcagaatattgaaaagagagcaaaatcaaagaatgaaaaatgagaaagagactaatacagtttctactgaaggtgatgttgtcattgtatgtgatgatgggtatgttagtcttgctacccaagattgta

SEQ ID NO: 405455 - DNA, 811 bp, Cannabis indica
cctccataaacagtaaacacataacctgttaatgatcttctagtatcaatgttccctgcataatccgaatctacatagccagttacatcaccttgtatttgatctctgctgtcaaataccaatccagtgttcagggtacctttaatgtacctcattgtccacttgagtgcagaccaatgtttcatacctggatttgccaaatatctgctagtaacactcatggcatgtgcaatgtctggtcttgtacacacgattgagtacattaggcttcctacacaactggcatagggtatactgctcatgtgttttctttcagcatcagttgttggagattgagtagcagatagcttgaaatgttgtgctaatggtgttgatacagctttggagttgaacattccaaacttatcaagaaccttcttgaggtagttgctttgagatagagtgatcttgtgaggtctttctctttttatatcaattccctgtatcctctttgctgtccccagatccttcatctcgaattcttcacataatagatgttttaacttgtcaatttcagacctttccttcccaacaactagtatgtcatcaacatacaatagcaagtagattttgttagcaaaatatacacaaggatcataattgctcttacagtaaccaatcttactcatgtattcatcaaatttcaagttccattgtctaggagcagtgacgaagccagaaatttggctcagtgagggcttgaataaatattgagtcaaaactaataaaaataattgataaatgtatcttttaaattttcatcttcaacaaa

SEQ ID NO: 405456 - DNA, 696 bp, Cannabis indica
tcgattcatgattgttgtgtattcattactatctaatgaaacaacctcattttttattaacctattattatcactttaaagagaaaaagagaacacttatacgtgtcaaaacaaaaaagaccattttataactcaaaatcattgggtactaggggtgttcatcaaaccgctcaaattgcaaaaaaatgtggtttgaaattctttgcagtgcggtcgcggtttgaatttttcctaaactacgcagtgtgttacgtgcgtgctaagatggcacgttacaagccaagtgatgcccacaagttgaccaagtggtggtcaagtggtggtgcatgcatgtggcatgttgatgcttagtttgtatacaatggaattttcgtaaatatcttcaatattgtccggaacgggacgggacttggtattcgccatttatttaggtctacaaatagaatggtgcaatcggtttggcaaaactatgtgatttggttaacggtttggccgtatgtctacagagctaaaatcatgtatgttcctggtagaaggctaaaagctcaaaatactctttaagggggtactttggtgtcagctctctactaccccttgcaccttggtgccaagtgagctactactagtcagtgggactagtaggacgggcatatgaggaccacgagggaactcatatgtctccatgagttggagtac

SEQ ID NO: 405457 - DNA, 739 bp, Cannabis indica
ttatgattgtatgtgaattaaaataatttttcatgaaattaatatatttggattccttgtgaaaaattaaacaattttggtttttacagaactccattccgataaaaattgtaaaagatatgaaagtttaaatttttgggtccaagtggtgtcgagatggatgcatcgcacgcaccagtcactcaaacaaggtgcatgcgcgcgctgatatctcggacacaccttgtctgaactcgagcttgtcactccttcagacacacccaggatgctacaccgcgcgctcacataccctataaatgtcctcatttctttgtgcctaacccaccacccctttccctgcacgcggaatgggctgcttgtagcctgtttcgtgggcagctgggagatcttcaccaaaaatttgatttttaggtgatttttcaccaaattttaaattttttgatgttcaaaccctaaatatctaaataaaatcttatttttaacatttaaacttaaatataaaatttacagattaataatattaaatttttgtaatagattattactattagtttgagatattttgaagtttaaatttaaaaattagttgttttatttttaaattatggttatattttaaaaatctgttaatttctttaatatttatatattatttaattataatgttacatattttaatattgagtatattttaaattaaaagataatatttttttaaaaaaatttgaaatattatatt

SEQ ID NO: 405458 - DNA, 557 bp, Cannabis indica
gttcgtcctactcctccattgattgtatcgacgggggtcgttccattacctgaaagtggaagattcatcattccgatattgattgatccattgttgttatctcctgtcgtctaatttccagccatagtgattttccttcaaaatcaacaaagtatttcgattccaactgacggcaccaaatgttgttgaaggaatttagacaacaccaaattaaatgatataataataatatgagtagaagaatctacaaatactcaacctagagtggcgagtattcgaactaagaacacaaaaatgctggaaataaactggaaatattaagaacacaaggggatatagtggttcagtcagatcacggtctgcttagtccactgtttcaaggattttctgtcttgtccatttcatgttggatcactcctttatatacaaagcaagtgtcctttgattacacagagattgaattcattatcaattcgtttgtacattgaattacaacaattaaattaataaaaacgtaaatacaataaatgaaggacaatttcagcttaattcactaa

SEQ ID NO: 405459 - DNA, 671 bp, Cannabis indica
ggactatcaacctctttctcgaattgttatagtgacaatctcactctaactgggttgtttaaaatatcgatgctaacctcacctcaatcacaatatagaaaatgtgtttaaaattacaagcaaatgcactctacaagtatgatgatacaataaaaaacttagagagattagcaagcacacttgaaaggattaaacacaaattttggctcaaagtgtgtgaaaaatgtttgttagattataaacttgggagctcatttaaatcacttgaatatgttaggtatatgatataaatgctcatccaacttttatttttgagtataaattgagtttatatagtgttatggtgaaatatagccgttggacacgataagcaagattgccactgcgcaaaccagttcaccgtttgccaattggaaactggttttaagagaaccggttaaccgaattcctggtagtggcaaaaagtccaatttttcgcactaaaacgaccataactctcaactcgattatccgattttagaaatttcaattttattttcttaattaaatgatatgtgattcagaaagtcaattaaatttttttacatcatttggtgagaaaaattgtcgcacaagttagtgggccaaaatttgtacttaaaacttttttgagtatggacttgaaaattact

SEQ ID NO: 405460 - DNA, 624 bp, Cannabis indica
ttcaagatgccgacttggaagatatacgcaggaaaagaagatcccttgtcacatcttaaatattttgagatgcaaatggatctgcaaggagtactgggtgatgtgcggtgtagggtattccctgccacacttacagaattcgcacaacatggtacttcaagctaccaccagggatatttaattcatggaaggctttttcctcgaaattccatgtgcatttctcctcctctcatcaactcccattacatctagaagacctggtcgaagtaaaacaaagaccaggagagcccctcagagcctacataagcaagttcatgacagaggctacaaaagtcgcaagattaactgaagaggggaggctgaccgctattttaggaggcatcgaggtactcggagaactgtggaaggacattaaaagatgtggtcctatgtggtctatggtagagtttctagaccgagcagatgggtttatcaagctcgaagaggctcgccagcgagcagacatcgagcctaagccgggccaactaccagatgtcccctcggtaggagcacctactcaaagcccacaataccctagcagcttaactccgagcgaaaaaaggtccaataacaatggcaagcaag

SEQ ID NO: 405461 - DNA, 715 bp, Cannabis indica
tatataggcagagggaaaccaggtggtggagagtgagaaataggtgtaggagcagtatgtgaagcagttggtatttgtgtttgagtatgagataattgtggttgaatgatgacagtaggaggcatttctgttggtacagtgggtgaaataggaggtactggtatatattgaggagttgtagcagaggaatgaagtggagaaataggtggtgagaacaatgtttggtagggaaatgtagtctcatcaaaggagacactacgagcaatataaacacggcctgatggatgaaggcatttatagcctttatggcagggactatatcccagaaacacacatgttgaggttttaaagttgaatttttgtgactgatatggccgaagtaatgggaaacaggcacacccgaatacctttaagaaggtgtagtcaggtttttgagagaacagtagctcatagggagtgatatagttgttgtttttgaacaggtaacctgttaaataagatatgtggcagcagtaaaagcatcccaccaaagtgtgagaggaagtttagcttgggcaagcaaagtgagccccatttcagtaacatggtcgatgctttcgctcagcacgaccttcgttgctgatgagttgtgaggacacgggtgtcgaaacacaatgccaagttttggcaaatatggggagcaaaggggtcgaaaattcaccaccccagtccgatt

SEQ ID NO: 405462 - DNA, 824 bp, Cannabis indica
aagtattaatatataaatgagtcaacttattcttaccatggttttgatcataatattattcgatttggatacatatcatcttatttcaagttaaaaaaactaaagtatcttcgtattataacagcctattattatgctcttgtataaatataactatttacaattttttaacattcaaaaagttatcgagtttgttttctatagctctactaattaaggtgctaaaatatttttagattgactcatctattccgtttattaaatgaattattttcaagttgacacattaacttaaaaatgacacaataatgacttactacaaagtatacacttatattcattctatttattgagaatcaaaactttaatcttcttcactagattagccacacacacaatatttggacataaacacatgacacaatattataactcaaactcagaaacacttagtcaaaaattgaatcatcaataatgccactcttttaagttttaaagttgtatatggctaagcaactttggttattgtattatcattgattctacacagttgatcatttttagctttatgatgtgaaatttcgtattgtatgctttttagagtttctaatagacttcaatgagtgatagattggtataattatatttggaataaattttgatgttattgtttggtggattcttattttttttattagataacataatattatttattcgttaagtctgatacaattattaagtgagaatggaaacctttcactatattgaaatcaagttaaaattaaaaaagatactaacaatcttattatgcattttacagt

SEQ ID NO: 405463 - DNA, 903 bp, Cannabis indica
ctggaagcaacagatacatttagtgagggcatggtttgaatctatgcaatagatagttgggacagaaaagtgaactcctgtgttgttgaaaagtgtggattcacctgttgtatcgccaagaggcagctaggttcggtttcagcactggtttgtctgagcaaagtgatgcaataattgaaacatatgacaatgatggtggtggtgatgatgatgatgatatagatgaccaacaacaatctacggaaatcaacagaacaaaatcaaatttcggaggatgcctctggattatttcactcattagaggcaagttgttactaactcatttactttctttgtgtttcccaaatttcagagtacttttgtctattataaaagagttagtgataggtccacttataaatcacgcatgaatttgacatactcttatgtgacaatatagttttagagcactatatattgggaggtataataggtaccaagttaaactatagctcaaaattcttaaaattatccttagatgagctataatactttaacattaactcacgaatatagtgtgtttataaatttagctaaaatttacctattagctaaatatttatttttattattttttgttgttttatctttttctttcatatcatataaaattgagtaactgatgtatggagttaatcttgtttcactgagcttctgcttttaaaaactactaaaatagatttatgctaaaagaatttttcagagtcaaaacgaaacttagttacaagtcctaagtgttttttttgagcttcagaaaccaaaaatagcttttaaaagtccaatcaactaggattatacgtaaaagtttaaaggaagtagaaaaaattcaggcgccgtttgtaacacttttattttttaattttt

SEQ ID NO: 405464 - DNA, 746 bp, Cannabis indica
aaaaataagactgaaggtcgaagcttacacctactacttggtgctttgcagcttgagccaaagtgaaggtgtaacgccctgtccaacagggacgccacgtgtgtgcaatttaataaagttcttgatctatataatatatataattatactgaaaagtgtgggaaattaaattttgataattaaagttcaacttttaaaactatttaacaaaagataagtgatatagactacggggtccccatgttttcaaaatatttataaactggtttaaaagtattttacaacataaactttacatttccaatatacaatcaaaatagagcatcctgtttactgggccgtgccactgcggctggtatgtacattgctgctacgaccacaaactcatggttgctcaacctttgccttcccttaacctgcaccataagcacctgtgagtcacagagactcagcaagaaaagtgaccaaaacaataaatgaaagaaaatgattatcaatttaatctcatgccatcaaatttactcattacacaatatcataaagtattcctttacacattacacattcacattacacaatcttggtactttataaagtacccctgtaccactcgtgacccacgagctgaaaatgtcactatcgttgcccgataaagcaaacgataagtaagaaacctaaccacagtttaaagagtaattactcgtaacggtaataactgtttccaaccctaggtcataacctaggct

SEQ ID NO: 405465 - DNA, 456 bp, Cannabis indica
ttaaaaaaaaaatcttgtcattaatataatatctcaaattattagtatttttgtttcctaaatttgtgacactatcaaatgatgtccatataatatgcaacttgtaaaaaaatacatttgaacataatacaactatagaaacgtgccccttatattactttttgttatatttaactatttaattggtgatatggtattttagtgaagcacaaaaaaaagtaattgacactaatttatgagagaaaaaaaagagttaacattaaacataaatttatatatatagggatatgattttgtcttgttattgtactttcacggattgtaatccgtgatgtacgacagccgtcagatgagggagttatttgatctgacagttgagattgatctaggggtaattagggttaaaaagtagaaacgtaccctgacacttatttaatgtaccctaagacccatcta

SEQ ID NO: 405466 - DNA, 549 bp, Cannabis indica
tgaactttctctaaatacttcactatttttaagcctttggcctagcattccccgaggacctggttcacgattagctgcaaatcactatgacaaatgagatttttgactttcagggcctctgttatctttaagctggcgatcaaggcttcatattccgcctcattatttgatacatcaaattggaacctcagagcatagtgaaacttaaagccttccagcgatattaatattacccctgcacccaaaccttgttcattggatgcgccatccacatataacttttaggtttcctcgtctcgctgatcaggtgggatttcttctggagttataccttctatcaagaagtcagccaaagcttggcccttaatggatgttcaaggatggtatgttatgtcgaactgccccagttcaatcgaccattttataaatcttccagaagcatctagctttgataaaacttgtctcaagggttgatcgattaacacttttatggggtgagcctggaagtatggctgtagtttgtgaaacgcatggactaggcataacgcg

SEQ ID NO: 405467 - DNA, 588 bp, Cannabis indica
cagatcatatatgtctaagtggtggtattctactgtccttaacaacttaaaaatataattaaaaagtaagtaattaattttttttaaaaaaatatatatatataatttaaaacggatcaggtcagatctgataccgtaaaaaattagcgggcgggtcggatctgatccaagatccaataactatctgaatgtttcggatcagtaatgatccgtcggatcggatcactgatccgatccgaatgaatagatctttttgccatgcctagtttacatcaaaattctgagtaagtcttcaaagaattatgggtacaaatcaaaattctttatagtttttcatcttcagagtgataggtaatcagagtgaattatttagatattagaagacctattatgaatctgtgtcatggactttgagggttcatggtataaatacatgcctattgtagagttctcttacaacaacaattactagagtacgataggaatagctctttatgagatgctatatagttgaaagtgtctattctccaatcctattgggacaaactggagaaaataagtatctgggtccataatttagttcaaagg

SEQ ID NO: 405468 - DNA, 550 bp, Cannabis indica
cacaattaaggagacaatgtgtggtagtttcgctagagactaaacaaaatggacagctatagtccaaaggcacctttctctcaaaaagtctcttcctagtagggagacaattagccgctgccctccaaagaacatctttgacagtaggcggaactttgacttcccataactctttccaaaactttgaatccccagcccttccatcaacattggtgtcacggttcatgagtagttggtaagccgatttaacagagtaacaacccaaattttccttcaaccaataccaagaatctctagcttcattaatagctaaaggaatacccaggattatttcagcttccctttcattaaaaatgtcccgaaccaccaactcatcccactctttagccccaaccttgaacaaactttgaacttttagatcattataagcacttaaatcagaagttggaattggagactcatcacttggaagccacgggtccatagcaaaccgaatagataaaccatccccaaccctcattcttaacccagccttgagaacaccttgagc

SEQ ID NO: 405469 - DNA, 596 bp, Cannabis indica
ggacctgccggagtgggtggttcgtaagtactttgatggaatgggcctggaagtagggccttagctttcttgaagcaatcaggaggcaaaaagctagcttttgatcgaacggataccgagtttcgaccctaacatgcgtttgctaacatagtataccgggtgttgtaacttttccttcctcccagaccgaggggtgcactgacaacgctcatggagatagctaaatataagaacaagtctgctctgtgaattggttgtgaaaatattggtgatttggccatgtgttctttcaattttctgaatgcctcctcgcattctttagtccattcaaatttctgacatttcttacaaatattgaagagcgggatgcatttgtcagtcgagcgggagatgaatcgactcaagacagcaaccttcccggtcaaactttgtacatccttctgtttttttggggaaggcatgttcagcaaggcctatatcttttcagggttcacctctatcccgcactaacttacgatgaatcctagaaattttcttgatttgacgccaaaggtgtatttttaggattaagttgttggaaaatattttaccaggat

SEQ ID NO: 405470 - DNA, 801 bp, Cannabis indica
gctttcgacgtatagcttcaaacacacagagcatttttctagttgaatctttcctcaagatttggcctgatgtgtgtagcattgtccatataaatcacactttcagcaatttcacttgaaatggcgtgaaaaaatccacaaaatcacaatgttattacaacgatttcatagctcaatatcatcatcatcttcttcaggagtaggaagttttccattgacgaacttgagagccactgtcatggcttgacgccatgaactgtagttctcacaacctatgagaatctttagaaccaaactagcttcaagatgatcattacttgactggaagtaaggatttcgagcttcatcaaagtaggatcgaacgttcgaatccaaaacagagaaccgactaaaattcttcgatgagcttcgagtctgaataccaccaccttgagccatggagaaaagaagaagaagaagaaggaaggagaagtgctctaataccatattagttgcaaaaagaaaattgagaaaaataaaatattgaaagctctgtatttaattgtattgattgtcatgtaaagatacacatattgagcttatatagctcaatacataatcaataagttaattagataaactaactaaaaggatactctaacaactaacagaaaactaacacatagccacaataaatatataatatagatatagtaatatcgataccctagctacaaatcaaaattaatatggaggagctaacaactagtgtcacacactaatttttatcctgtccagcaatatatatacatatataattat

SEQ ID NO: 405471 - DNA, 886 bp, Cannabis indica
attaattttgtattgttataatttctttgtggtatataattttattactacggtatataaatttccagtgatacgatatatcaaatatggttgtatatatttaataatctaatataatatgaaatactaaaaaaattatataatttaatttaattattatatattaaaaaaataatgtataataaatgtattttataatttttattaattaatttattatatttggtcatttgttatttgtttttaaaaaaaaataatgacatttattaatttagtttctaaatttatgatcattttatattttaccccaaaaaaagttatgattgtgataattatatatatttaaaggaaatataattatattattgattaattttattatacatttgatcttaaaatatcgtttcagtatacctttatttatttcggcatgcagtagaggttttttgattttaatttttttcaccatcacatatgatgcaattatctgaaaccatttaaaatttttacagttctcaaaaataagattcaaatattttagtgcagatctaactaattttaatactatatatatgtatgatagcaactattttaacttttattttagcagtgtaaattacatagaattttctaaaaatttacagttgattataaaaaaaacggcaacatatgcgatcataaaacatatattaaactaaaaagttcttctattgtgagtgagggtgtatcgaaatggtctagatgtaatacatattttccctatatttattaggggtgttaatttatccaattcacactattttgatcataatgcattcgatttgcactaagtgcgagtttcatattttgaattcaatccaatccgcataataacacaaatccaatc

SEQ ID NO: 405472 - DNA, 680 bp, Cannabis indica
tctcacctttaccaaatccataagtactgtaaaggtagtaaacaaaaggaccttggaaccaatctcccactgtgcatgaattaatcggtcagtaatcataatattaacattcttttttcttaaatataacaccatagttaaaagtaaaacaagaattttcctcgtaaacaacatccaaaaaggttcacacaaattcatcatcatattagttaaagaaatttcttaaactttgtacattagaaatccaatatatatgcccgtagaataaaaacgattatcgaaaaaactaagaatctaattaagctgaataaataattaatttaaaataaagcaaataacttgtcacgttcagtcataaattgttccccaaaacttgctcattttccattcttttttttattccagttctcctgaataataaacgcttgaaatcgaaacgaaagcacattttaatttagaaacaaatcgaagcgagacaatacctccatcatcgcccttgatacccccggagccaacgaagcggggctgctccgacaaacagaggatccagcagagttaggaggaggccgagacttaaataaatgaaaaccatgaattaaaatctcaccagtcaccatttgtaaaatctcaataaatgttcgataaattaataatttcaataaaaaaatcttaaaaaaaaa

SEQ ID NO: 405473 - DNA, 545 bp, Cannabis indica
tcttaattttacaattgcttgttgtacttcctcaaaaatattctaaatggcatgaaaataaagaaaattagcaactaataaaaatcacttggaattgaaagtaccatatatataatataataaaaaataaataagaaaactgctaaaaatattcttctttagcaaagcaagcatatcatttgaagacgctaaaactcaaaattttcattccaataactctataacttcaataactcaataactaaaaaatcaagcatattattaaatgaacaaaatataaaataactactgataatatacataaatattttgaaaatcatgaaataatactttttccaacgaatatgaaaatcgaaaaaataaaggtggaaccaattttaatttgtaaaaataaaaaaaaaatattatacttagtagaaatataactcaaatgatatattaattacaataattagcaattttgttctttgaactttcgataatattgattttggcctttaaaatatacggcttgttaagaatctctcatgaacttttacatttat

SEQ ID NO: 405474 - DNA, 816 bp, Cannabis indica
aggtctaagctcgggtgggggtccggggttcgggtcaagatctgagtctagggtccaggtcgagatctgggtttggggtctaggttcgggtccagttttgggtttgggtcatgttgtcggggtccaggtcgtggttagggtccgggcctaggtttgggttccaaaacctaggttagggtcgaagtctaaaatattgattaaaaaaaattgtttaaaaaaatcttgaaagtgattttttttccaaaattttaaaattatgattctcaattaatttggaaagggaaaacaattttataaaacatgatttttaaaagagttcattttttttaatttaaaaaacaaaaaaagtgattaaaaaaatattgtcaaatacacctgtaattaataattatttatattttcatttatatatttaatattattttttacatagtataatatttttgttaacattcttacacgttcttattaaaataacatttattttaccacttatacatcgtagcacaattgtaacatttgccctaaatataacacttattaattttttaagttaaatttagcacaaactctataccattcattgaagatgttcttacaaactcaaaatacacaaatcatttaatgtattttaaattaattaagctacacataaattaaattcaattatattcacaaataattaattaaaaaagtattaccaccacaatatttaattaaaattaaaagggaaatttgacaatatatgcttagaaatagcatatattgttttaatatactaggtaaacaaaaataaaaaaaatactctccaattaa

SEQ ID NO: 405475 - DNA, 540 bp, Cannabis indica
aatatcttctttttttgtctatgcattccgaagtagatgtatatctagtcaatattggttcaatagttgttatccttgtctcgcttaagactatacagtcaacgagttttgaatattatctagtaaacctctatttaataataacgagttattttaatctatatttaatgacgtaactttattatattattagagtggattcatataacttttgtaggacacatgtcaacttctgaagtatatcagaatttagggtataacggttagttaaataataatttaattaaataagtaataaatatcttatttcacatttgttacatggatattgtttgttatatttaaatttcttattcaaattttttttaacaaacctattatttatttgatctaaatttctatgattaacttgttgatagatccaatgatctgatctcactactacaaaaatgcctttcagtgacacgttttgagagtgcctatagtgttttagtgacacttcaatgcgtgtcactaatgtaggtgtcaggaaatatactt

SEQ ID NO: 405476 - DNA, 549 bp, Cannabis indica
tcaaagcttaagtcccatgatttgtctgtacactagatttatactgacatgataatcagcgataaagtttacttgcaccttggataagtgttatgtcctttccagggtattggcaaagtatgctagtattagatgtatggagtatatattggactagactgatattgacattggataagatatcataaagttattgttatatctttcaaagtcaatattacttagttgatcttaggttaatagatcttaatcttgagatggttaggttcttgcataaatgtattattcatgttcattgatttgtttgttaaagctgaccaattggattggcccaattcttacatcttgagaacattgtagtacaattgagtgggagcactaattatagatatggaatctatatgtaatgacagtgtaagtaatttggattagaaaagacagttagcactaattattggttttatgaatttaatttatttgtgggtcctattgttagaaatgggaattagagttataatttatcaatttcggagattttattaaactcta

SEQ ID NO: 405477 - DNA, 573 bp, Cannabis indica
gagtgagctccgccggtctggacacaaaggaggcacaaagaagaaagcaaacaagagagtacgggagaatgaatgtctttagggttctctttttttattattaattattattttatacaaattttatttaaatttaaatttaattagtttatataattttaaaattaataatattgagtgaagtgacttaatgttaatgatgtggattaattttaatgagttgggctaataagatgttgacaattggtaatctatgtggcagttaacgccaaggtacctacggctgcaataaaattgtaacagaaggtattttcaccgctaaaaaaataacttaggtatttaactgctacagtatacaaaatttaggtattttcgccgcaaattactcttaaaaaatcaatttttgattatataaaattaattgatttattaatgtactgtctcaataaaattattttagtattgcttaaaaaaaccttcagcttagataagtttcttttttttatttatttcaatatttcatttttgaaaaaagtgaaaaagaaaaaagaacacaattttaaagtttttttt

SEQ ID NO: 405478 - DNA, 648 bp, Cannabis indica
atttttgtaatttttttttatgatttgtgtgtgttttaaattatcctaatttttagcccatcaacacatgaagtgggtgctaagtactctttttattttatttattaattaaagaaaagaaaatgactaactacttacctataaataaaaaataataaaagagcattctacccacttctaagaattgaagtaaattttaaaaaatttgctctgttaatcaatatatatatatatatatatatatatatatatataaaagagaagtatgaagcggtgacatggcgctttaaaatcactcaaaatatttgtatctattctctacttaattctctcatttaaattaataaaataacactttaaaattactcaaaatatttttatttaatttttaatttttaataattaattaattaactaaaatatattatatatttataaccatcttataagaattttttttttaacctcgaaaaaaattattttttaaaacccaaaaaaatattattttttaaagctctacaaaattttaaccaaatataatatatagaagaggttttaatggttacattaaatatgcaactagggtcagtcctgagctaagacgaaggaggcggctgccttaggccccccaccgctcaggaccccatt

SEQ ID NO: 405479 - DNA, 1312 bp, Cannabis indica
gtgatctggtgcccacagatttcgctaggaaacagaagtatgtaagaggaccaaatgccacaatcagtcgggacttgatgtttaccactgttcatgacactttgtacaagaaagtgataaagctagccttaatttttgaggaggttgaacaacatgtaacaaaggagcagactgcaaaggatgcctccacgacattgaattctcccgtaagtggtaatatcagtaaggggaccagcggtggtaaccctgatcataagcggatggcctgaagcttccgaaacatcagggggtaataggaagttttgaggaaatagagatggtcgtcaaggccacggatcctctttcagatcatatctagaatgtccaaaatgcaagaaacaccatgaaggtgaatgtcaggccaaggctgagtaccatatttggtatggattatatgaattggatgttccaggattacctagatagatgtgtgattgtatttatcgatgacatcttagtttattctgaattagaagaggaacatgagttacatctcagatcagtgttgcaatggttacaggaccataagttgtatgctaaatttaaaaagtgtgaattctggttatctcgtctctctttcttggggcacatagtagataaagatgggatcatggtggatcttggcaaaattgaagttgttcggaattggccaacaccaaagtcagctactagagttagaagctttctgggattagctgggtattaccgtcggtttgttgagggtttttcaaagattcgatgtacccttaacgaagctgaactgaaagaacctgaagtttgtttggactgatcggtgtgaaaaaagttttctagagttaaagcaacacttgattacggctccagtgctaactcttcgttcagataagaaaaagtttgttgtttattgtgatacctcgagacaaggtctcggctgtgttcttatgcaagctggaaaggtaatagcctatgcttctcggcagttaaaggagtatgagcagaggtaccctactcacgacttagaactcccagcagtggtatttacgctaaagatttggcagcattacctatatcgcgagaaatgtgagatatacactgatcataaaagtgtaaaatacttcttcacctagagagatctgaacatgagatagagatgctggctagagttggtgaaggattatgactgtgagatcctttatcacactagtaaggccaacctgcttgtcaatgcctttagtagaaaaggccagagtcagataaatacagtgaagcaaatctcccagcagttagcaaatga

SEQ ID NO: 405480 - DNA, 517 bp, Cannabis indica
cggccctacaaacttgacatgagcaaagcatacgatagagtggaatgggttattgcaagctgttctactagagtgggttcgataatcatacaacttctctcctaatgagctgtgtcacctcggctagataccagattgctcatgctggccgattatttggctctattactccgtggagaggttacgtcagggagaccccttatcctcttatttgttcattatttgcacagaaggcttctcggcattactgaagcattatgagcacagacaaccgtcaagaggcattcaaattgctcgtggggctccaactgtatcccacatgttctttgtagatgatagctacatattttgtagagcaaatgagagagaagcttccaatgtgcaatcgttgttgaatgtgttcgagtaagcttcgggacaaaagataaatcctgttgtaacgtccccgcttcaagcctccattgggtccttacacccacggaaataatggctcttatacacgagtatgtcactctgg

SEQ ID NO: 405481 - DNA, 604 bp, Cannabis indica
gtttatccgatttttttttaaatcttctcaccatctttataattactttttattcgttttcagtaatgtaaattcattcatatcgtgttggtccaactcatactattttcgtgcttttcaaaatatgaattgtgccatagcgtatcttgccgcaaaaaacatgggtcatgtcgtactgtgccgatatttttaaagggtatgctcgacaaagccggtaagctcgatattttcacaccgtgctcagattcgtgccatgctttactcgtacggacctatttttcttaaacaggtttgccaatttcgatatttaaagtcaaatttgtgctttgctttaccactttttttttttttacaaattaatgagataattattaaactatatgtatttttttggcttattcgtaccacatgtccctaaactatttaagttttagaaagttagtccccaaactttattttttgataaattagtccccaaactatatatattttggcaagtttatctctgaactttatcttttagtaaattagtacccaaacttttatcttattatcaacattaaattctcactcttagatattgatatttttattatttttatgt

SEQ ID NO: 405482 - DNA, 634 bp, Cannabis indica
gaccaggacccggactccaaccccgacctagaccccaaccagtatcccaagccaaaccttgactcaggacccgaactcagaccgaaacatggaaccagactcaggacacagaactagggccgggacctagaaccgcaccccaatcaaggccccgaaaccaaactcggacctgggacccaggacctgaaccagaactagacagggaaacgtgatagggatctagatctgagacttagaccaggacccaaactcggaccctgacctaaacctagaaaccaaaacttgaacctgaacaagaactggcagaccaggaccctcgaacaagactaggactgtgaccaggacccggacccagacctaaaaccgaactcggaccttgcccaagacccgaatcgagattggaactcgggccgagacacgatcgtgtacctagacttggaccaagatctgaacccaaacccggacctagacctagagctgggacccgatccaacttggatacaacttggactcgaacccagatctagacccagatcgggatcaaatctgaggacctagattttgaccgagaccttgacccatgcccaaacatggactgcacccgggacccaaactcggacctggacctaaaccc

SEQ ID NO: 405483 - DNA, 857 bp, Cannabis indica
atttttagaatttttattttttacaagttgttacagtgttgttactatattttttcaaagttgtttatgttttaggtttatcatactggaacggtttcttaaatgttgtttttaggttgtgtattggttgtactttggttactatattttacatttgccttgtacttgttgcttgaatttttttttaagttgtttcagatttgttgcttatgttttattttgtattttattttttgcaggtccatgttatgacctcagggaaggttgaaggatttgacttaccgaaaaaaaatcctcctaaggtgtctttttttttttttctaatactttttattatttcatttctgtttctgtttctgttttagttttttttgttttttcctcatattttttgtttcaattgatacaggaatgtgattacatttatgatcagaagaatctcttcattgcgaaagccttttcgactgctacattccaggttatagaaaatattaagtcttgcctttcacctgaacaacttgaaatgttttccaaaacctattttggacatttcctgaagcttcctgattttaaagttcaaccgcaagtgtttcatgggttgttgttgcgggaggttcaacaacctaatgatgctgaattgtgggttataatacgcggtgttaggattaggtttagcattgaggagtttgctttgataactggtttagattgtgaaggtgattgtagtgtgttagattttaagtaagatgttaatagtctttgtgagaaatattggccaacttcatcctctatcactaaagaatctgttagggaatgtttcaccaccaagaggtggggtgattctgatgaggatgctg

SEQ ID NO: 405484 - DNA, 860 bp, Cannabis indica
cagtatactgatttacactaatgtgataattagcgataaggcttacttatacttatctgagtgaaatgtattttctaaggcattagtaaagtaacttaagattagatgatcggctatacatcggactggactgatattaacagttaaaaagaaatcataaacttaccattatatattttccaagttaatatcacttagttgatcatagatcacttgatctcaatcttgggatggttaagctctagcttaaatgtattgcacaagttatttgaattattcgttaccatcttactgtagaaccagctcaatgcttacatcttgggaattcggtagtgcaattgagtgggagtgttaatcatagatataagcatctgtagcttctatgtttattagaagtgaaatggtagttcgttagagcttgacttaacgcgataaatgataaaatgcttattttggtaattatattagttttctaaaatatcatttacaagtagctcagtgttttaaggattaaatacacattgaagggtaaaactataattttatcactactcgatatagaccgtctatagaggatcaatgattgttgtgattgaaacaaggaataatttatagcgtatctatacttggtgtatagagtgttctatgtgaacaagagtgcaattctgaatttatggtggagtcatgagagattaataagttagaaatttacttggtaaatttcaagatcttcttattaggagcttgattacataggtccatagtccccacattgtctgagataatatcatcttatagactcaactaattgattcaagaagtcacttagaatttgaaaatagactatgtcttatttgaga

SEQ ID NO: 405485 - DNA, 1056 bp, Cannabis indica
tttttttttcagaaagtaccttgtaaatctgtgtcaaattaaggaacccttagccaattactattagtgcattttaacaattttagaaaaaaattaaatcattgattatattagtgaagcactcaaaccttgctagctataaatatatatatatatatatatatttatatatatatatataaaatattgggtgcccaccattattaagattaattggcaccatacgaagaaaatagtggctcttgaaaagaatggtcaaaaagtgaccataataatattaattatactcaattatatatatatatattaatacaaattaaattttactggttaattgatatatatatatatatatcatcatatatatatatattcaccaatcgatcgatctctaggttgtatatgctaaaattaaaaacaacctagttataacaataatgatgtttagaagataattaaattaagtgtattatatataattaatattgatcaattaataagaaatctatgtattatatataataacagggactgtaataatgttttaacttataatattggatcatacaaacacttttatattaattaatttgatcatgaaataatttaatacaagaattcatatatatatatatatatatttatactgatcttgaaaattcaaactagatctaattaattactttttcatatttatactccaccaactgagcagaataaaaaatttatgtgccccaaacaaatatacatattttactatttcaaacaaagaatatatatattattaatttattatatatatatatagtttattttgcagtagatatattttactgtgcacatagggatcactatacagtatatatatatagacaaaataagtattatttatcgaaggtagaatccaaaacttcagatcaaattgatcaccagcttagcctataaatggaaaatggttgtaccatttgatcttagaattatttatatttatatcataatcatatcattataccatcatactgtataatatagtataggtacatatattgtattttt

SEQ ID NO: 405486 - DNA, 505 bp, Cannabis indica
tttttacaattttatttcatagaaaatacgatcttttgatttattttaatgttgtacacttgttaattttcttattatcatctaaatagcataatatatttgttgacactaaaaattagttcaacaatgcatttgtattatgacataaaattttttacaccatgtttgatctagtaaagattcattgctctatcattttacacaatttcctctcagtttctacaattactctcttgttcccctatttctcgagcctagaatatttcgagaatgtatttcgacaaagttccaactaatctggtgtgagcaagaatctgtcttcccttttgaacgatgcggtctcttatttataggtaagaatgatcgctggtccccttcctttttttcgttcgatttggtccatgtggattcattctgttggtttttatggtttatattagagttataaaagcaaaagcgagatttgataaaaatagtttttatccaatatgaaccataagcccaa

SEQ ID NO: 405487 - DNA, 679 bp, Cannabis indica
agcttgtgtctatgcctggatttgccatcaaagctcgaaaacattacatcgatctttggtttcggcctctttcccttcgagcactcttttgagctcctcgcattcattagtttcagcttttgttgccctctcaacatcttcaagactcttcttcatcctctcgatttctttggtaatgtgattaatttcctgttgagcatcattccatttcttgactatgacctcacgttggcctagtgagttttggacctcgctctccaattattttatcctttctataattcgccgctgagaggcatcagagatgaaagacgcgtgaagattcacaaacaaggatgtataaaaaatgagggggaagaagaaaagagatgaaagatgtatacagactaaggcaataaacttaccaagagggtatgagacaaaccccttgtaaccataccttcccaatccccatgattgattaaatcccaattatggggaaggagagccttgagttggcgccagcaagcagccctaaactcttgggcaaactccgagccagccttccctaccttggcatacaacatttcgatggtctgtctcgaggaggcggaggcatgagttgtgttggggagaggctcgttggtacttgcgttgaccagaggaggagtttgatcctgagtctcggtcttagagacct

SEQ ID NO: 405488 - DNA, 546 bp, Cannabis indica
aggactgataatagccttgagttctgttctaatgagtttaatgaattgtgtagcaggttgggaattcagaggcatagaacagtgatcaaaacacctcagcaaaatggagttgctgagagaatgaacagaactctccttgagagagtaagatgcatgctgctgagtgctggaatggacaggtcattttggggagaagccatcaaaacagcatgttacttaatcaacagatcaccctcagtgcccaacaactttaaaactcctcaagaaatgtggacaggtaaagctcctaacctagaacatttaagagtttatggttgtactgcttttatgcatgttaagcaagacaaactccaaccaagagcattgagatgcatatttgtgggttaccctgaaggagttaaaggttataggctatggtgcctagaacctgggtataagaagtgtatgattagtagggatgtagtgttcaaggaagaagaaatggctctcaaagctgtaaacaattctaagaacaatgaaactacaccagatgagaatgtacaaatt

SEQ ID NO: 405489 - DNA, 678 bp, Cannabis indica
agatgagcaaaatggagtctcttcttcttgataaaaacaagaaaatggaacacgaaattacacaaatgaaggtatgatgtctgtttgatgcttcacatgctatatcttgtattttatcctttcaaattatatgtaaacatagatgcaccagtctaagcagactacagtgatgtactctgatatagaatttgggatgaaaattgtaaattggtgtaccattcccaagaggaatgaactcttcccatcgagcattcaagagactcatcactctccaaagatccaaggcccaattagaatatcaccatctcccctcattctttgaggctcatttttatactatcttattcatgctctttcaaagcccccttctcattctaccaatctattacaaaaaatctgttagcctaagatacatgataagcctcctatacattttggatataataaaaggacacataagctaggatagagggcttttatttttatctagttgactcttattttaaaaggttgttttgtcttatttttagtacttcctagctaacacaattttatgttatccagtgcctataaataagggggagggagttcatttctgggaggcttagaaatataagagaataggcagccctctcgaaaggtagtaattaggagtatactagcatctcgatagctaga

SEQ ID NO: 405490 - DNA, 678 bp, Cannabis indica
cctagtggtcctcttgtgtttccagcactttgcacgttgggatctgtcaccatcgggttgccctgatcagtaaggcctctacgggtttgtacaaccatcctattttcctaccaaaactttaagacaaagaacttgtgtttttgctctcaatgaaagcaccaaaatattgacctcgcttttagccaacgaaagtgagttaaataataagtgattgaataatataattaaaagagaacaaaaataataaggtaaagtgaacaccaaattttaaagaggttcgacccagtgagtgtggtaataggctactccccttgtattgtattgacttaagagaaggaacaaagtgttcttcctctttgaaagctcttaaaactgatctctgagtaattctcttagatcaatattttttctatttataggggcttaatgcaggaggacggtttcccttttgcttacaatgcataaaataggaaaattacaatgattgcataattacgatatatgaaataggaaactaaagcaggttgccatatttctttgactaaatctgtaatatcccaaaaaatatattgatattttaactagacatattttattaaatatgcgattaagtgggtattagagtaggattataatccttacttaaaactaattacgagttatattaggaaaatatga

SEQ ID NO: 405491 - DNA, 764 bp, Cannabis indica
gttagaagcagaaccagaaaaatcattataagtagtagccatcacagattaacatgtcttaatatttttattctaaaaattaaataaattagaaagagttaccaaatgatattttttggctgagtcgtagactatgtcgctctttaagacattcactacaggaaaaggcctttttaccggcgcagttcgtcaaatgcgccggtaaaagttgacgacgtaaagcaaaaactaaaatcccatttgcatttatgctttatttttgccggcgcaataatgtgccggtataactttgttttgccggcgcaacaatgaatatgcgccgataaaagtgatgaaatgaagcgccaacaggcgcgaaaagtttgcccctttcatttcatttattgtggcgcttatatacttttaccggcgcatataaaagtcccaaaaaaaaagagggaaacttcccgcgtgaatttccttagtaggtggggaaacttttacaggcgcagaattgcgccggcaaaagtattaaataaaacgtgtggactttgacgtgactagtggggatacttttactggcgcaattgtgcgccggtaaaagatgtaaatgaaacccgcgtttgacttaggtcaaatttttagaagaacttttaccggcgcatccaaatgcgccggtaaaagtgtatatatgaaccagtcgagcacgaagccccccttcttccccattttcatttttcatttctgaaaatttttttctctcaaatcctctctcaatccctctc

SEQ ID NO: 405492 - DNA, 604 bp, Cannabis indica
aaacagttcttgcattaccaaacaacattacataggattcggcacatcaagcaaaacagcttgatgagcacaaggaggaatgaccccaatccatatggcactagccttgtgaaccaaagcataattggctaattcatgagcaactcagttggcctcgcgaaatacaaatgagataccaacaaaattaacatgacacattagagatctaatctgatgcagcaagccatctatgtctctacagccgtcttcctttttttggattaaattaacggcttggagacaatcagactcaatgctaaactgctcatacctctgttgtatccccagttgaagacccctacggatcgccatcagctccagctgcaatggaggaagttcctgctgcactacggttgctgcagcatgtcgaaccaccccagccaaatctcgggcaacatagcctaaatccgagcagtgaccaccttttttaacccccgcatcgacattaattttcacttgactctcaccaggaggtgtccaccgctgaacaaaccttctctccttcgaactactgccaccccgatcccctctgaattcatctaaataactaccacaccactccacc

SEQ ID NO: 405493 - DNA, 522 bp, Cannabis indica
ttggccgggtcaatgtaacctgaacccgcgaacccgtaaacctgcgagctcgaaacccgcgaacccaaactattttaaaatattctccataaaaaattgttaaatcttatgttgttggcaagcaccaaatataggaataattacttaaggcactattttttataaaaaattacatttttacgtttaaagagtttttttttacatttttacggttttctataaaaataacatggaaacaacaagaaaactacataaaagtaacatgaaaataacatctaaataacatcaaagtaacaacaaaaaatagcatacagataacaaaaaattaacaacaaattaataagaatgcaacataaaaagaccgtattttctataaataaaatcaaaaaaatcgtaaaaatatttaaaattttgtgaaattgtatttttgtaatttttttgttgtttttgtgtatttgtgaaattatccccaacaaataatcataggctctttttttttaaaaaaaaaagggtaaataccat

SEQ ID NO: 405494 - DNA, 787 bp, Cannabis indica
tattttgtaattagtcgctgtaaacttttgtaaagtgttttgtaatcgggatcccgagtatttttgtataaatattttataagtttaattaaaaagaaaaaattttaattaatcacgatttccataaacctcgttgattagcaacgagctgcacagtatgtttaaaaatcacgtaatacgcctatggtagttagggtgttacaccttgattggttgccgaactggtatttccagtctcttgcgcaccaggcgtgattccactcaaaggagttgtcacaccttgacctacagtcgatggttgttcgggatttgtggctggtggaacccttgcattccctagattcgatagtgtaggatccgctgcttgtggatttgctggatcaaccacgcctctacgagtctgtaccaccatcgtgtttatgattagatttgaagtaaagagtggtcctgtgattctagttctcaatgaaagcaccaaaatattgacctcacttttagccaacgacagtgagtttaaattctaagcgacaagtagtatagatataataaaaaaaaagacataagagttttgtagaggttcggcccggagcagttcggtaatagcctactccccttgatttgtattgacttaagaacaaagaatgaaatgattcctcctcttggagcttttaaaataatatctctgaatatggattcttagataagtttttcgaccctttgcccagtgagaatggatcactatttatagggctataaactgtggggaagaagtttcccttctgattac

SEQ ID NO: 405495 - DNA, 504 bp, Cannabis indica
tattaccggcgaaaaaggcattctgccggtattacttttgaataattgaaaaataattaaatatttatttaattttagtattcccggcagaattttagtattaccggcgcaaaatccgcctctaatagtttgggcgggattttgaccgcccaaattttgaaaagactaataccggcggattattgccggcgggttccgccggtattagtaaggagattctgaccgttttattaataccggcggaacccctattaataccggtgggtcccgccagtaataaattttctatataatcccccccataactcagaaaatattttccatttccccactccatttcacaccaccccactccgacccttctcctcctcctcctccctaagcccaaccctcctctgccatagtccgatagtccgagtcgtcctcctccgccatagtctgctcgtttgccaccgtgaagcgccattgcaccatcattttttttgacaggtaatgtgtttttca

SEQ ID NO: 405496 - DNA, 518 bp, Cannabis indica
atataacaatatccttcaataaacataatagttgctaaagtaaatattcataaaccataaataaatattaaagtaatagttcatataactaaaataaaaatactaaaagaaatttgttgttgcgtcgtcatcatcatcatcattagcatttctcagaatctgcggttgaggagcatccgacattgtggatagtatggaggtatctgtgaacttgtcatcatctgagcagtatgttgcccatgtggtgtcggcatatgtgatgtatgttgtccatattgtcgcccttgtggtgtcggcatcatctaaaaagtctgcggcatctgtgatatttgttgcgtcggcatcacttgtggcattcgagactgtgagacttgagacgtctgaggcgactacgtcatcatctatatcattactgatgggctatttggcgacagcgattgtgacatcatctgcatgaatgtctgaaacatctaaaattgttaaaattgatgagctatttgttcagggagttgctaagg

SEQ ID NO: 405497 - DNA, 692 bp, Cannabis indica
tttaaagtacaacctcaagttaagaattaaacaagtgaggatacctcatatacacctcagactctaactcccaagtagcctcgtcttctctgtggttattccataataccttgactactcgaatctctgtgttccttaacacttttagctctctcgacaagattttgacaggttgttcttcataagttacaccttcctgaagagggatagcctcttactcaataacatgtgacggatctggagtatacttcctcatcatagacacatggaatacattatgaacatgtcccaactgtcctggtaagtttaatcgggaagcgacctccccaatcctctcgataacctcgaaaggtccaatatacctcgagactagcttacccttcactccaaatctcgttatgcctgcatatgagtaaatttcaagaagacataatcaccaacatcaaactcaacttctcgtcgatggagatcggcatagcttttatgatgactctgaacaacctcaagtctttcttggattcccttaatcttttcaatggtactagtgataatctggggtttaatagtgacatgctcatgtagttttgcccaacacaatggcgatctgcatggtctcccatataaggcctcattaggagccatacctatactggcttggtatctattgttgtatgtgaattccactagtgaca

SEQ ID NO: 405498 - DNA, 1036 bp, Cannabis indica
tctgggtcccagtccaggtgtggatctggtcacgttcccgatcgtgttccagggtcctagtcatgttctcgatcatgtttcagttttgggtccctggtctgggtctaggtcaaggtccttggccagcttcgggtcctaatccagttacagttttgggtctgtgcccaagtcttgttcctacgtcttgatccgcttctagtttcggttccaatttcaagtcacggggtacgggttcgactcgagtttgggtccgagtctgggttaagacgttatttgggtgtggagctaggttcaggtctgagtttcgatctcggttaaggtccaagggtgggtccagtttcgagttcaagtgtaggtccaggtctcggtcccgttccaagatccctgtccggttacagttcaagtttcggttttggttcccgaatgtgggtttgggtcttggtatgtgtccgagtcctggtacccaggtctggggtacgggtctgggtttggttcagggtcttggtccgagtcctggtttgggtttgagttagggtatgggttccagatccaaacactgactacgggttaggtccaagccccgggtccagatttggtcacggtctcgggtccctatctagttccacttcaggtcccgggtctgggtcgggtcgtgggtctcaatcctagttctcatgcccgtgtcctgggtccaagttccccatcaaagtccgagtcctaggtctcgatctgagtccacgacctagtcggggttcaagtcttggtccgagttcgggttcaggatccgatctttgtctgggtccagatcagggtttgagtctaggtccaggttcgggtccgagtcacgagttttgagttccgatctgggtctcggttatgaggcccatgtctaagtcctcaatccaggtccaggtcctaggtcccgatttgggtccatattcgggtttacgtcctagtcccaatttttatttcgattcagtgtctgggttcgggttatgtttcgggtttgggttttggtcgaagtcctggtccgagt

SEQ ID NO: 405499 - DNA, 556 bp, Cannabis indica
ttttggaagcaaagggcgaagcagttttggttaaaagagggtgataaaaatagttataattttcatgcggtgacgagtgactcgtaaaaaggacaaataatatttctaagttacaagatgagagtggcgcttagtttatatgggatgatgggcttcctcagttagtacaagagtatttccaggatcttttcactgtcttggatgccgagtggggtaattaacctaattgataatattcaaccttcgatttcagcttcttaaaatgacaatttgatgcgacctgttttggaagaggaagttcgtagggccttgtttcaaatgcatctggagaaggctttaggtcctgacggtagggttgtacataaacttttgcaaactgcccaaatcaaactgagataacccgacaaaaaatacaaactgaaaaattcgacgaaaatataactcgcccaatttttatattgggccggttgaaaataatacgaacccgcccaactaacacgaactaacctgaccaacccgattaagatgatttttttatatatatttataatttttt

SEQ ID NO: 405500 - DNA, 939 bp, Cannabis indica
ttgtgggttgtaaattattttgatgtaatattaaggtgttataaattattttgaagtaatgtaaaattaattttcaatttataaatttaggtttctttcaatttcaattgaagaatttagtttgatgataaaagcttagagcactcacatcagcttatgtactctatcttctaaaatagctcacctaaaacttctttttttttattattttatcttaaactttcacattacatcatacattaatttttttattttttttatacattcatttaaatatccctatatatataaagtacataataataaaatattattaaaatattgtttaaaaaataaatagtatttctctacatgtagagaaagtattataacattctttaaaatttgagctaaaataacttaatagaactagtgttgttcaaaaaaattaacaaaccgtccaaaccaaaccgaataaactgacaaaaaatataatccgaataactttacgaaaaaatcaaatcgtccaatgaatatattgggcgacttgaatattattctaacccgcccaaataacccgaataaactgaataaatcaatttacatatttttttactaaaattatttataacataatatataaattacatttaatagttaaactattttacatttaaagtttgtattttatagtgtttattttaaaatttagaatttatagttgataattttgattgtatttgaatattgaagttgaaatttaaaatttacatatgagtatatttttttattctattttttgaaaaatattttttaatactttaatgtttattcaattcatatttattttttaacattaatttaaactataactattttaattttgaaaggcatatactatacatttattttttcaaattatttatttatacaccaaaaactaacaacataaaaaaaaaa

SEQ ID NO: 405501 - DNA, 564 bp, Cannabis indica
gagagagagagagaagacttaaagttactttgttagggttttttacatatcaaaatttaaatgcattaatttttttggtgataaagatgaaggttactgcagcttttgtatttgtctagttaatgtactgccagtctttttttttcttttttttttctagttaatgtactgttagttttttttttatacaattaaaatattttttttaatatattagttgatatagtgacgcgccaagcgaatggggatacatttatgtagtcacgcatgacgcgtcactataagcaaatattattttaagaaaatatagtagaaattatgaatggtactctttagtgacatttatatttttagtgacccgtattaaaggacattaacactgaatttttagagtcattttgtgcgggtcactgaaactcatcccttatcttttagtgacctgcacttttgtgtgggtcactaaagagtgtcactaaaacttaattttgtagtggtgactaaaaaaaagtcttacttttagtcacaacaaaatttgtgactaaaagtaaaaaattgtgactaatt

SEQ ID NO: 405502 - DNA, 1233 bp, Cannabis indica
aaaaaaaaacaaagagagatgattagaattgtttgaacagctggagtcccaagctcttggttcggttcttctgggccaattggagcaggaggatctgttgtttgaacaggagaagcatcagcagcctgaccggaggttgaagcagcttggccggaggttgaagcagccgcctcgttcccaccataagccacttgggccgcacagtactcaagcatgtccttagccttgcccaagtagtcaaagttggctcggggattagcctttaagaaatcaaagaagagctcgagaccggctgtctccaaggcattgaccttctccttcaacctgtccacctcggccataagctccccctccttggcgtccttctcctccttcatccgaagaagaactgatcgcagagaagtcctctcatcctgaagattgtttacctcagtagataagatcttgatgttctcctcaaaacggtcagcagcctcgagatcctttgtcagcacggagatcttcttctcagcatcgaacagcttcttgttggctttgcccaactcctaccgaacagctccagcttctgccctggcttcctcagcttccttcttggccaagtctgcctccgccttcaaggtgtcggacagagccgcgctcttggaagcaacagacttagcccgggagtaagtgtaggccaacttcagtctgggctgcacaaggaaaaactttagcatatggagctaagtgtggaaggttaaagggaagtatcaaaaaagaacttaccctgttgaactcctttaggagtcctcccaccaacacatccagagacgagtcattgtcagcaccagccagttgctcactgacctcaggaaccagccggttcatataatgggccagcatctccttgccctttttggcttctagaagcactggcaaaggtggagttggtgcctgcaccctctcaggatcactcctgaccagttcagacccagctgttagtggtccagactccttggacttggcagacttgggggtagaggggtttgcaatagtcagctcctcggaaagatcaatgacctctctagaaggtctcttttcctttgaaaaggacccctcaccgcccttggacttcttggccggtggagaggcgctagagcttccgctcattctcttcctcagagcatcgatcatttgccgagacatgtctacacagaacaaaaatgtatggttagaaaacagccatcagaaaca

SEQ ID NO: 405503 - DNA, 635 bp, Cannabis indica
tagtattgtaattatttatatattatctctaaagttagataatttactgtcatcaaaacaagatttaaataagttgttttacacatgtctaaaatgaaacaaacatcgttaaccaaactgtttgtatcaatattattttcaacataatcaatcatttaaaaatatggaagagtttattataatatacattttaataaaaaaatagacactacttcaaaaacctcttttagaggcggtttttaagccctttcagcgtcggttctagcgaaattcgctactgacgctgatcagggcgacgctaaaggatttttaaaaaccgacgccatatatacccctatggcgtcggttcctagctaataaccgacgccataagcagcgtaggaaccgacgcaaaaaaagaactagtttttagtttttttaattttatataatttattttaattatatatttattaatttatatattattttatttaatttaaattacatatttattttttaaaaggtaaattaaatattatttaaattaattttaaaattagctaaaatacataatttcacttcataaaaataattaaatattacacaaacattaatgtaaaattagtccaaaatattaataagttaataaatct

SEQ ID NO: 405504 - DNA, 777 bp, Cannabis indica
ttcttaaaacgatcactctagattttaccttatgcaaaagaaatttgaaatgtttgaaaaatttcatgaatttctagcaatggtgaaaaaccattaaggtaagtggttaaagatcttgcgaactgataggggtggagaaaaagttagtagatatgcagttcaaagatcattaatttgatttttgaattatatccaaacttacctccccagaaattcaatttgcatattgataattagttactagtcgttgcctaaatccttctatggtaatataatttcagaatgatgcaatggttgtatacttaatgtaaatcattactagattcatggatgacctaatcgaaatcttaagaaaagctagaactgctaaccctggtttgcatgtttgttagctattctaagtgattaggggtggatcatcccatagtcattagataagaaagtgtttgtttaaacaaatactacttttctaagaaaatgactaagtctgaaaataaagactcgcatatccctattgtggttgttttctagtcggggatgaaggcaaggtgattctccattaccttgttcgaacctcataaagttcatgtgtttattgtgtatgttcgatattgttttgccattatttatacttgttgtcaatcattgcatgattctaattggtttccattgttaatccttgtgtttgtatgttcttgctggagtgttgttttcacaaaaattggcatcagagctcaggtacttggatcaagaatagaatcaagaaagtgactcatg

SEQ ID NO: 405505 - DNA, 795 bp, Cannabis indica
aaactctaaatcctaaaccttagaccctaaattctaaaatctttacacttatccctaaaccctaagccctaagccctaagccctaaatactaaactctaaaccctaaacccaaacctgggcacgggcccagacccatacccaaaccgagattggaacccaggaccaagacccagacccagattcagacccaaacctagacccaaactctagacctaaacccggaccaaaacccagatcaaaacctggttcgttacctagaccttgactgggccccagtttgggaccccgacttggacccaaataggaacttggactcattctggacccagacccaaactaacacctgaacccgtactgggacctaaactcgaacccaaacttgagattcaaacccaaacctaaacttggacctagaccaggacctaagatctagacctagatgggggacttgggccccaaacccgaacatggacacaaattttgacaaaggatccggatcattattgaggacttggactagaaactaggcaccggaactgggatgaagacccaaaactcgaccccaaacttgagagacgagacccaaccctaaacccagaaacaaggacttgaccatcgggacacaacctcgaactctggcgcaatcctaaacttaggacccgtcccaagacctgggacccaaactagaacaaggccaggacccgaactaagactcggaccaaaaccatgtttggttttatgccctaaataaaactccatttcaatgtaatctattttattcaacatatataaag

SEQ ID NO: 405506 - DNA, 658 bp, Cannabis indica
gcgatgagctatcctggttcgaggaggtttcagcgccgatggcggacgttggcgtcgtaaattcatgagtgattttaatcattttgtcaaaaaaaaaatatataatatatttataagtaaattttttatatatatattattgagaaatttacatggcatcacattaattttatattaattataaagatgtggttcaaaattttattactccaattactgttatatcgttgaattattttgtaaacattataattaattgagacattaatcaattttaatcactttgtgttataagtttattttcttttttttttaaaaaaaaaaaaatgctttctctctctgttatagctagtagccaattttttgtttgtgtgtgtgaataaaggtggcagcaattattgtttttttttcaaaagttttaaaaaaaaatttagttacattatttattattttggctcaaaaattataccattataatttatttttttatgatgatcattttgatatgtggaaagtatatatttttttcctgctacaaaaacaaatgactcgaaagaataacttttaagtttcttttctatgtatttagttaacaaaaataatcaaactttcaacttaaataaaatttaatatatcaaccaattttataagttactaa

SEQ ID NO: 405507 - DNA, 754 bp, Cannabis indica
gtttacacgtcacaattatcatgtttaaagagggtgcaaagtcaaatcaaataacatgtaatatacattaaaaaatattaaagtttttctatgttaaataaagaatatttaaattttttcacttgctatttattactttccaagggaccctaatccagataattaaagaaatccttaataattaaattctaagaactaacatatagtttagtttttagtttttatgtgttatttttttatgctcctttttgttaatactcatatgtcaaattaaaaaccaattaaacaaaaacgatccaatctaatataatacttggattggattaaattttgaagcctaacaagattggattggaagatgtttctctaaatctaactatatatatacattggattaaattggaaaaaaaatgttaaattagattggatgcctaaagagctgtgaggagtatattgcagctctttctttttctctgcttgaagaagcagtgactttagattatctggagggtttggaggtaaaatgcttttctcaagcgagatggacaattttcgtgcatattggagaacattgtctcacatggatcaaatgtaaaagtattgagccatatataagaatatgagctactccactcattgccaattggttatgagatggaatcccatgattctcaacatggtatcgagccatatccctagcgggctttcgatccacacatatccagatggttagccagccgcacgagatccagat

SEQ ID NO: 405508 - DNA, 506 bp, Cannabis indica
tttcttttaaatttataaaattttcaaaacacacctaacaaaaataaaaactaaaaatataaaaagaaaatataaaattttgtaaagataaaaataaaaaatataacttttataaggacaattaataaacaaaaatgtaaatcttataaggaaaaacatgtaacaacataaataaaaaaatattatttgtatggagtcaaaaatagttaaaatttacaaaaaattatattatcaaaagttgaggtgatagttggttttcaatgatattagtttttgcttttaaaaaataataataataagactaattaggatttttgttccttgaattttgacatgtattaaattatgccccctaaacttttaaggtcgttaaaaatgcccctgaactattgagattattggatttaaggacaattttactatttcagtgattgtttatgtattaaatcatgctccccggacttttatatatactaaattatacccatcgaactttgacatgtact

SEQ ID NO: 405509 - DNA, 1326 bp, Cannabis indica
aaacactgacaaatagtttcttagatatacacaataatatttaatatttttagttacaattaagttgtatgttagttgaataataattttgctactgcaatatcatagtattagaaaaatagtgctcagaattgtcaaataagagacatgaacagataaaatacgattgttgtaatatttgtttgtattaaatatgtggaattattagttgttttgtggttttatgttagttgacttgcaacagatataactgttgcattacagcttcatcacagttgccttgaaagttgacttcttctttcccttttggtcgctgaagttgaaattttttcaggcaaagacacattcgacttcttcactggacgacgaccacctttagccacggtggagcgaaatcatagtcaatattacaaaaaaaattcttgccagccaaataaacaaatatacaatccaaataaaaaattaaacaaatacctcttacacatacattcaacccacgatccatgcttcttgagattgaaaccatcgtctaatgcaacctttggtcaatcactcagcaaccttcgtctgattgtgtgtgttattgtctataccttatggatgtatttttgtaaataaaatgtcaatctatatttttcatgtaataattcctttaaattaaaaaaatatccaatctataaaaggatatttattatataaatttatacacttatatatcatatttttttaatggtattaaatactatatattacaaatttagtttctagcggtcactacaaatttattaaaatgaatttgctttgcactattaaaaaagaagttttaaaaagcggttaagtttctaaaaaataaaaaaaaaaaaaaaaaggagacacgctgtaggattgtttatcaattttaagttaaaaattgacatttagtgttggttatttcatatgaccaattaacgccataggagacgtgtcggttattaggaataatcgatgccatatatgtgaacgcaatgactgacatgtgtcacttatggcatcaattatttcttaataaccgacggcatatggccaaatttatataaccctaagccagcttcgtcttcttcatttcctgaccttcaaactagagccaccgagagaaactctcgccaaccaccacacaaccctcgccatttcatcatttctccactatttttacttatttgtttaaatcttttatttttcatacccaaaaatatattcctggtgtttgatcgtccttttttttttagttttttagtgtaaatcgaatagtagtagtggaatatcactagttgatcttaggtctttaga

SEQ ID NO: 405510 - DNA, 584 bp, Cannabis indica
agaggagtattcatgatgagggaatacttaaccaactcaacgctctcaccaacagaatgaacatcgggattgacgacccgaattacttggcgccacctcctcggtgttatccgtatgatcaaccgccgccaccgaaccctttttgaaagggcctcaggtaagcctctcacctttgcatttaattgtacacattggggacaatgtgatatttagtttgggggagagatttaaatttttaaatttctgcatttttaaagacattattaatttctgctttaattttttctgtttttagttaggaatgggcaataagctaaaagataattgtgttttgctgtttattgtaatgtgctctgaaattgcaaaataactgtgtgcttaattctgctaactctttggattagtttggaggcttgtaaaacctgtgtatgaatgcaatttgatgatctgtaaaatatgttataattgttttactatggtttgtggtaagattgattggatagcttagaacttgcatgtcttattcttttgaggcgaaatccttgacaacattcaataggaatatgatttaggcatttgttgga

SEQ ID NO: 405511 - DNA, 753 bp, Cannabis indica
tttttttttggaaatgtaagtcttattctttactatttatttttctaacacatcacaataatataatacttaataggatgtttactaataagcaatggtaattaatggaaagggaatcattcccttatatttgtttatttaatttattaaattttaaaaaaatataacttaattaaataagtgagaaaaggaagagataactttcccaccaaatttctaaggagtgtcattaaaggtaatagattttatttatttttattttattttttaatatgaaatttataatgacaattttattctttaaaatctcttaaaaaataattacgatatactatagtttaactcaaaagggtaattagtcaatttaagcacagagtaaacaagataaatcactattattccatttccaataagttttagtaaataacatattacaaatattaattccgattatttttcatctattccgttacatttctctattactttattctaattctgaatactgtacagtaaacgtgtcattattgtaatatatggttaatggtatctttaatttattcaattaatatgacattgtaaaacctttttttttcctgaaaaaatacataattattatattttcacaatacaatacgatattttatattaggaaaattatgatttttttttccttgacctttgactatgtatcaaatcatgtcccgtgaacttttaaggtcgttaaaaacttctcctaaactattgagattg

SEQ ID NO: 405512 - DNA, 815 bp, Cannabis indica
tgaatgaataaaaacaaaaaaatgaaaagaaagaaaaaccccagaaaccacctcaagagaatcatcttcattttttccagcaaccaaaaatcgacctcttcacagagcgatgtggacaaaaaatcaaaaagagggaacactaaaactagacggatcttacgtaaagaaaagaaaaaaaaaaatcaatacaattgcagaaaaggatttatatgtgtgtatacgaaatacaataagtaggtactcactggtgtggttccacttgacagaattgacttggcaaccgggagatggagtatagcttaaggtacaaggatcgccaggcttaccagacacatcgaaaagtttgacagtgtcaccaccgctcgcggccagtagtgccagagatggatctgatgaattcatggtggctcagtttgtgtgtgaagtttgaaaaatggaaatggcaccacattcaaataaaaatccgggaaaatctgatagaggaaagtaaaagggaggaacaaaattgagaaagttgagtttttaagaatttgttgaaataaaatagttgttgtgattttcgaaaaccctatcgaaaagccgaaccaaaatttaaatgttcatacgctcgctagcaatggcccatcagcccacgcctttgcttgcattctactttataatcttaaacttttttttttttttggctaattaaaattttcgtccctctaactttgacatgtacaaaatcatatttcttgaacttttaaagtcgttaaaatgctgaactattgtgactgttggatttaaggaatttgtctaatttatttaattttact

SEQ ID NO: 405513 - DNA, 773 bp, Cannabis indica
acgtataatatatgtgttagggttttcgatgtactatacttataattagggctcacttggtacgccgtatcatattgtattgtattgtattgtgttggattgtgttgtattgtattaatatttttcaatacaatagaatatttggtattgacttgtattaattgatcgtgtaaagttataatatattttcaatacactcgaccccaacaccaactatgagtcggggtcccgagtcctaggtccgggttcgggttggggtcctaggtcggggtcggggtccgagttcgggtatgggtcccgaatcccggatcccgggtttgggttcgggtcagagtctgggttgtaggtctagggtttgggtccgggtccgggtctgggtcttgagtcccgagttcgggtcccaggtccaggtcccgggtccaggtctgggtttgggtttcaagttcgaatccgggttcggatccgagtcccgggtccgggtccaggtcctgggtccgggtttgggtcccaagtctgagttcaggtcgaagattggtgttgacctgaaatcctttgtaaatattataatacaagctaattatacggaccatttgttatgtattaaataatacaacatacattgtattaaaaaattttagtcgtaataattagggtaaataccattttggaccctgtgttttgcaaaagttaccaattggaccctgtgttttgttaaatgacaaaatggaccctgtattttctaaaatagtacaaataggaccctgaattgattt

SEQ ID NO: 405514 - DNA, 532 bp, Cannabis indica
cattgttcttaatattctgggtagtatgtttatcttagcagagaagaagaagaagaagaagaagggcgtgggaatgggatagggttattagggtttttttttttaatttttatttttaaaaattgttttttaaatttaaatttgttaattttaaagaaaatgtattttttttatttttatctttgaaattaattatttttttattttttaattatttatttacgttggacccaataaaattgtgccgcgtgtacgttatgtacacgtggacattccactatggtagttaacagctaaaaatggatggaaagggccaagtggtaacagaacactagtttaggaggttttaccaccaaaattttagaattggggtaagtggcaaaaatctgacctggttatgccgcaaattactctattatatactatatcatattttttatataataatatattttgtattatataataggaaaattttatttatacccaggggcggacccacattgtagcgaggggggggcagtcgcccccc

SEQ ID NO: 405515 - DNA, 1073 bp, Cannabis indica
ccaaatctacagtagagggcccaaaggggctaaagaaacgagggtagtttcggcattctaggaagcaagatgacactctttgctaaaaccctagaatatgacctagggttttagcaaataacataaaataaaaacaaaataatttcccctttatgtgttgttatttgtttatttgttttgttatgaaactggttctttttatatttatgcctcagtattttttagaattgatactcactttttttttttaaaaaaattataaccggttttatgaaatattatatgttatgaagtattttattgtggaattaattttcttttatattatgtttcagtattttaggaactgatttcctctttaatttttaattgtaatcggtttgagttattgcatgttacttgtttgtattcattatgttatataaccggttctattttagttataactggcttgggttctttcgtgttatttgtttttattcaatataaccctgttatagaaccggttctattttaattataactgatttgagttattttgtgttatttgtttttattcattatgttaaagaactggttatatttcaattataaccggttttatgaggtattatgtgttatgaagtattttgttgtagaactagttttatctttaatttatatttcagtgttttaggaacttatttctctttgttttttaattgtagtcggtttaaattattgtgtgttacttgtttgtattcattatgttatataaccggttctattttagttataatcggttttgagttatttcgtgttattgatttttattcattataacactgttatagaaccgattctattttaattataactggtttaaattattttgtgttatttgtttttattcattatgttactgaaccggttatattttaattataaccggtttgagttattttgtgttatttatttttattcattatgttatagaaccgagttctatttttattatatctgagacatttgatccccactttttttaaaaaaaaaaataaataatcgattttatgaggtattatgtgttataa

SEQ ID NO: 405516 - DNA, 731 bp, Cannabis indica
agagagagagagactcaccactacagtctgatggatagatggagaaaggaaatgagaagagagaggcagcgttgagcgaatccatagggaagacagtagcttagagttctaggggtttttggggtctagaagcaccatggtggtgtcaggttcattattagtattgatttttgttttgttttttatatcaataataaatgatgaagataatgatgtttatccaacaatgataattagtttaatttttgtaatttaacaaataaattattaatttttattattaatacttttctctatttgtttttagagtcttacgtagttgatcttaatgattagaatatatattgttttattattactttttttattattaatataatttattattagtaatatgagtaattgatatttgaactttaattcaactcaactcaaagctgttaacccaaaaactttccccagtgacaagaaagataacatctcagagttgagtagtctcgagtcatagcagtcgacattagagggtttcatagccctatgcccaagttaactctaggaactctaaaatggatgttttgatcccgccaagttattttcaactcactatctttcagtaatttgtatcatgaatacatgaagcatccaagttcatgtcttaggagctcaaaatacacaaaacaacacctcaaaaatcaacctaggcacctagggtttcacccagcgcctaagtt

SEQ ID NO: 405517 - DNA, 711 bp, Cannabis indica
ctcacaaaggtcaaattgatttgaatggacccaatcatgtttctagatttacacagatgaaagaaatacaaaatttacctattataaattatttataggatctattaacaattggactatgattaaaattaggtcattagatctgtcaccaagttaatcacaacaatttagatcaaataaattataggtttgttaaaaaaatttaaataaacaattagataaataaaataatttccatgcaacaaagttgtgaaataagatattcataatataattaaattattattcaactaacaaactattttgaaaatttaggttgttaaaaacaacctataaaatatcttttacaaatttaaaattcagaactgacactaatttaaaatatgtaggtttatttacattattttatcaaatttaattaaatgtttaataagataaatgatttgaaaataatcaaataaatattttcagtattattttctaatctcataatttaataaaattaaaataacaaaataaactaattttaaaatagatatggttaggcaattattattttaagaataaaatgagaaacaaataataattatccaaattatatttaaaaatatcttaaatttagcatgttatcccaaattttgcactctgacgtggcatcacgggaatggtgacacgtggagtccacttggaacatctgcttgggaagatagg

SEQ ID NO: 405518 - DNA, 614 bp, Cannabis indica
agaattttatttttcaaatataaatctaattatcagattaaaattaatttttattaatttaaattgattttagatattaataggttttgagtttaaaaaattgatttgtcaacaaacttgatattttggttattttaaactttgattattttttttattttatttattaattttaattataagatgattagttaattaataaaatatgaaatcacattaaaatatcaataaaatcaatatatttttatatatatatatatatataaaaaggaaaaggagaagacgatgacatgacattaaaataattataaaattatatcttctctccataattctcaattttaatattttattaaagcataaatctataaatcttactactatatataaaaaaaaatcataaatctacaaattatattttactattattttaataattttttttataaaaatataaaatatcttaaaaaaaattagaaaataaaaaataattccaaacaaaaaaatattaaaactgaaatcaaatataattactcgtctgtcaatcaatttaaaaaatattccaaaaaataattgttatttatatacatacataaatttaaaaaaactataat

SEQ ID NO: 405519 - DNA, 516 bp, Cannabis indica
gaatgaattgtattatgtctaatacatacttaattggagatatttgacactggatctgcaagttatttatctaaggctactactactaatagccttaaattgtatcaactatcaataatatataattaacttcgaagtataattatatattgtacattaaagtataattataaataatgactaacttatttttgtatgtcaaatttaatttaacacaaaattggagattaaggcaaaattattttagagagtagtactatcttaaataagatatgcataatccactaatatgtagtttatagcctcgtttaatgttaattataaatatgattatttatatgattatattcaataccctaatgcatcaccaattttcaagaacaaaatattactcaattcattagatttggagtttgcactgttcactttgaagttttatgtatattcactcattggaaaacatgtactgtacttagggttttaaattttaatttgctaatgagattggaaaacagg

SEQ ID NO: 405520 - DNA, 507 bp, Cannabis indica
tctctcgtctcgcttcttctctctcacctccacccacccactgtcgccctttctctctctcatctcgattcgtctcttactctctctctctctctctcacgtctccatcaacgaccacctcttcttcctccaccagccaccatcgatggccttcttcccaaggtatatatatttatttattaatagtatttatatatatatttatattcatattatatgtatatatacgatatattgactggcttttaagccaaccgacgcagagtcgtaataaatgagatttaaaccaaaattgtaacaataaatgtaaataatgacaccgaaaattgcaaaaaatataaagaaggataccagaatttaaagaggctcggccccagatgtcggcaatagcctactccccctgtgttttattaatcaaggttgtaaaagtcaaaaacaggctcttaattgcaaagaatgaaaagagtgtttttttctctaagttctccaaatcgcggatccccctcc

SEQ ID NO: 405521 - DNA, 549 bp, Cannabis indica
taacaaaccccttcgactacggtagtattgacgaagagttgtgagagaggagaattagatcaggtgaggttaaggcgagaaagaaaaacttcgaagaagagttgggtcttggggcttagagtgaggatgaagggttgtgtttgtaagatcggaaagtcgattttggggtttgtttatttgaaggtggccggaggtgacttgcaggagttgtgcgagaaggagaatagaagagagagggactgcgggtggaaattagggttacatggtgtaaaaaaaaaagaataagaaggaaaaaaaaaaaaaaaaaaactaatttgaactatttttataatttttaaattattttttaaaatatttaatgaattaaaagtatgtggaacactaaaaatttgtcacatgtccacaatgacacttaacatagtcttttagatagaaggggtaaatagctaacaaaagtgaggtttggagagttttaccactaaaaaattgatttatgtggttaaatgtcactaatcatagaatttaagtagttttaccaccaatatccca

SEQ ID NO: 405522 - DNA, 547 bp, Cannabis indica
gcaatttacttaatatttaacatctacttacttacagagttttaataatataatttaagtattattgccgctaaaaaattaaacttaggtatttatttacaactggagttaaatttaagtatttataccacaaattactcttataataattgaaatttttgttgaaatttatagatttatagatattaataatattatattaaaaacaatacatgcaacacaagattcatgcattgataataacagatctaaaacacaatttatataattaattgtgtccaaacaattaatatgcatatttctaattaagtatattttaagatgagaattaatggatattctttatgttcaaacatttgaaaatggttgggattattatttatatatattttttaagaatgaaataaatataagtcgtgttctaaaattttataatatataacaaatgaaataattgttgaataaaagaattttagaaagacaaattattgattgttaatggtttaaaaaaatgaaactatttttaataaataagaaatatcattgt

SEQ ID NO: 405523 - DNA, 666 bp, Cannabis indica
attttgatccacgtgatagttttagaatacataatgtgtgatttgctgatgaaaaggatttgattttgaccgtcgttgtgattcttggctctttgaatcaggaagaacacgaagaacatgtttgagtttttgaaaaacacatattttgattcaacatcaaccctggctgaccatagggattttttatgggagctaaccaagagttgttgtctacgtgtaaaagtgcacaagaaaccctccagaacaccttcgagcctgttagacccttattgaggacaggttggccagccatggtacaatcctatggctggtccgccatgccaactctagtgagagagctagtctgtcacttgatgcctgtctgagtgtcggggtcttcgtttgcttaggtgctgacttggccttcttattggtgagttgtacttccacgtgtcactgattttttccatgtaagcatgccacataaggagaataaaaatcgggataacatttgcccttaagtccctatgcggacgtctgtacggatagggactttaccagctgtgttggtgcggtcgagactgttgtagtctttactaaataaaagttaatacatttttagccttttaaaacactttgtcttgactgtctaatctcattgctgtagaaaaataactgctttagttg

SEQ ID NO: 405524 - DNA, 741 bp, Cannabis indica
cattattacataatatatatacagttttaataatatatttttttttgccgtcgaatcttcaattaaaatcattcagcgtattagtttgaataatttggtttctttactcattagttttgccttttgtgtaattcttaataatatttaactgctatgcaacaacataaaagatatatgctaatactttaattaacaatcaaagccaaatgcaaatttaactcatgtggtccttttgactttgaagtctttgttttatgaaagaatagaactgtacaagataacataatacaaagtccaattttgattaaaattaataatgtagtgcaagtaatgaaagttttatatcagaatatggacaataagaacaatgactaatacaaaacttatcagtaattctttttctctgtaagcttattagcaccatcctcacccattggtaggccaagaatagtatagtgatctatatcaacatccatatccattctaatgctgaaaattagaaaatatgcatgaaattagaataaacaatgttcaatcaaaacataaacaaaaaaaattaagataaaagggtccttattattatcatattaagatgaattaagtgatgatttttcttcttctgacattgatgatattgtattcatctcctctgtttaaaattatcccacctaagatgattaccaaaattataaacataattaatatgttattatacaaaattaaatatatatataataataa

SEQ ID NO: 405525 - DNA, 782 bp, Cannabis indica
ttatctattgttataattgaataattaaagatcatccatagatgatttacattgaatatgaacaaatttactgttttacccatcaatgtatgttatccttaaaacacttagtttcctataaatgatatttcagtaaactaatataaaaactgaaataagagctcttccatttatctctattaagccaagctcaaaggaaaccatcatttcacttctatgtcattatagaagttatagatttcgtacctatgattagcgcgctcattcaattgtactatcatgttcccaagatataagtattaggctgatccatttggtcaactttaacgaacaagtcaaagaacacaaataatacaattaagctaaaacctaaccatctcaagattaagttcttttgatctaagatcaactacgtgatatatattgacttagaaagatataacgataaatttatgatatattttccaagttcagtatcggtcaagtctgatgtatactctatacatctgatactagcatattttaccaatgtcctggaaggacataccacttatccaagtgtatttaaactttatcgtttattatcacgtcagtataaatctagtgcactgataaatcatgggacttaaactttgaagtatataatcacaattactttttactatggtgacatcactgtaattgtgaataataatatgttctgaatttatcaaaaattatatattaaactataaacatgaaaataacatgtaaacttaaatgacttctaatcttctattgat

SEQ ID NO: 405526 - DNA, 562 bp, Cannabis indica
tctctctctctctctcggctagtgtggtttacttgggctgggaattcttcttgatttttcaagcattattcatcgcatctaagtgttgttcaagtgcttggtatgatttgtatagctttctttaagtttcttggaattttggaagaaaatgagaatttgcatgcttagttttgattcatagttgctgctgtgtttttgatgttgtttacagaagtttaatcttgattgattgagtagaatagagctagttgatgcatgttagttgctttgattcaagtttgtgaatttttttactcaaaactatagttttcaaagaaaaatgatgaatcttgttgttgtggttgttgttgctatgaaaatgttgtttctggtgttatattatgttgaaataggttgagatatgcatgatttagtggctgtttggagggttgatcaagttttgagttttgaactcaatcttgaacctccaatggtgaaatagtttctgtggttgaagcttagttcttttgctttggatttgtttaggggcacttagacaggtctggaaggtttgatatgcttt

SEQ ID NO: 405527 - DNA, 731 bp, Cannabis indica
tataccaaaaagcaaaaataataaaaaatttaatcaacacgtgtacagatagaaattttagtaattcacgttaattaattattacatattataaatattaattttttttttgtaacactataaatataatttaaattataaaaaaatctattttattttattttatttcttttttttctcctgaacaaacaaacactaatctattcagagtattaatttacataatttataagaatataaaaattcacataaacttgttactaatttattgagtattaatcccgatgttctttttggttatacaaaatttcattgataaaaaagcaacaattttattttatttttgagttctaacttagtataatgataaaagagatagtgaatcacatgtataatgattatttaggcccttaaacacttgtttttagccaataatagtctgattcataaatttaaaaaaaaaaaaaagttactatcaaagcacaaggtttgcaatattcatcatcaattactagcaatattagcttagaaattcattacctttaaacttttgtaccaatcttctttttcagttcaaacatatttttctctaattaaacaaattcaatcataaatttgataatgaatccataggattggatttaatatgaaatttatagaggtcttaatatttatataaattacatctttttcaacaaaaaattaataataaaatttaaaattttaaaaca

SEQ ID NO: 405528 - DNA, 442 bp, Cannabis indica
gagagagagagagaagactcaagtttgactgaaaggctaatttgcatcaactgtcagttttgagtctatcactatctatttataggaatccttctaggtttatgtttacaattttgccattttactcaattatttatcatattctttcataaatgtcatattttgcaattcaaccattttaaatgtcaaaattatttatttaataatttaaattaattatcaaataaaatatccatttaattaatttattaataagacttaagaaaatctcttaatcaacaaataaaccctgaaacctcttttcttcacaattaagccctagcttagtgaaaattcataaataagacatagtctaattttagaattataattgattaattaaaattaattaaccaagtcttacaagaaatattgtctcaactagtgtgggaaccattagcct

SEQ ID NO: 405529 - DNA, 753 bp, Cannabis indica
ttgggcgggagatggcctaagtggaccctacaaagttaaaaactcaaattttttggttaaaaaaacagaaaaacttaaattcattgccacgcgcccccatagtgaaaaaaaaaacaaaaacagattaaaaatattgtcagaaaagaagaagaagaaatatgaatgggtgtggtgagctggttgatctcaattttcttaactagattgaccataattggatggtcaatattttttattaaatggaatgtaatatattttttaatgggaaaaaatgtgatcgatgtaataataaatgtgtaatatggaaattggaattatcttaactataataagtggggtgggtggatgacacgtggcagggattgagagtgggttgcctttgagcatgtgtctgactctgagtgagatcatgatcatgattcggcactcttcaacggctggcgctgctatgtgggacccacatattgtgtatgttatgaagaaaagaaggaaaataaaatttaaagaaaaaaactctgataaaattcgaaattcgaatttcaaatcgagtaccgttgaaactgcttttgcggttttaagatggggtatggttgaagataagggaaggatttttttgtcctttcggtcgggcttatattaatgggtttttgtctctttctatggcccattggggttggtcctatacgaaattggttttacgggcctagtgtttgggcttggctgcagacaggctgaatccgaaagagtaagggc

SEQ ID NO: 405530 - DNA, 671 bp, Cannabis indica
ttgggctgcgatctcagcttcattatcaacaaccttctgccttaagagcagcatctttgtgtaactgcctttgtcgtaggcgtcatattcgtcaaaattttcctcgtacacgtcatcggtggcctcctctcgttcctcagaatccacgttgactctagaggccacttcctcgtcctccggattttgagcatcttgaggaggacggggctgacgtgtgttgcgagtttccaccattgttgcttcagtttataaggttgttgtctgtttgaagacacttcattcagctctcaatgaaagcaccaaaatgttgaccaaggtttttggcaactaattaaataatatatacaagaaagttgtagaaagtttgatgcatgagatttttacgtggttggggcgttaatgagccttaatccacgagtctttgttattaatgagagtatttattactatgaatgttcttggtgaatatttctcctatttttttctctttgattcctatgaacccagaatcctcgacccctttctcaatatgtttgtggggtatttatagtgtttttctgggaggatccctaaaactaaatcacgtgtctttctgtgcagttttaataggggcacatattcctagcagatacaaaataggaaatacatgacctataccgtaggtatcttag

SEQ ID NO: 405531 - DNA, 547 bp, Cannabis indica
aaacaaatcaacgaagaaataaatgtactttactaacctcttgtagcgcagaaacctccccgacaacggcgccaaaaattgatgtcgcccaattagttacactgcggtcgcggtagtaaacgggctatgtcgtatccacagggaggtaaattaccactaaagattagtttagtaaatagaaaatgatagaaatgtgaatgaattaaaaataataaaatggtgagtgaaaggggatgatcagataaagagcttagtaaggtagagatgtagttatgcaaatcctattctaataccgatattaattcagaacacagttgcaattctacaccattaataacaaccggaagatatatatgttatgagcacaaattaaataatcttgaataaattgaatctcacctctaacttaatagcatatcatattatatatcataaatcgacaaaataccactattggcagaatgcagtaaacgacataaaatataataaatataccaaaatattaatagcctaacttacataagaaaagcatgactgaacttatata

SEQ ID NO: 405532 - DNA, 786 bp, Cannabis indica
gaaaaaaaattagagaaataagtttaatgagagaattaagaaaataagaaaaaaaaatagtttggagcaatttaagagcccctatgccttctaacaattttaatgttaccgacacaacatctaataatatttatatataatataaagataatgaagatgttataatataaagataaataattgaataaatttttgattatgaataaaagttaatgataaatacatgagagtattatcttatcagacataaattaaattaaattaaagtgaggggacgtaattttcttttataagacagggcaaaagtaaatttgaaaaaaaaaatacttcttgatgaatttgaacttgatctctatctcataggtaatatagtttaaccattacaccaaagttaatattatgtctataaatatcatcttttactataaataaataccgtaactaactaaattgcatatacattttctttttcatacggatgactgttaactatttattcttctagccttttcactgaatttttaagtaaaaataaaattttatatagttatttgaaagtgttctgtactcgcttatggaatggaattttactccattggatggaatggaagatagatttaaaaaataatgagaagctacaaaaggaattttgcaacacaactatggttaaataaggaataaaatattaattatttaaagagatatatattgaatattaaggcatgtgatattaattaattttatttttaatttttagtaaaaaaaaaaaagctaatgttatttgat

SEQ ID NO: 405533 - DNA, 769 bp, Cannabis indica
agtgttatatagaaatagataatttgaactttcttctttcttacggaaaatcattcaaccagatcttaacttatttatcaaaataaacacaaaatcaacaatattcatagttcaaataaaaccctataaaaattgagaaaaaaaattacctcttggtgactgaaatcggctccatgcagcttgaaatgaatagtggtataaaattaacccctatcctaaaaggatatctaattttgcatattcgattctcgttgtatactgttattcacaaatattgtttgtatctatatagtagtgttcctaatagtgagttcttatcatacacgattccatatgtaggtaaagaattgatttttatgaattaaagcacagaaaaccaaaattccatggatgaattcgaagagaaaatagagaaagagaataaaggtgataggataggaataccttctgttgcccctgattttgtccaatatacgtggaccaaccggacagggacacgtggatcaaaacgtcttaatgcttgaattatttgctaagtctttgtgatataaggtagcatccgagagaagcctcccggagaaggcatgctgagccccatacgctcccagatgcccaagtaatactaaggcatctccgcgaggtgtcagacttcccctgagcagtcaattcgcatttaatgccgcatgggaggaagcgtgttaggactgctacacgcaataaagtctgacggtacaacacccaatctacagctgcgaagtaatgatcattt

SEQ ID NO: 405534 - DNA, 362 bp, Cannabis indica
attgaattgaaagattgataatacaattgaactacataattttgtggaatcgatttggtgcatatggaaatcaatgttgaaaggcagctcaagaagggtggtttgacttcaaagtcaagactgagtccacacaatccagctacaacaccttggagttcgaactatccaaagaaagaagaccaagctagcttgatcctatacatccaaaccgcccaccactaaccacacccctcaggaaaataacccctacttcatcatgttctagtgagagaaagtgttttaaatggtaggggtcgaggacacatagctagctaatgtccaaacaagggagttataggtgatttgagaaaatggcggtagta

SEQ ID NO: 405535 - DNA, 568 bp, Cannabis indica
aaaacttttttaatattttacaattattatacatatgaccttaataaaaaaaaaagcagtaaaaatactttatcttatgactatgttgcagtcgtacccttttttggtcattaagtgtcaactcaaaaatacgtggcgatatattattagaccatgtattaaataagatatcgccgtatgtttctaagctggcacttaatgagcttaattgacacttaacaactaaaaaagggtacgactgcaacaatatcgtaagataaggtacttttgctcgactgcaacaatatcgtatgttagagatattattacaatggaagataaaccaagatatatacaactcaattgtaaaaataatacaaggattaaaataagagattgattaaatatatgttacaatacatatatatacactatatatattacatatatatatgaaaggtagaagagaatattacaacacatgtaatataatatatgtatatatataacaagagaataatatatataaacactcactcacaaccttgagtgtagattagtggggatcaccatgacttgaacaaggtat

SEQ ID NO: 405536 - DNA, 654 bp, Cannabis indica
aggtcgcagattaaaacatacatgttaaaatcgcataatgctgcacaaatgtcgcacataaatcgcataacatcataatcgcacactaatcacataactatcacaaatgtctcatacaactataatatgctggagtaacatgtcacacaataatcgcacacaaatcgcataaggtcgcagatttaaacatacatgacaaaatcgcataatggtgcacaaatgtcgcggcagtcggcggcaacggagagagcaaagagaaagagagacaaagagaaagagagagagagagagagagagagagagagagagagagagagagagagagagagatcaaacgagagggaaagagagagaaaggaggggctgatttttttgggtttgaggagagggcattttggggttaccattaaaagattggcatagttaccaaattcttaggatgatggtataatttaacaccattacacatttttaagcataacatgtcaaatttcccttttcaaaataccacatttcttttaaaataagggcccaaatatttatttttcctatgatcactaaaattcaggccaatcttacttattgtctatcctatagagatgcaaatgataaaatttacatacaaattgtagaaactaaaaagacaaagaccta

SEQ ID NO: 405537 - DNA, 1183 bp, Cannabis indica
gcacacgagtgcagcgcagtcacaggttgtgattgtcggctgttggtgggaattttcaggacccatcatttcaatttctttgacaaccggccttgatatgaaagctgatatctattattagtacttattatctatatctatatctctatttaattattatttattatttgtgatttgattacattaagtatatggtcaagtcctaaatgccaaaccaaaaatctatgagagaagagtatataattggaatgtaaaaggaagagaaaaaaaaatataaataaggtacttaaacatccttaaataaataaaaatgttattgaaacttagttaagttatttttgataattagatcaaaaaataaatcattttaaataattttcttttttttcatctaatgaattggtcgcttcaaattaatcagaaataataaaatttaaatctaaaattcaaattaactaccacgacacaaatttaatttgaattttatgttttttaaagtatatattaaattatatcaagttagttcagatttattagacgggttgattttatattaagtgaattattttttttttcgatttgtattgtaatttttttttttttaaaaaaaattagtttagacagattatttagattcggattgagtggtttataaaatttacgtctaatatagagtagtgatagtaatagtatagtatagtagggatatttattatttattaatattgattggtgctgtctttatattgtttggaatgttcattattaggttttgtattcatacacaacgttttcccgaatgtttgtcaattttttgttcttaggcgttaaatcaaaatcaccctcaactaattaaataaataattatacttttttcatgattaatatattaccagaaattatgtattttcattagctgatcatagatcaaataataatatcatagtaataattgaaaccctcctaatttatacacttcaattattaatcatttcaattataaagaagaatgatctattctttcttcaaaatatctaccgttttgataaaaattatgaaattttatctcaaaattatttaactatgaggagagtttttttttataaataacttaatatttttatagagaaattttatttatattttaaaaatttataaagacatattattttaataattttta

SEQ ID NO: 405538 - DNA, 670 bp, Cannabis indica
gaactgattttacagtaaaggatagagggctttatatagccaaataaaatcaagaaatggttagtagaaactaactaaaactgtaactgaaatgtacagctgttgacaaggatttgtaacaaacaaaacaacctttaactaacctaatccaaggcttaacaacttaatccaaaactaatcctaagagcccccttcaagatggagtgtagatgttaagtaagcccatcttggatacaatgttagagaagtgagttggtaggagcgccttggtgaaaatgtcagcgaggttgttttgtgaggagacatgaagtagcttgatcgagccttgttggaccttctctcgtatgaaatggcagtcaatttccacatgcttagtgcgttcatgataaactggattttcacttatgtggattgcagcggtgttgtcgcaataaagcagggctggagtagtaaggttgacaccaaaatctttgaggagagcgatgatccaggtgagtttagaagtggcattagccatcgctctatattctgcttcagcagaagagcgagaaacaatttgttgtttttttgatttccatgacacgagagagttgccaaggaaaagacaatagcccgaaattgagcgccttgtgtcttgacaagccccccaatcggcatccgagaagaagga

SEQ ID NO: 405539 - DNA, 547 bp, Cannabis indica
atataattgtattatttgtattaaactttaaaattactattttctttatattaaaatgttaattgtatatgtaatttttaattttttttataaatatgtgtgaattggattggatcagttacttttacatgtcaatcaatattcaatccgcacaagtgcagatttttaaaattttcaattcaatctaatctgcacaagtgcagatattcacactttgcgaattggatcgtgcgaattgtattgaatcagctattttatgaacaatcctataaagaaaatagtaatttaaaatagtaattttagagtacctttgaataggatttagtgccgatttactcttcttttgatattttactctaattctgtgggattttgtatcagaaacacgccacattagacatattctaaaagattggtttctgcgacaacccttggaggttggcttccacgacaccttttggactacccttacccatagggcttttgtttgtctcttttctagaatgacattcttttttttccaatggtataacattttaatattttg

SEQ ID NO: 405540 - DNA, 554 bp, Cannabis indica
ttgtatgtaagactccttcgagaagcttttcaaaaaatcactttgtcattctttatcactatgattatattagattatattggatcactaacaaatattaataaattatatattcacttctaggaatatgcaaactaattaagtagtaaatatatatatatatcttgtaccaacaatagtttgaaactattggtttcaagaaataataagatatacatatattaattttcttctagcattactaatatatgtaaaatttatatttattgaaatagaatttcatgtttattcattctcttcagagaataatatttaaatattctaaatgtacaataaatttgcgatagattaaaatatgtgtataattcatatctattcaataatcaaatataattttaccttgattataagtgtgtccgttcataggtacatggccgctattattcaatttcacgcatgatatatagatttcatgcactttaattgtgtgtggtatttcatcttcttgttgtttccaatttcttttggaaatatttgagtagtaaataatacca

SEQ ID NO: 405541 - DNA, 550 bp, Cannabis indica
ttatgagaattttatccaagagtaattcgtgtgagtaaaagaagtccattcttttttctttccaccaaatcacaactttgtctctttttttcgtatagatatggatgcacccaaatattataacttatctttaatcaattatacttatttgaattaagattttttatagaataattatcttttttaccccctgtacttatgacactatactattatgccccttaatctattcagcttgttataaatagtccttgtataattttatatgcatacatttagtccttctgtttattttgtttaaaaataccgtttgtattgatgatgtggtattataacaaaggatagagtagtaatttcatctctttttagaggaaaattgactatgaggtggcataataactgacaatgaaagatgattaaaaatgatttcataacctttaaaaattaataaaataatttattaaataattccaatcgtttttagcagttcaaattagaaaaggtgtaaatttaggattctacagtatttgaagagatggatatcactaga

SEQ ID NO: 405542 - DNA, 754 bp, Cannabis indica
tatttacgtgcctcggcacgtagctcctacctagtctatatatataattgactacttattttttttttctttcaatgttataccagtgatatataccgtactgtctacttgaactttattttaatattttcaaaacttttttttataaaaaatcactccaaaattatttttctcatctctccttaattctctcaattttaatattttattaaagcataaatctacaaattgatattttactattattttaataatttttccataaaaaacatagagctacaaattgagattttactattattttaattatttttttaataaaaatataaaatctttttatatataaaggaaaagtatgtgacattctaatatcacatcaaatagctttatctcttctttccttaattctttttttttttattaggtttataaatatttatttatattcttataattttatcattttattattaataattttttaaagctttttttgtaaagaacgtggctttttttttaattaaaaaaatatacatatatttattctcttatacttttatcattttacattaattaataattttttaaggaaaaaaatctatatacatttataacataaaatctatatatctatctatttatctatcaatcaattaatcaatatatataaaagagaagtataaacggtaacatagcgcttcaaaattagtttaaatacatctatctatttcttccttaaatctctcattttttt

SEQ ID NO: 405543 - DNA, 1402 bp, Cannabis indica
ccaaggtccttattccggttcttcttctgatttcgggtctcgggtcagagtctgggtttgggttctggtctagaaatggttctaggttagggtcctggtacgattgcaagatctagacaccgactacgggttgggtccaaccctaggtcgtgggtcaagatccgcatcccaatcttgggtctcggtcttgtttcgattcggatcctgggtcccagtccgtgttcgggtctgggtctcggaccgagaccggggtcaggtcttgggtcccaatcccaatcttaggtctcgattctttttctaattttgagtttcggtccccaatctaggtctggtcctaggtccaggtctgagtctccaatctcagtccgagtcatgggtttgggtcttggtccatgttcgtgtctccaatctcagtcccgagtcccgattcgagttttgatttgggttcgcgtctcgattcgggcctgggtctaagctcctagtctgattccagttcttgaactcaaacccagactcaggcttggacccaggtctggggtacgggtctaggtctaggtctgggtccgagtctaagtatgggtcccaaatccaaacactgactacgggtcaggtccaagcaccgagtccagatctagatcacaatctcggttcccagtttagttccacttcgggtcctaggtcccaggtttcggtccacgtcctaggttagggtctgggtctagggtcaggtctttggtctcgatcccaattctgattcccgtgtcccagtccatgtctgaggttagggtttgagtcccggttcggtttccaatctcggtctaggtcaggatttgggtttgagtcctggtccaagtttgagtctgagttgcgtgttcggatctgggtctgggttccgaggagcaggtcatggttcgggtcctaggtcccgatgtgggtccatgttcgggtttgggtcctagtcccagttttgatttcgatttagtgtctgagttcgagtttgggtccgggcctggttggggtttgagtcttggtttgagtctaggctctgataaagtctacacgcaactttgaaagtcccgtacagacttggggggcaaatgttatcccaatttttgcactctgacgtggcatcacatgaatggtggcacgtggagtctacttggaacatttgctcagaaagcacagtccgagcaggatacctcactggcatgcccagagcaaagtattcagtaatcctcatagaatggccaaacgcttagcgaattcaacttttgcatcgtgagtcatcagcgcaatccctataactcagggatcaatttacgtggatatggcatacacacaatcgcactatcagtgtattcagcctcaatcgcacgatccttgcattcagcattgatcccac

SEQ ID NO: 405544 - DNA, 611 bp, Cannabis indica
cgaagccagtgtcagcatacacatgctagcatgacatgatcaacccaaccttccaaaaaattttaatactaaaaagagatcatcgatctctctcccaagcatcaatctcaaacaacatggcactagctctcatcttcatgtcaattagaggagcatgtcttttgaaagggctaactttttgaaatgtaatgtgtctctatggaagaacagggatatagaagtactcttgatggtaaaggtcacagttacttttggtaatgttctcgatatatgggctaaattggtgaaagtggcaaaagccttcttctttgcgagttagacttcttttcaagccgcgaaggaagattatttcatgagaagtaggaataggatagtttcttaaataataaaatatgaagaaggtggaaagaatcttatagccattcaaatttatctggtaagggcaaatactgaacaaatcagctatagatatgaaacatggatgcaagggtagggagccattgggaccaccgtattgtggcttccaaacaactgtttcaggaagacagtaatcatctcaaatcaatcgagcctaatgttcagtaagagtgtgttgggtttggtgccctaaa

SEQ ID NO: 405545 - DNA, 1119 bp, Cannabis indica
agaaaactgcgacagcgtgctgcccggtatgtcatctatgatggaagactatatcgcagaagcttcagtcaaccgctacttaaacgcattgacggagaggaatgcgacgatgtactccgcgagatacatgggggtatctgcgggaatcacgctggtggtaattctcttgccttaaaaatcatgcggcaagggtattactggcctaccctgcggcaagacgctttcaacttcgcaaagatgagataagtgtcagcgaatagccacgtatgtccatcaacctccgagtcacttacattcgattacaagcccttggccctttgcggtctcgggcatcgacttgataggtgaattaccaaagggaaaaggcaaaaacaagaacattgtagtcacggtcgactattttacaaaatgggtcgaagccaaggcactagccaccatcacagcagctaaactacgcgagtttgtctacaactccataatttgtcgatttggcatcccttacaaactcatttcagataacggaaagaaatttgaatgtaaggaaatgcaacagctgtgcgatgacttagggattaaaaggcgttctcagcagtcgcctatccgcagagtaactgagaaactgaagtagtcaacaagataataagacacgccatcaaaggaaaactcgatgagcgtaagggggtatggccagataagctttcgcaagttttatggtcatacaacacggcccccagatccacgactggcgaaacacctttctcgctctcttatggatgggaggctatgataccagtcgagattggggcaggctccctacgaaaagatgttttcaacatttgaacagaacgaagaaaagcagtctctttgcctcgaccttctagaagaaaattgcgatcaggctcacctgaaaaatgcggcttatcggcggcgaaccgcaagatatttcaactctaaggtcaaagaaagagttctgcgagtaggagatttggttcttctaaaaaagtaatgccaaatacgaaaaaacccagcacatggggtcttcagagacaatggggaagggctatatctaatcgcagaaaagattggtaacgacaacataccgactcgcagaactcgatg

SEQ ID NO: 405546 - DNA, 655 bp, Cannabis indica
tgtcatgatgcctatggttcgtgcttctttttcaagtgaggcttgctaggcacgggtccaagatgaaggaccttttggggttgatgctgcagaaactacaccaatagaagtaggtggtgactgagaaccacgagaaagagagctctcaacagagggagaagaagactttgaaccagacctagaactattgagcaattgggtgtgcctcacagatttttgagctagggttttaggtgttattttgctagaagaaggagttgacaacgaagctttcttgattgaagctttctttgattcacactgaggaggcaatgaatcaactgaaatcgaggcagttatagtagcaggaggcgattgtgatcgctctagcgaggcattctatgatgggcaaactgttgggttttgtgccctaaataaaacccatttcaatataataatcagatatacttattaataatatcagaaattgcattttatgttgcatggttcacatgatttatttcatgattgtttaatgtataaattctattaagtccagaacatatgtatttattcatgattatagtattgtcaatacagtggaatataatcatgattatatgttcaaaagtttaattccctaatttgtcagttcattagatttagactggcatga

SEQ ID NO: 405547 - DNA, 502 bp, Cannabis indica
tagttttatttttaatctatatttcattgttttaaaaatggatttttctttgttatttaattataaccattttaaattattttgttatacttgtttttattcattatgttatattaacttaatcaaataacaaatcaaaatgacaaaaaaacaacaaattgaaaacaagactaactaacttggctttagataagtaaaaaaatagttgatttaggttttaataataagaaagtataaataatttttcaaggagatagtaatgcgtctttttttgtacttgccattaaaacatatacttttaagttgttatatgttggtcttagcccctctaacagtaaagggatactactatcttgaattataaatgcaatagaaaaatttttggtggcgtttagtaacacttttttaattagttttctgtttttaaaagttaaaaagtgaaaatatttttcaaaaacatgttctgtaaaactgtttttacttttcaattttataattagaa

SEQ ID NO: 405548 - DNA, 349 bp, Cannabis indica
atttagaaggagaatcataatggttggaagccaagcaaatggaggtcttaacaacgaatccatcaatatcggaatgatgaacgttccactgtcaggaagcagagtgcctcccgtagatgtgatcaacggcgaagtaggtcggggtaattggagaccactcaatctattccctgaaactacttgccctcacgccggggaaacatctacacgagcaaccacagcggaacattttcctccttttactccagcggtggtatccgaaggtcttaaccagctgaccaccgatctgtacattgcaatccaagaccagctacgtgctcagcaggccgaggtgttggaaattatttta

SEQ ID NO: 405549 - DNA, 516 bp, Cannabis indica
ccttgttcttgttcatcagaaggagaaggaaaatcaaggtatcgttcgtgatcgaggtcgggttcaagtagttggcggcggtggttgcacggtggcggggaagcagagaggaagtggcggacgtcgtatcgatctataaaaagagagttccactcgacaagagcatccctagagttgacgaaagcggcgttcgcgtcatcgtcgaagaacaacgtgtggtggcggcccacaacctccagatccatcaatttcattttgtgattaattttttaatcacaagtaaaatttttggatttaatgggattagtaaatataaaatgttttttttgaatttaatgagatttattttattatatataaataaaaagtgacctatgaatttttgataaatttttttatttttaataataaatcattttatttttaatataaataaaaagtcacccatgaatttgcacactttatatagaatagatataatatgatattatttttgattaatagatataaaaaaaa

SEQ ID NO: 405550 - DNA, 597 bp, Cannabis indica
gttttgccagtcattaattcttgcatactcttctgctcattatttatatataaaagagctcaactgtataggatgtaagagattcactttttttttttttacattttttttaatgatatttgaagaatagacagttctactagatacaaaaattacttataggttaattaagatttttattcctcaaattttaacatttaccaaatcatgttctttaaacttttctggccgttaaaaaatcccctgaactattaagattgttagatttaaggacttttgtttaatttcattcaattttactatatcagtgattagggctgaaaatcgggcgggtttaccgggtttcgggttggcgagtttcgggttcacaggtttcgggttcaaaaaattgaaaccgaacccggacccgaatagggcatgggttggcgggttggcgggtcatgggttggcgggtttcggttggtcgggtttagcgggttggcggattgacccggtcaactcaatcaacttggtcaactctttaaaaaagttaattttttattcaaataattacttttttattttttttattatattaaattaagcatatataatata

SEQ ID NO: 405551 - DNA, 591 bp, Cannabis indica
tctctcaaccaggcttcaagtggggcacacacgataaggccatcagcaagattaggcactttactgatgagtacttcatggtggatggcacaggcatcactcgcacttggttccagcagattccgacctatcaccgccctcccctcactcatgctcttagggatagagctcaaaaatttgcccgtcttccgggggaagactggaatattatccagttgacctccaagtataactttgtaaggtacgggctctatcccaaggacattacttctaagtccgtgacggggaagaaagggaaatctagtgctagtcggaccgaacgagctcatccagagaatgaactcattcaacttaagcgtgaagctaagttgaagggaggttcacgggctgagcagtatgctcaagcgcccttgaatctcgaggatgatgccgaggaagagcaggtgactccactgaagaggaagaagaaactcccagcctcgcccaggcctattgaacatgcagtttgcataagggagcccatttcacctgttcgtccatcccctcccgtgttcgaaaaagggaaagctgttatgtctgaaataagatcga

SEQ ID NO: 405552 - DNA, 505 bp, Cannabis indica
tttttttttttttcagttggagtttgtcttggaatgatattacaggtctcctggagaatatggtagaatttgggattgaattggtggtattttcgtagagtttggtttttcctgcaggagaaccggttaatcggttttacagaactggttaaccgattcccaaggcaggccgaaaaaccggttcaccagtttgggaatttcagtctgtcgattcttgcagggccagaactctagtttccatatttttctcagagtttagtgtagtattaggttgtttttctttaaggttacccttggttataagtttaaggtttcgagaaaagtctactcaaagttatttactaatttacgtatatgtgactagggcatccattcaatgcgagattttccattcaggtcgaccaactcacttaaattcggagacaagataagattagcatagaacgtattatatatgcatgttgtgtttgtgattgtatatgttttgggtgatatcatagcgaca

SEQ ID NO: 405553 - DNA, 587 bp, Cannabis indica
ccagattcttaaaatataagcagcaattgtatgttgattgtttgaacccaatttgttgcatataagtatcaaatcttttattttattatcttagggactatttcaaaccatataaggacttgttaagcttgcacactaattcaactcctttccattcctcctaaaacccaagtggttgcttcttgtagattttttcatccacgaatccattcagataggcagttttaatatcaagttgttcaactttaaactctatttgagctgccaaggacaacattaatcttatcattttgtactttaccacaggtgagaagatttcagtcttgttgattccttccacatgagtaaaacccttagccacttacctggatttgaacagcactagttcattctcattgattgcatcttttactttgagaattgatttgcactccacaatctatttgttcttcagctttggtacaacaacacaattcttgttcttctggagtgaggtcatctcctcatacatggcctggagccattttgacttattttcacacaaaaatgctttttcatagcttctggctcttcaatttcagtatgtt

SEQ ID NO: 405554 - DNA, 799 bp, Cannabis indica
gtaatctgaaaagctatgtagttactgatgaaaatattgtatcagttgcatgcagggagcagtttgcttgtagggtttttattttgcatgaagaaattgttgttgtgtttgagcagttataaattttgtttaatttatagaaattggtttttggtgtgtgttttatttgttgattttagtagttttgatttttagggttttcgtgagttcattgttggtttattattggacatttcattctgttgttttttttttttacaaaaaaaattcttattaaagtttcatatgtactctttattttaagttttcctctttagcacatagttcgtatttttttttttttgttgtttttgaaattggttttaatagttgtcatggttgagtttttgttgtttatggtggtgttatcagtgatgatgattcattatggccttttttgggtgtgtgagtggatttgaggtttgaggttgcaaaataaatctcatttgaaaaaccagtttttagatcttggtaacagttttaaaaatgggttagaaaggatgcaggggttgtttgggatcctcggatattgggtgtgtgaggggttttaatgttcaggttgcaaaataatgcacattttgaaaatctattttttcaactttatcatacctttttaaaaacctttttgatcatacctaatttcgaaacatgtcaaaaaccaaaatctggagtttgatttattttctagatatgtgttatttgtgcattctgtgatattgagtgtgtgggtggtttaaggttgaggttgcaaaatgcttgg

SEQ ID NO: 405555 - DNA, 579 bp, Cannabis indica
tgctagggctgggaattttctttctaattcaagcattttcagcaattctaagtgtaattcaagtggttggtaaggttcttgtaactatcttctatgtttcttggaatttttgaagaaaaatgatgatttgcatgcttggtttgtttgttgttgctgctattaattattgatgttgtttacagaagtttaatcgtgtttaattgagtagaatagaggtggttgtgatgcatgctagttgtattatttaaagttgtaaattttagctcaaaaactatgattttcaaggtaaattgatgagttttgttgctgtgtttattggggttgatttccattgtttacagaagtttttatatgcatgtttgagtagatttaaactggttgtgatgcttgcaggtgagctttagccaagtttgagtttggaactcaaaacttggagctcacatggtgaaatgtgtttctgtgtttaaagcttggttctattgcttgggttttgttgtttgggatatgtagagcaggtctggaaggtttgaaagagtttgggtttgatttgagcaagttatggaattttgtgtgtttcct

SEQ ID NO: 405556 - DNA, 537 bp, Cannabis indica
ttttttttttttgataaatactattttgaattttttaagataaatatcattttagattatttgttttgcaaaaattattaattggatcctctattttattaaataacaaaatgaactttatatttttcaaaatggtaaaaatagattattgagttcaattttcaataattttattttttaatataactaacttttaagataatttctaacacgaacagatacagaaaatttaaccagttttatcataacatctctatcagattattataaaattttattttgataaaaaaaaaaatcaatttagggtcctatttatacaattttagaaaatacagggtctattttgttatttaacaaaatagaaagtccaattaataatttttgcaaatacaaagtccaaaataatatttatccttctttttttcttcataattttagtacaatgatttaggatcatgtaattttttttaaaaaaattaaataatttataatgtaaaaaattacacataattatttttttaagtatggtaagtaatt

SEQ ID NO: 405557 - DNA, 499 bp, Cannabis indica
tttcccctcatcatctgacatagctggcatggaacagtttttttattgtcgaaaagtctcctatccatgtggttgtggaacgacaaaggttccttcatcaagagactgattaacttctctccttaggacttcgacaccttcttcaaaattggtcatcctagtactcaacaccattattgtgagaaaggtaaattaatgagttttccaaagggaaaacagccaaactttcacctcaacgctcttaatgaaagcaccaaactacattgagagcgctttttaatcctctcaatgaaagctccaaactgttgatgcagttttagttaattgatataacacgaccgtaaaaagaaagagaactgcaatgaattaatttgactaaacaaaactgtaatagataaagtggacactagagatttatagtagttcaaccccatgtcgtaattgtaatgaggctacgtctacttctgtttttattgattagatctgacacaccagagtt

SEQ ID NO: 405558 - DNA, 747 bp, Cannabis indica
aattttttttctctaatctttctattttgtggtaatttcaattttaattataaattatgaataatattaattaattaatctatttaaaaactaattaattaagtagttgcattgttcactgttaaaaagttaagtaataattgatattaatacgattgtaacttattattaaaagttcaaataacgttttgtatatatttttttattattaattgattagtgaaaaaaattatatatattattagtgactattaatttcttttttgaaaaatagtaactatcaatttctaagaagaaaaaaaatacacctcatcaacttttctcaaaagatattttaataaattaattattaataattaaaaaacatctatacatttaagactaagaatgataaaatggatcatatatttcaatacatttttattattttttagaaatttcagtttttttatgatctaactttataaaaatttcagaaaatatcatagtttttcatttgtaaattgtaaataaagtttttatttttccaataattaataagtgttttactaattcaacattcattaaaaacgcaaacttctttttaataatgtatataacttacaatattttaagaccaagcaacgcgcggcttttgtttcctagtatatatataaaggagtgttttgaagagggtgatgtggcagcttaattcttgattattttctaatctctcctctcctatttttttttatttattcttattta

SEQ ID NO: 405559 - DNA, 642 bp, Cannabis indica
attacgaggacttcctagaaggttacctatcctactagtactaatttatttgatatatatatatgtttgtagtcttgtgtgtgtaaaaataaaataataagaggaaattaattaagttagggtttgatgaccaccactatcagtactaccttggtacgtgtgtgtaagtgtttttatgtgtgtacttctttattaattaagtttgaatttcccttacttaattactacacctttgggtgtacatctttatatattctctcttatattacaacaattatggttattagaggtggaagattctgctgctaataatcccacagtctaccagtataggtaattgcggtggggtctgctgataataattcactgataatacttgattgctaaaaatgagtatttgcagcggactaacacccctgacgctaattatactggtgttagacacataaactgatattattaatagcggcggaccaaaccgcctctattgctcttttgtttttttaaggtatgataattatgtactctaaggacttgtttggaacgttgtattaagtcgtattgtattgtactgtattgtattatattgaattcaattatataacatattttatataatactatgttaaactttaatttata

SEQ ID NO: 405560 - DNA, 694 bp, Cannabis indica
ggctttcatcactcacaatctgaccaatccctctttatcagacacaaatctaacacttttcttgccttacttgtttatgttgatgatataattgttgccaccaataatttgaatgacctcactaccttcaaacaatctcttgatgcttaattcaaattaaaagatctcagcaacttaagattcttcttgggtttggaaatagcttgttgtgtacaaggaatttcagtttctcaaaggcctttcacacttcaactcctaaaagaaactggccaattaggcaccaaacctgcctcaacaccaatggagcccaaccttaaactcaacaaagacacaggcacaactctcatcaatccaacacaatatcgaagtgtcataggcaaactcacctatctcacaatcacaagacccgacataagctatgttgttaacaaacttagccaatacattcaaacaccacgacaaccacaccatgacgctgcctgcagaattctgcaatatctcaaaaactcactgggtcaaggtctcttctttcatgctacaactccaacaaaattaacattacaagcattcgctgatgcagattgggtgcatgccccgatacaagaaaataaaattcaagatattgtgtgttcttaggtaactcactcatatcgtggaaatcaaaaaaacaagcaaaccgtttctcgttcttctg

SEQ ID NO: 405561 - DNA, 551 bp, Cannabis indica
actttacttattactatgtgggtagttagtttttttttttgtttttttttttttttgttttttttttttttttttatgttttttgattggttaaatagatttgatgcaggatgtcattacgattctcagggttgagaattattttattttattttttattttttaaaagtgcacaagtatatatagttgaaatataaaacaaaaagttattgatttcatataagaagataccacatcataaataaagaaattgttattactacattaaaaattaatggttaaaatcactcatgaatttacgatgcccacatttactactgacgctggaacctcctcgaatcaggatagtttatcttttaaccgcagagcatgctttgccaaccatgggctactaaagtcttagagcgagcccataggacaaaactgcccccaaaaatttagacaataaagctataatatcttcaaatgacgctccaaactcattaaaatactgaagttcctcctgaaaaaaacatcaaaaaacaaaataaaactttaattagaaaactaat

SEQ ID NO: 405562 - DNA, 894 bp, Cannabis indica
cactttgaatcaaggtatatctttatagctttcctatttgagttttagttgagttttgggttgaagtaaatgaatttaggtttgaattgggagctgtgtgtgtgtgtgtgtttagtttgggttcataatctgaagttaaataatgattgttcatgttgttttgatctgaaattgagcctttgttgagtgttgttcaagttcaaagtttagggaagcttagtttggccattaatggtgattttataatttgagtagtttattgtgatttgttgattggtatgtgattattggagtataaccaggtaccctagaagttttgagaagttttgggattgattggagtgagggggatcgattttagggttcctagcgcagaatcggtcgaccggttctgggaaccagtagaaccggtcgaccggttggtaccctggaactggagttccggttgggaaccggtctgccggttggggctttttcccgagccctagtttttcccgtttttaagtaaattagggtattggcatcctatttatcgatagggttaagcttagtttctattttaaatccccgataagtgttttagcgtgtctctcatcgaattttgaacattatggtttagggccctgtaaagcgtcgagctgcgtttccactcaggccgaccggcacacttgagcacggaacgaggtaagataacgtaagaatatatatatatatgaatatatgcatgttttagttgtttacactactagcactaatatgaatatgactattagggtgttagtatagtgttgtatattagtgtggttacggtgttaccaacacgagtacaaggggtacgtcgtgttcgtggtacaacacttagtaattcctgggagtacagttagggctctacca

SEQ ID NO: 405563 - DNA, 552 bp, Cannabis indica
taaacatcatacattgtaccaatgaacttagtattgctaccgtactagtgtggtagtgtaagatcataattagcatgcatatattacacatacacatattcatatataaatactttctatgctaatcttatctcatttttgaattcaagtatgctagctaacctgaacggaatatcatgtgttggatggatgccctatgtcacatttacgcaaatggttaaataacgtgccaaaacctaatccggaaacctaaactcacaactacaagttttgctattgataattaacatgacaatatcctaattattgaggaaataacaaactaaggctctggaaataacacgaatcgacaaatcggattttttgggaatcctacctgtgatctagttaaccggttttacaggtcctgtagaaccaggtaattggtttgtaccagaaaaccccaaaaaatccacaacttgcccaattagtgtccaaactatatcaaaccttccagatcacctgtaccagcttcaaacaacattttccaagcaataacaacaagaaaaatac

SEQ ID NO: 405564 - DNA, 559 bp, Cannabis indica
actagtgttgcaacctaaattgtaacaaaaatcgtatagaaactcctattgcaactagcgctgcaaccactttagaaactcaaagcgtaaatttgaaaaaaaaaataaaaaaaactatatggggtaattctcctacattttttttaacatatataattttcatttacgtgtacaattgagtctactttttattatagttattttctattaaaaatgaaatgaaattttaaattttttattattatagttaataaatctatcaatccttcattttttttttctcaatttaaaatttctaaattatttatttatcaacaataattttttcggtatttgttctccttttttataattcttaatttatgtatttatttttaacgattaatgtatatatttaaatcaaaataaatttactaataaaaatatagaagaaaaatataaaatttgttaagataggctttttattattatcaatttaactatttatcatataataattattattttgatgactaatttataagttttgaattttgtatcaagaaaacctaaattataa

SEQ ID NO: 405565 - DNA, 702 bp, Cannabis indica
aaagggattttgcttgaattgtgtattagggttctgtttttggttcttgctgcttgagattgtattctaaggtttaaattatgttagttgagttgctttgaagtggttttgagggttgttgtgaggtttgagcaagctttgaatttaagaactcaagctttgctctttaatggaaatttttgattctggttatgttgtggtgttttattgccttgaatatgttctttagggtgtaaatagcaggtcttgaaggtttggtagggtttgggtttgatttgagggtgtagggaattttgtgtgattctttcactgaaccggtcgacctgttcagggggacttgtaggagccggtcgattggttggtccctaggaaaccccacaaaaccggacttttagttggggaactggtcttccggttagggcatttttgagaaccctaatttttcccgtttttgtgatatttagggtattgccatgttattcatcgatagagaaacttttagtttcaagtttaagtccccgaaaagttatttaacgtgtcactgaccaattttacgaataatgagatttaggggcctgtaattcgtcgagcagctgttccacccaggttggccggcacacctgaattcaaaaacgaggtaatggttgcatatatgtatacatgtttagcatacatgttagttgcctttagaataggcaaatc

SEQ ID NO: 405566 - DNA, 661 bp, Cannabis indica
taatgaccttgaaattagaaaaaggaaaatgtaataaaaaataataataaatgtaaaaatatatatatggtgaagactacaagcaaattactataagcaaaatatatatatatacactaaccaagttcgtggtagcatcactgtcaccattagttcctgaacaatggaagggtcgtggttcagagtttggtcgaactgctacatcattcccgtgggaattaccacccaaagcatcagaaggtttacctactaaagctaccggagtatgaccctcatcaactaaacagacttcagagggtgctaaaggaggtgacttttgcaaaggaatatacacccctatttccaacaacaaagtcatattatctcgtataaactatcaaagatttagcattattaagagaagatgagcgagcgaggagatacctgacgatggacccacgtctttctctcggtcacaagtctcaccttgactgattaatccagtataatgatgtcgcatccatatgttagcaaatttaacagaaactccaccttctctgtctttatcgggtagtcgaaatgtgtcgtgagattgctttgagagttggaaggaacccaacaaacatgactgttttgctttttctaaatcccctatcttcagatcatgaggaacatgttgatc

SEQ ID NO: 405567 - DNA, 532 bp, Cannabis indica
tacattaaatgaaatagttaaattatatgttaagaaaataaataacaagttcaacaaaaggagagaaatttctttacagtgtgataattattatggtgataacatttaccggttattacaacacatagaaaataactatgagtttacttaattgtgttaaagtgggaggtcaccggttgttgttattttcatgtgttttgttttaataagtgaccttgtaagttgtacatgcagaacattttgtaagaaaacttactgatgggtactgtttgtaggcaactgatcacccttaaaaaacatgactgatttagtcattatttttaaagctgaggagaaacagagtatatggaatgtcgattgacaagtaaaagtaactgattcaattcaattaatatatatttatatatactaggcagtgtaattattaaggtagtaattacacagtcaaataattataatatattttaaaatacaatgtatgtttggataagaggtggtaattacaaatgaattcttaatacagtagaacctc

SEQ ID NO: 405568 - DNA, 783 bp, Cannabis indica
ccgagccaccacttttctcataggaaaaatgaatctcattaaagtccccacccccaaaccagggtccagaatacccatcagccaaccgctcaagaagacaccaaaactgggatctaaggtgggtctccggttggccatagaacccagtataacgccaccaaagatcaccatgagagcacaccataacatcaatatgactacgagcataacccttaagcaccacattaacattactactccagaatagacacaatccgccactcctaccgactttctcaaccactaacttaccaataaagcccaatctaacccgcatcacttcaagaaccgaatgcgtcacaagtgttttcaacaagaaaataatgtctggtgaaaactccttgacatgggaactaaggatttggaacgtccggtcattcccaagaccttgaactgttccaagccaaagaattcataatgcccagtggccctgctccacagtgtccaccgaatctaaaccgaccacaacatctctcccaaccacaacaggtaaaagagaagacattaccttcttcacggaacgtcactcgcatctttaactatgtcaacttgaacctcatgtagaccagaagaatcaacatttgccaaacagttttcatcctttaaaccctgtttaaaaacttttttggggctcttagatttcacctttaaaacaccatacttattcgaaaaagagactttttttttattttcttccttgcatgggaagaaatggacgtaccaccatgttggaaattattttac

SEQ ID NO: 405569 - DNA, 734 bp, Cannabis indica
gtacctagtgagttgccaatacgagggttagactttttaaagtccttaatagaattcagtttggaaaacaatttagtaacaaatactgttaaaattcaacctatgttgacctaagggtggtgctgccctaactgagaattgggagtgtattttctcataaaggtcaacaaatagaatgtgcacaaggccattaacgatgcaaaatgagacatgaggtattgggcgaacctaacaaaggtttgtgtgtgtcatcctcattttattataaagaaaagttggtttaatgctttgtcaaccaaatttttaataaaattcgtgatgattacagttacgcatttgagtaagaactttataagagtgttgatttattctgtaaaagtgagggataaatgagatattatttgattgattaaataagtgttacaatgaggtatcacaaattttaatctagtgagagaatattatattatttatgaaataaaattgtgatataaaatatattattaagtgaataatatatatatgatgtaaattacacattttgtgacataagaaatattacatcatatattaagtgtaataacacatagttgtaacattagaggagttacattctgagatggaactgtaactctcaacttagaatttcattaacataaatgagactcttgacaattaatgaatctgtaatataaattgtaaagtccttttttggcaagttaggtgacaaaata

SEQ ID NO: 405570 - DNA, 540 bp, Cannabis indica
actggaattattagatgtggagtgccctagaaaaaaaaaaactaacaacgataattagtaattaataataaaaaaataaaacaattattgtttcattaataataataaacatattaataaaacaattattaataattaatacaaaataattattaataaaaaaaatgaaaaataaaactgttgaccgaggttttcgacttccaataaaataataataatttagagagctgcaagaaattgagaaggagattttttacgtagttggggcgttaatgagccttagtccacgagtctgtgtatttatgatagtatttaatacagagaatgttcttggtgagtttttactcttctagcacttgcgcaacccagaattctcgacccctctttaatgagctttgtgggggtatttatagtgtttttgtggggtgatccctagaattaaggtacatgcatttctgtaactatcagtaaagccacacattaccaatgaatttatcataggtaatgcatggtctaatccctaggtgttgtagggatttt

SEQ ID NO: 405571 - DNA, 649 bp, Cannabis indica
agaaggaagctgaggagggcaggtcggggactgcagctgttcttcatgagtcgggtgaggccaaaaggaagttgtttgccactgagaagaaaatcactatgccgaccaaggacctcgaggctgctgatcgctttgaggaaaccatcgagaccttatctgctgaagttgatcatcttcaggatgagaggacctctctacggcaggtccttcttcggatgaaggaagataaggacgctcaggcggtcgaggcggacctcttgaaggagaagatcaatgctttggagactgctgggctcgagctcttctttgatttttggaaggctaatccccaggccaactttgacaacttgggcgacgccaaggacatgtaccttgagtactgcgcatcccaagttgcctatggttggaaagaggtggctgcttcaacttccggccaggcttctgaccaggctgctgatgcttctccttctccagtcagcttagaagaaccaaatccagagcctgggactcaagccgtttgaacattgatctttttatctctcctatttatatatatatattatatggccttaaggcctttaagacatcatgaccggctaaacggtctttaaacttggaattatttatcattttttggacaacaggctga

SEQ ID NO: 405572 - DNA, 793 bp, Cannabis indica
agtgtaatctgattaatcatatccaccagttattattatgatataatttaaaaaaaaattataaattgatatattataagtgtcgtagtaatacttttatttttaattttttaatcacaaaataaaagtaaaatctcataattttttttttacttcaagactccaatattatttacttataatgaaatatacttgcaaaagattcatataggctaatgactatataaatataactttaaagctaataaattcttgataataaaaacgtaaatgttttaatgtatatatcatcaatcttttcatatttttattttagaggataaaacataactaaacaaattgtatgacaaaaaatgaataagcttctccaaaataaaataaactaaaggaacttatctgttaacaataaaaaaattatatgatattaataaaagtgtaaaactaatagattccttataattaaaatataatttttgtataaatattagcagggccggccctgaaaaaaaatgggcccaagacggttttagcaaaataaaaaaaaatgggcccttttgtatatgtatttctttctatgtatgtaattttaaataaaattaaactaatatttagtaatataaatacattccaaaccaataaatcatcacataaacttttcaatgtattacttaaatattatgcgtcttgcatttttagatgcaaaagtattaattaaatttgcataatcaagttttgcaactaaatcattttcaatggataacatagctaaaccgcttaatctttcttgagacat

SEQ ID NO: 405573 - DNA, 960 bp, Cannabis indica
catcttttttaagttgtactgaaacgatcttaatttccgaaagatttttttattacagtatattcatattctaatatattactttaatagtgtagtatattatttttatgtagtgtggtacatgaagaacgaaagataaagatactcaagtatattactttaatagtgtggtattattttttatgtgaggtggtatatgaagaacgaaagacaaaatatattacagtatattcatattcgagtatattacttaataatgtaatatattatttttatgttgggtggtatatgaaaaacgaaagagtgaaaaaatatgaaacagtagtttgtttgacgtaagtttatattcaatggggtatattctttttattttctatggtatatgaaaaaagaaaggaaaaaaaattgtggaatattaaactaaatttttggtatttttatttcacactatgatgctatatatttttaaatatgattatgtaaggtatatcacttttatgtgatatagtataaaacgtgaaatattagtttaagtttgagatataaatatatttgattagggtatattatttttatatttaagattgtacatatacatatatgggtccggttttaatggaaaccgaaatatatacccactgatggaaccctcatttttaacccttagatcttaatctaatggttgataattcctgactagactaagttcactttttgacttttcaaacgtttggaagggcaacctgatggtgacctgctgacatggacctatatttaaaatttatttaataaattaaaaattaaactaataaagattcattcctagattctttttcattcccattccatattcattcatttgtgcattaaatgcagatctcgaattaataaataaaaaataaatagtagtatattttttatttaaaaaaaaaacaagatttttttaaaaaataatttaaa

SEQ ID NO: 405574 - DNA, 802 bp, Cannabis indica
ttcagaggataaaaatccaaattagccttaaaaaatgttattcttaaaatttacattgatgtcactagggatgcacacggggcggggaattagtagggagtgctctccctgttcccatccccgttaaggattttaatccccatccccgcttattccacatcggggacgggacgggaaatcccctaatggggcgggacggggcagggaatcccctattgtaaaaataaagttttcttaaaaaatttaattgtataaaattattaaattacattaaagataaaatattacatattatttactttttaatataataattattatacaaaaacacaacttcaaaaattgtaaaaatgatattaatatactttaaaaaatacaaatgcatatataaaatataaaatattaataaaaaataattaataaattaaaacggtacccgtcggggcggggagtgtcatcctcgtccccgccccattcggggataaaatttgatccccgtctccgcctcgttccccatttagacggggaatccctgccacattaggggcgggtccctgcgggcccccatccccataggaaaaatgtgcattcttaaatgtcacacaataacattgatgctatattttttttataataagatattaaagatgcaacatagataatagcttaataaagaaaaaaattatatatataataatgtgtgggatcataattatagtatttttaaaatatattataccattagagtatttttagaagtatgtgccaaaaataatgtggaaaaaagataaaataaaataat

SEQ ID NO: 405575 - DNA, 969 bp, Cannabis indica
ctactgaacccaagtttcattttctcattcacttccctcgaaaaatctcagttaagtgtcacaatggactgacccatgtgtacacactggtacacgttgcaaatttttagtggcccatgtgtacacacttgtacacttgtaccgatcttcagtcttcttgttggatgagtgggatcgacttccacttcttccaactcttctataggtctgaagcttcctacaggatccccaaagcaaggatctatgtctgtgtccctaccttgggctagacctcattgccccttacagggctttttgtttagacttttggcaagcatcttctcttttttagccttcgataaggccatgttgtaacagtgacgggtagacttctggtctcccctcacacatgccacactatgccttgttgggaatttaaggcataagtggtaaatagacgtcactgccttcaggtcgttgggggccagtcagccaattatggcgttgaaagctgagggaacgtcgatcacgatgaactaagccatcagtgttcttatggtttgattttctctaactgtgaggggtaatctgatatacccaataagtgtgagccttggccaaaaaattcatacatcacttgattgcaacgttccaggtcagtgagttggagccccatcttttcatatgttaatttgaaaagaatgttggaggaggcttcgtggtccaccatacatctagccacaatcatactcccaatttgtatagtaatgactaggggatcattctgtaggaaactcaccagtgctgcatcttcttcaataaaggagattgtgggctctatatgcttttactgcttagagctctagtcttcgacagctaggacttcgcctttgggctcatgatggagtgtccgagcatagcactccctagctttgctagtttcgccagtaatgtggggtctgcctattatgacccctagatgtcctgcca

SEQ ID NO: 405576 - DNA, 709 bp, Cannabis indica
acatgatcttgcaaaaccacattgaactaacacatggcatatggtttcaacttcaacattacataatggacaacttaaatccacatgcacatttggtaatatcaagagcacaaatactaattattctaaatttattaattaaaataattttacaatattttaattttattgaaaatgtatttgaaaaaactcggattgagagtattttcatttataccttttaatcaaataagcacttttcttcctcataggtacactttttcattggaatggcagaggggagcgtctgtgactttccaagtaagtgtaaaaaaaaaaaaaaaaaaaaaaaacttcggcctgccgtaggctccacccgggggcccataatcgccgaccaagggcttatccttcgcatagttcaaccgcccaaacctcatttttgggtgctgttccccaccattaaaatgataataggcattctgattaaaaaaaaagttatataataggaagtttgtaccttcttttttgttggtatcctcctaccatgtagaattactatgttacccccaatataattttgtttcaagatttttcatattgttgtaaatacacttttttatttgaaaagaaaacataaatacactgcatatatacaaaaattatttcaaggactaaataagagttgttaatgtattacacaagcagttgcctaattaattatggtgag

SEQ ID NO: 405577 - DNA, 1337 bp, Cannabis indica
aactcaacagcaggtgtctggtctaatgcatagcaaagcatatctgagacttctcactgttgatcctaaggaattccttcatggcttttatcttttctggaatagttgaaactttttcttcgataaataaaatctatatctagaagtcgagaagctactatagattgccattagaaaatgcaccagcatcttactaaagtaagttgcttgcactagagtaattaaattaccaggcatactgttatacccaaaattcgtctaacacatcagaggaagacacgtgtcaagctgggaaaaatacaaactcaggcacataattacaattatatctgaggtggaataactcgttaaaagcataattgacagagtatatttacaactcagttgaatgaatagtcttatgcaaaataaagatatacaaactgttgccttgtgcatcaacgagaaaccatgtaacttcagatgtacaagacaaggcactaacctcattacgtggatgagatataatgactgtgaagacacacagcgtataatatacaatatgcaaactaagtataacagatgggtaaaccaaagtaagtgatagcgaggcgtccatctcgctataggaaggcatgctcgcggtatcttcactaatcaactccagacatcctttaatcgagatccacaggtccatcaagccagttctctgatatagaagctgacattaaaatgatattgacaattgaagatcacctcatcaccaaaaactgcgattgtcatgtcttcagagcagaagcgacgagattaacaatatcaacctcggaaagatataggaaaaactccagctcgctatcaaggttattgatactgagttcctaccgagacattccagaatattatgatttataacgtgtttaatacatgttcactttgacccagtacaagcaaactaatcacagctgtatgatattcaaatattaaccgcatttattttacaggatatgtaatcaaacccccacgatttcaagggataattattgtagagatatcagtcaactctgtaattaactgcctgactatgtaattataaatagaggcaagttcgagtaaaaaagggacagaaaattcataagagaaaagggccctagaacagcatcagaaatctaataagattgactcgtgtactatgcaaaattttaactgcaaaatcacgtaaaaaaaccttcgtgttcattcttttccttttattttctttactgttttcatttttctgtgcaagtctatcactatttaggctcaaatctagctaacaaaaatctgcgttaacacataccacaagccataggtttagataa

SEQ ID NO: 405578 - DNA, 585 bp, Cannabis indica
tgaggaggtgatagcatatgtatatatatttgtgttaaaagtataaaaagaaaatgaaatgctatacattataatagagaaatatatatttataaaattcaacaaacaaaatagatattcacgagaaaataaatactaagagaaaaagacatcatactttgtaaaattaaaaacagtgtaaaattattattaataataatgacagttatatttttgtcgaaagaaaattaaacttttttaaattataatttcttttaagaaaataataataactattttcttatagattactaaaacacatcattcattattcataaagaaaataaataataccattctaatatatagaccgagatttataacagcttaaagaaattaaatggttgttaaaaacaaaaaggatgaatattttttatatggttcgggtattaataaactttagtgcacgagtcaatgtattggcttaagaagacttgatgtattataaatgagtcttacaatttgaagaaccttaattcttgctatagtgtttttctcttgaggttttttcttagaagagaaagcttagagagaacctaaaagttt

SEQ ID NO: 405579 - DNA, 921 bp, Cannabis indica
ttttttttttatattttggttttattttttgctccgtctaaaaataaaatacgtcatttagattttatactaattaaataaaatgtttttttaaatgctaaaataaattaatagtgtttaatattttttaagtgttatataattattggtataattaaatatcgagtcttatattattacaaatattaatgtggaattatgagtttatgacttttgtcccatttgtattaaatgatttgtgagaggctccattttgtataatttattaaaatgccattggaaaatgagaacattgtcataaatgaaatttgatttacataacaaggggagtctttgtgggatcttgtgaccctttaatactatggacaaatatcaatatgttttctttggttacctccaattgagttgaggataaaaaattataaaccaagccttaaatgttattaaataataattaacaccattatacaattatcatttaattcttcgatgttaatggatgacttagtgaaatggttattgtcttattgaaggaaaaaatacagggttgatattgatcatataaaagaatgaaaatagatatgtttgcattatttctttttctttctaattaatatgttgcatttttattcaattacttaaaatatataaattgattcatgataatcaattatgccggccttttctaatttctccctcttccttatactaacattttttaatgggtattaccaataaatgtttactaaataaatttaactataaatattaattttaaaaatatcaaaccatcgaattttgatctaataacgaataatgaaatcacaaatttaaatttctatgcttaaattgactacttaattaaaaaaaatatcaaaaaatatctttttttatactttatcaaaaatatattcatacaaa

SEQ ID NO: 405580 - DNA, 654 bp, Cannabis indica
catatactgttggaaagctcgtttcgagctcgatgtgattatctgaatttttaatgccatgtttatatattatgaatgtgtaatcgggggctaaccctatttgtgaaatccggtatttgtgactaggattaccggcacctggtcaggagcacctggggatttggaatctctactattgtgggacatcaggtaagaaaatatttagcacgtagagttatgcgcggtggcagttgtattggaaatgatatgtgtgagtaattagtaaccgagattagggttattaccctaacatgagcgatttaattgcctagggttattaccctagtgatatatgttgaatgaatgctatgccatgatatatatttgagtatgttaagatttagggttatgcgtgcaaggcataactgggttggactcggtaactagaactgagatgaatcgttctaaggctttattgtatttagacgtgtgagcgcaacacataggtctacgttatgtagacataaataggcatgtgagtgtaacatgcaggtctgtgtcatacaggcatatgagaatgtcattactatttatatagtgtgataatcatgttattgatattttatattatcttgctgggtttggctcacgggtgctctactgtgcaggaaaggg

SEQ ID NO: 405581 - DNA, 543 bp, Cannabis indica
ttccttggaaaggaatttaccttgccatttggaaaggtaagaccaaattctgtctttcagggtgttgaaagaatgctttttggatctaccaaaaccctgaggtaatccatggatttgtcaaggtgattagtagaaggaatttgcaagtaatcctgaataagatttttgtaggtgaggcttgtattgggaaaaaaaatagaggacttccaaaaatttaaccaataattcctcttccttgtgtagtaaccgacctatgccactctatggcagtggtctctaattttggagagcactgtgatttccttatggtagaggtcacctaaggcgactcctaggccagaaatgacttttctcacttgtttcttactccttgatgtcgtgggaacctacgcaaacaaatttccttccatagtttgcgaggagtgacacatgccattctactatggcagaggtcacctaaggtgacttataagtcagaaatgacttttctcacttgtccattactccttgatgtcgagggaacccgttcgaacaaattttctt

SEQ ID NO: 405582 - DNA, 663 bp, Cannabis indica
gatctgattctcacctgttcacattgggcactcaactatacatacgaaaacaaaatatcagataattaatgatatcgaacttaaattaaaacacataattatataatatatatactgtatatttttaaatctgcaaaaaccaaaatttggaacatgtacaagccgtaaaacaatttcattattaatttattcattttttatatgaactaatttctaggaaaaagcaattaatgaaaaattaatggcagaaattaacttaaatggtattaagagcattcctatttttttcaaataaaaaataatggcagaaattaactagaatggtagattagtagggattcttttcttcaatgtgataaattacaaaagcatatatatacatagaaaagtgtaaaacaatttgcactttgttttgtttctacaataaaacagttttaaactttggagtattgaagacctttttctaattttgcttcatttttcaaatactttgcagaataataggaatttctcaagaaaggaagactcgacttttggagtatcatctaaaaaggtattagttttggtattttatttgtcttttcgattatcattttatattttaaaatctaataaaaaattacaacaaatttattttctaataaaaaatcttagataggagca

SEQ ID NO: 405583 - DNA, 1207 bp, Cannabis indica
acaaattaaagaatgagaatatttaacgaaaagttaaaacttaggaagttcgaaatttttgcgagttagggcaaaaaatttcatgaagcttagaataagcaagatgaaagacagacattatgcagttcaaaaaacaagcattgcgaacgatgaaattgcatgaatcgtaacaaaggaaaatcgtagagtttataaacttagggtttcctacgtatcttctacagtaaagtcgaaggtgcattcataaagtaaatgtgcaaagcaaacataaaagaaatcgagaacttactcaaggatcgaatgtctggatttagggtacgccaagccaaacgagcagtttttatgaaagcacttcaacaaacttgaagccaaaaaactctctttttcgctcaaaacttacttaacaaggaaggttggtgaaaaagagtttgtggacaaatactcactagtatttataggcaaacaatgaaaaggggtaatcatttcaaaagaacctcagacgcctcggttcccccctaaaatcgaatatgggaaatcaaaagcaatcaagtgtagccgtcaaccgtggtgagagaaaataagatttcaaaatattaattatgtcagagcatttgttagctgaaaactgaagggacgcccagtcagcctcacatcgagtcgcgaacagacgcgcctgacacgtgtcacccattcaaatgcaaagacagctcagatgaagtctacacgcaacttcaaaagtcctgtacagacttaaggggcaaatgttatcccattttttgcactctaacgtgggatcacacgatggtgacacgtggaatcaacttcaagtatctgcccgcaagatatagtccgaacaggatacctcatgtgcatgctcgaggcaaagcaatcagcaatccgcacagagtgacaaacacttagcgaattcagctttcgcatcatgagtcatcaaagaaatccatataacttggggatcagattacagagatatggcaagctgtccaaatcccacgatcagtgtattttgtatttaatatgcaatctttttgcatatatcaattgtaacgagaagggaaatacttcctctccaagctcatagccctataaatagtgatgtacgtgttgggttttatgccctaaataaaactccatttcaatgtaatccctattattttaaatatcaataaagaaacagaagtatttatca

SEQ ID NO: 405584 - DNA, 683 bp, Cannabis indica
gtagtggtagtgagtagcggtacgtagagttgaaagagtataggaaagaaagagagagaaagtgatggagggcacatgcacaggaaggaggagccgaaatcagcgttcgtgtcgtgatatttacatgtgcgccatttttcattgacacgaactccaatgaccaacaaaaacgaactcaagaaagtcttttttttttattgcaaagaactgaagaaagtcgataagcacaaaatttatttatttttttattttatttagaaaaagataattgaaacgagaaatttttcttttctttgagaaattagtttttttgttctgatttaagattttttttagaaaggttctgattgaagttacagttttttttttttgcagagtgatttacgttacagtttacttttctatttgttgagtaaattagaattaaataaataattacacaaaatgaaaatgtgacttggaatttggttgaccaatagaattttatttattgttgataactaccaagtgtaaacaaatagtaaaaatgacaacggtgtttatagaggtttggcctttttatttagcatataatcagggccggccctgaaaatatatgggcccaagacgaattaaattttggggccctcgaaaatatataaaaaataatcaaaagaagagtgttatgggattagaacccatga

SEQ ID NO: 405585 - DNA, 560 bp, Cannabis indica
ggtgcatagaggtcaatctttgattggcgaggattgagagtgggtggaaacacccaaaataacaattcgagaagtgaaactaatcacttcgggcatctaaatccaccaaattctagcaattggtgtgatctacccctaattaacacacagctagcaccagtcgatcgtggaatcacaagcggcctaaccctgcccaatgcaggtctggacagccaaggaggcatcacgggcagccagaccctgccctttgcagatctggccagccatgaaggagtactgggcagccaaaccctacccaatacaggtctggtcggccaagcacagtaactgggtgtaagcctggctggcctaggccaactcccatacttgggaatggttggccaaggtctgcagggcctgcctggtcttcaacatacattctcccagggtatggccagccagcccttatctcttcgaaatctgcagcctccccaaggagggccagacaaccaggtccccacgccaataaatccttctgtgcaagcacagttggaccaactcaaggacatgatccagggcat

SEQ ID NO: 405586 - DNA, 1282 bp, Cannabis indica
acatgattctaaaatttttataaagtattttttctttttgaaaatttaatttaggaattattgatcagtaatttttttgaacagacccaattttaattttttttgtcctaaggtcatcaaattgcttgggccgacccttgttcttggtagagctcgaaattcagctcctgctgcaacattgaaaattaactgttcaaacaaatagaccacttgatattcatcttcatacacattgttcatcgttccaacaaaagtaaatgaaattaaaaattcaacaaagactaaagcaaacacaccacttaatatccattttcgtcaaactcaccaacgaaaaaattcttcaatatcaaaccatggcacaaaatttccattaaaaaaacaagaaccaaattaaaaaaaaaaaacaaggaaatattaaattaaaccaatccgtctcacgcgattcagtttctctacaatctctccccttgctttggtgtgagcttctcagcttggaggttttgaatgtgaaggaccacggaggggtgttctgcctagaatgacagtggcgacacgaggctccacggagggttgaatgcggagatgcgaagaaggcaactagaaaaaagggaggaatctagtgagaggaaactggggttatagagttaagggattgggaatcaccgctttgaggtccattaggaccaacagtggccataaaaagctccaccgaccaaatttactaaggtgccacatcccaaccccagttctaaaaatattagcattaatgtgttgaatttagcacctaattttttgattgttctataatatcattctaattgaattcccacttgttccaaaataagatatatatatatacatatatataagttacatttttattgtatgttaggatttataaacactcatacaaatatatatatcacagatctaaacatattcctaaaagtgctttaatatagaaaatcctaaatcacaaatctatagaacctttgctaaattaaagaagaagaagatgataaaagatgagcggaagcactaacctgaagtcattattagagattgtagagaaagttttgatcttcaaagaatacactattttcttaggtattttctctgatggggaatgagagaatacagaaacactagtatttcttggagaccacaacctatttatagactcatcttaaagtgagtattggatatttaaaatttgacccctcgacaaattataaattaacttatggcatctacacattattttcatgacaatttaataccc

SEQ ID NO: 405587 - DNA, 874 bp, Cannabis indica
ttatttagaaaatgtatacatttatctaaaaatgcccttaaaaaaatatttatatattaaaaattaagcggtaatatacaagtggttactaattcaaaggataatgtgggagacatccaattttgagtaaatcttttgaataatggttttgataatttaataatgtgggacactatctaattagtgtggttccattaacattaactcacacatttatgatatgaagtctattgatttgctctgcaatttgacttgattatatttaccccttttattttcatagattttctttttttgtcttgtattttctatttgtttttcaaataatgtattccacactgtttaaacaaaaaagtaataataatgtatcccaaaatatttttattaggccttagtactaaaattttttgaagttaaagaattcgacaaattatctcttatggcatgtttactaatcaggattgggagtgataggtatggtaatcactccttttcatttgtttactttatttaatggttggaatactctaagggaaagacatcaaattaggagaaaagaatgggagaagttctcctcccaatttcttcaggtataaattgttacgggtaatgctattttttagttttttgtttatcttttattattaaaaataaaaagacaaatttgccaccaaatattatataccctattatatatgaattcgcaaaccaatttattcacagaaataagcagtaagattaatggcctaactccaatgtagtgtattcaagcaaccaatatattggctaaagaacttccattgatgcgagtattttacacaatatcagatgagatgaaactgttatatatcctgaatatgttgcaaaatgatgc

SEQ ID NO: 405588 - DNA, 591 bp, Cannabis indica
ttggatatggagacccattagtacctattaaaattaacaataataataataagaaaaaagtatgtaatttaatttcaaaatgaaataaaaaaataagatattaattttaatagaaataaatattctaacttattaaaaaaagtctttattcaatggtttttttatattactggtaaaagtaaaaaagaaaagtaaaggtaaaatattttttttttgttattattatttaatatgtgtacaattattaagtctccaataattgaccatgaataaattaatattacattttctttttttgaaaaatgtttcacttgtccttgggctggacatggtataaccatcacacgttttgtagtacttatcatcattatcattttctttgctagctgaattatgatggaccattaacatttatatatgagaaatgataagtcctggactctagtgacacaagtactataatgtgttatattgttgtaattcagtgagttttatatatatttaaaataagtaattattataaaagggctaatcattttaaggtgctattataattatgggatttttttaagaatatactaaattaagtaa

SEQ ID NO: 405589 - DNA, 706 bp, Cannabis indica
cgtactcgtcatcatcatctgtgtcaaaagagtactcgacggccttagcctccgtacgtcttccctagctcaattcagccaagtattgttgcgtctagcgagatcatttccttgccatcactaatttttagagatctgggttttgaagattgtttttttatgagatggcaccatatcaaatgttcgtctaatactagaaactataatttgtttataggttttgattaataagtttactggaaacaaaaagaaagaagtatctgaataaatggttagagataatattattaagttatcattgaatattttaagtgttaggatctatagaagaagatggggagtgagctggatttgtagttcatgtgaaagaagatggtaaataaaagagaactggtttttttttctttttaaattctagtattaatcaatttttattttacaaatcattataaattagttttgttttgaaattattattttgactaatacaatagtgacacatggcatccaaatgaaaaattaacagagctgtgaagtgggtaccaacaaagcagttcgttttgaagatttaggtatttatactgctattttttgaatttgagtatttattagcaacaaatcaaacaatttgagtatttatgccacaaattttccaataataaactattatttatataaaataaaataataaaataaaaataaaaca

SEQ ID NO: 405590 - DNA, 566 bp, Cannabis indica
gctgcaccaaaaacagtagacaaactatcatttataaggttatttttcattcaatttactcttcactcttaaatgtatatgttcatccaatgttattcatcgttttttttaataaatattttcatgaatttatcaattattttctattgaaacatttttttgttgtgtagtatatataactatatatatattcattattcatgagtcttccttttcaatacaagttttatgtatatataaatcatatttagttgtttttttttgcataattacttaaaccatcaggagaccaaagtgatgtgtttcctctattttgaggtaaaaatttatatattcttcacattttattttatgtatcacttaaaattctataaatattctgttaattttaaatacagtttccacaatacgtcacgatcgatttatggatatgtatgtatatatttttactattttttttcccttacaagactcttaaatttaataataggaccattatttacgaaaaatattatttttatttatttatatatctaaaagtacatagaatcatatatatatatata

SEQ ID NO: 405591 - DNA, 864 bp, Cannabis indica
tcaattacttctaattacacagttacagtgtaattacatggtcagacaaacatgccaaattgtgtaattacctctaattacacacaaattcaattacactgtggctttccaaacgcaccctaaatataattgaattggatcggtttttaattgaattttgagattgacatccaataactgatccaatccaattagaatccaacttttagcatctaatccaatccagttataattggatatctaatttttcataattgaattcgattagatcgattcggttcaattggattggattggatgttgtccaccccttgttagtattactcaaacaatctttggaagtatagatattttgggaggtgacttaaatattagaacttgaatctatacaatttaaaaataatttaattattttgaaaactttaaaatatgagcctcacatcaaatatttggttaatttataattttatttttttttaaaaaaaatatttttagaattataaaaaaatgaatctttatcactgtcgattgaatggtaggacaataagagtcactgcctcgggccccaacccaaagaggcccaattatttatttatttatttttatataaaaaaaactatgaaagctcacacatttttaggccaaatttttaatgaattgtattgaaatttagagtttcaaaaggctcaacccaaatgtatctttaaaaaaatagtctaatttagtatttttttttattttgataaatattcatagttgcctattgtatatataattaattgtacaaaatatattttttaaggctccaaaattttgtcttaaacccccttaaagcttgaaacgatcgtgtttcaaatctttact

SEQ ID NO: 405592 - DNA, 602 bp, Cannabis indica
attcattcgatcatcaaattatcaattacgaaagactaggaatggaattttgtctttttcttgagattatgaaattattattattgcaagtcaacttttttgaaactataataaatctgttaatgtttttgttatatatgatttcgaacatttttaataaaaactcaaaaaacaaaaattaaaataatttgtatgaagtaaaaaaaaaaccttacttctatcgacttttttctgtttaagtcatgtattgtcaattctgaaccctatattttacattatttttttacttatatcacaactgttatgctactacaataaaactaaaatgcaactaaatatcaaccagttgaataaattcatataactaaccatgttgtagaagttaatttgaagtgatttctcttttcgctatcaaatgaaatacctgcaaatttgataaacactattatgaaatgataatgcaactataaaacaacctaaaaaaatttgaaacattcttctatctatgtgtctgtagattcatttaatttttcttttcgttttttgattataaattaatatattcaatattaaaaatcttaaaatcaacgacaatgcaactg

SEQ ID NO: 405593 - DNA, 1049 bp, Cannabis indica
aaaaataaatatgctcttgatgggatttaaactcacgactccatcgtaaatgtcagataacttaaccattatctttaagattatcacttttaattaaaaatatatgttttgactaattaaaatacatatatatatttttttcttgattttttttttcggggagacaactgcccacctcgccttaatgtgggtctgcccttacctacatttacttggtatttttattcattgtaaattgtaattacgcgcattcaagaacaaataggtgtgatggacttagtttctcaagtacaaaccagataacaaataatatagatagtatataaaattatgaaaagtatgaaatgaggaagatataagtgttgtgtttataatgcttatatgttgtacaagaacaagataagtcatgggactttaactatgcttgcagttaacacatgttaaccctaattacgagtaaaatattggtttcaattgcccaaatgcatagttaattaggagtaacaacaagatcgatttaggggtggggcaataggggcccacaaccaaggccaaaaaatatttaacaaaaagaatttaaatttgtttttttaaaatactatttatatatttttattattatttattagaaaatatagctattttctaaaaaattacatactttattttttaaaataccatatttaatattttttaagaaaaaaattctcaattatattttataatactacattttaaattttaaccattatatatacgaaaaaataaaaaaaaatcaattaaatttgtttgcctaaagcccctaattaacttgagacagacatgagtaacaatcatacttaggaatcctttagagcaaattcaaatgtaataaaaaatcaattaaatttgtttgcctaaagcccctaacttgtttgcttgttgatatcatttgccatgtgtgcaaagtaactgatgaaaccatctattattgcttggtggattgctcttttgccaaagcgtgttggcaacaattgactgttggtgttaatttgacggcagttggttct

SEQ ID NO: 405594 - DNA, 579 bp, Cannabis indica
atgtcaccatttgtgggattcttacactcgattcttgtcaagggaaaccttctgaggctttctttttgacaagtgtccggagggggcctctttccaacggttagggaacccccattcccttttttgacttagggtttggtttagggcctgactgctggatttttttcaattttttttttcagaactaagatgtctgcatccggttctaaatcttcaaagaaggaagtgaaatgcttggtcaccctggaagaagttatgaagggctcggtggcccaagaagggcataagtcccgtgccaacgaatgggaagcacctgagcttcgctccactttgatctgccctcaccagctagaacacattgtcgtggtggcatgcatcaagcctacaacttctaggaccttccaccacaactacgggggcttcggagcctggagcaagacgcatttgatggccggggacatacttccccttcaagattactttattaatttccttgtatttgtcggccttgcgtccataccaacttattccccaagcttaccgcttgctttcaggcttatttattttttactctaccca

SEQ ID NO: 405595 - DNA, 964 bp, Cannabis indica
tataataaaacctctaacaactttatcatggtactagacactataagtacctcataataatactccaaaaaaacataaccgacattacactgataatctttttatatataatcctttcatgcgagttcgtgttctcctggacactactaagcccctccaccgtggaatgaatgtccgatttaggaaactctcccttaccaaatggctcaaatttctttatgaaggtattcagaactattgctatcattgtggaaaacttgaccacactttcaacaagtgtgacaagtttcttcatcattgtgaccatcacccttttccccctagtttaagctataaggatgtccttagagcccctgccaaatccatttataagaagagtattttcgaattgtccaactccattccctttgaggaacaaccatcccttaccaaccttgaacaccataactctcaggaccaaacaaatagttttcttgtgaccaccgtccccaccaccttcccaactactgttgcatcctctaccttcatccatcgcactactgatcccacccccaacactacctatcccaaccagcctcaaacggttaaccccaccctccactgtactctaccaacacaccccatcatgactaccaccacccccccaaccatttccaaaggcaaagcacctatgtacccacaaccatccctggtttcactgaacagtctgcctctctccagtctcaacatcaatgattcccctgctgccccatcctccaccaggaaacgatcttttgctcgacagacctgtcaagttggctcctcggtccgtagtatgctgaaacgggcccgagcctctcatgccgatttcgctgtggttccatccatgtctgacaacgaggaaacggcgggtgttgctcagcaccccgccgagaaaaatgaattttatcagttggaatgctcgtggattagggagttcccgagt

SEQ ID NO: 405596 - DNA, 492 bp, Cannabis indica
tgctcatgctttttggtgccccagaaactttttaaaagtggatctctcagtgtatctcaaccactactctgaatgtctacttgaacagaggtcaggttggtaagttagtcccgtcttgtggtattttttcagggagactcgctatccccttacctctttatctgggccatggaaatattatcaagactttttgagggggccttgaggaagggtaggataaaagggatcaagctgagtcaggcggaccggttctttcccacattttctttgctgatgatctcattctggtggggacagccaacattgaggaagccaaagccttctggctccgtttggaaagttttgttcttggttcagtcaacaagtaaaacaaggtcaaaacctaaatttttttcaataagaacacgactaatgaggtcaaaaggggaattagagaggccattggaattagtgttctgaaaagtaatgtgatgtacctgttgggttttatgc

SEQ ID NO: 405597 - DNA, 732 bp, Cannabis indica
cacaataagccctactattaacggaatatcccaaaaaatatatatttataacttcttgcatcaaattttcctgtgtaatcacgatctctcaaaatataacaaacacaaccaaatacatgaaaatgacttacatttggtttcttacctttttcagatttcatatggtgtcttgtgaaaacctggacgtaagaacactctgttgatagtatagcaagcagaattgatttcttcggcccaaagatgccttgtaatcttcttgttatttaacattactctagccattcttgttagagttcgattctttctttcaaccactttattttgttcaagagttttagcagcaaaaaattcacgagaaataccattagatttatgaaactcatcatatacactattttcaaattctttttcatgatcactcctaatgcaaacaatagtaccaatgttgcaatcttttccaggttttaattttaaatacaaagatttaaaagcctcaaagtatcagatatttctcttaaaaagtctacacatgaaaacgagaaaatcatcacatacaaaagtatattattagggtttaggatttaggttatataaattatttttgaaaaaattccaatataataataataacaacaataacgtggaaatatatgtagtgcttttttaaataaaataattacttaatgcttgatattttatagaaaatttattaaaataatagtaaaatattaa

SEQ ID NO: 405598 - DNA, 777 bp, Cannabis indica
atgtagatgctgacctgtcagttaacgacgaagtacctacggaagttccgcactagtgacggaagatattcttacagccaaaaatacgacttaggtatttatctgctactcagcataaaactaaagtatttatgccgcaaattactctttccaattcaatcttataaatgccaaaactatttatttaatacttataatttattatcaaataaaatttccatttatattatttattaattagaccatacaaagtctcttaattaataaatagaccccaaaacctcttttcttcacaattaagtccttgcttaataaaaattataattgattaattaaaatcaattcactaagtctgcaagtagtattatctcaactagtgatagggaccatgggcttatatatagctgagcttccaataagtagatctagaatttaccaagtaaattttctaacttattaatttcgccttgcatcccactgtagatttagaattgaataacactctcaattacataaaatgctttatatataccaagatataaatacgttatgattatctattgttacaatcctaatagtcaaagatcccctgaataagatctacatcgaaaagggacaaatttactgtttttacccttcaatgtattttatcatttaaacacttagctacctataaatgatacttcagtaaactaatataattaatgaaatgagacctcaatcatttatctctatcaagccaagctcgaagaagatcattgtaacgtccccgcttca

SEQ ID NO: 405599 - DNA, 602 bp, Cannabis indica
aaattatgtttggttatgttgaattgagcttgttttagtggttgttgattagtttaaccaagttttgagttttagaactcaaacttggagctttaatggcaagtcttgattttgagcttgttgaagtgttttgttgttttgaatatgttctatgtgatctaaatagcaggtcttgaagttattatggtgtttggggttaaactgagattgtgggggaatttttggtgattcctgctctgaaccgaaattccagtttagggggacctgtaggaaccagaattcctgttggtccccaggaaaccccacagaactggaattctggttgggaaccggtctaccagttgggccagtttggggaaccctagttgttcctatttttgtgttgtttgggtattgccatgctattcatcaatagggaaacttttaatttcaagtttaagtccccgaaaagtgatttagcgtgtcacttatctatgttatgattgatgtgatttaggagcctataattcgtcgagctgttgttccactcaggttggccggcacacctgaatttggaatcaaggtaagattagtataatgttatgcatatgttattacatgtt

SEQ ID NO: 405600 - DNA, 693 bp, Cannabis indica
aaatactaaaattaatatttatataaatctaaataacaagactactaaaataaactaaaaatacttgagaacaaagctaatttaatggataaaaagagctaaataactctattttcatagagttatcaagaaccttctaggactaatctgagaactctatgatgtaactagacctaagtcatcaaaagaccataaccacaactataatatatctatgacatttgcatcttgttcatagttattttgacaagatcattctctacaaagagtcaatatgccaatatccacttgaaagtaggatcatctatattcaaaaatatggatgtacatttaggggtggatatgagttaccattaaattttttagacaatcactctagattttaccttgtgcaaagaaatttgaaatgtttaagaaatttcatgaatttctagtaatgttgaaaaatattaaggtaagtggttaaagatcttgcaaactgataggggtggagaaatatttggatatgcagttcaaagatcattaagttgattttttgaattgtattcaaacttacctcctcagaaatttgatttgcatattgatgaaagtaaaggtcgtgattagttattagcagttgcctaaatccttctagggatttaccctagtgataggaaaatgtcagaatgatagaatgattgtgtacttagtgta

SEQ ID NO: 405601 - DNA, 800 bp, Cannabis indica
tctgctcgtaggtctcagtttcaaaggcgtcgaggtcaatgggcttggacaacatatttttttatgggcagtggttttcttttgccttttggaaggcaacacctcggcatttgtaggaacccctgggttggttccccttttcttccctttccggtccataatatcttcaaaacccatgtttgcaagacaaaataaagtgttatagttattagaaaggcaggtgaaaaaaggaaggggggggggtataattttccatctaaggaatttaccaaagccactagaaggcgagttatcactagaagagggggtagaaggaccgtaatacccactaaaatcactacagcctattatcttaaatatatcaaaggactcaatttgttctaaatcccagctcatggtgccatattgctcggctataccataatatgactcgtgaaagttaatctggacgtggaatctagggtaccagctatcaaacctttgagcaacttggtctacggaagggaattccaaatataaaaattaaggcgggtatctcgaaaggtgactaatgtgttatgtttggccctaagtactgtgggagaccaacaacgttgattaccttaggatgctccttcactggcttcctgaggggcaatgctttgaaggtattgtgcttgagccacgcgatcccaggccttatcatcctttggaatgagaaactactgccaagaagaatacttgggaaacttgtgttgggttttgtgccctaaataaatccatttcaatataatcaaatttactaattaataaagattaga

SEQ ID NO: 405602 - DNA, 502 bp, Cannabis indica
tatatatataggacactcctatagtagagatgcctcttttgtctctatgatagggacactttattagacattgattaatgatctaatggtgagaagaatgtaaggagtatgatagtgaatatggactttactatatggttacatatctccttaaattttaataatattttaatacttattcttttctttaatttttttttactttagtcaaattttttttcctaaatttttttctttttcctttttcattaaaaaataattagtaaatttatttttatttcaaatagttagttgattttttttttcttttaaaataaaaatgttttcatgatagtttaaaaaaagataagttgatctaataaaaattagtgtacccctctcagtagaccccttatttcggcatccaaaaatatttttgatttttcaatagaccacttgtaaattttcaaaaaattataaatagtttacaatgttaaaaataaggttcaaatattttattgca

SEQ ID NO: 405603 - DNA, 792 bp, Cannabis indica
aacataaaaataaaaataaagaacataaaaaaacaagcataaaaaaacattaaaactaaaataataaaatgacacacctcaacaacccttttcccaattatgtcttcaaacagatcagttgattgaacaatcttcacttggtatttaccctttccctaaaactaacaaaataaaaccaaaacaacaacaagacacagagtcaaacaaacagaaaactataaaataggactaacaaaaaaaaacatgcagaaaaaaaaaaagaaataggaaacataatcaacttgaaaaaaaaccctaaaacaacacaagatcaatacgaaaataccttatcagatttgggagactttacaaactctggctccaactcaaaatcagagtcggagttctccaccacaggtcgagggcgttttgctcgagtgttcttcgaagttccagcacctagtttccttttagcagcaactagacaagtagggctaggaggattatctttcaaattcttcttacccattgttgcttgaaatttatttttttggggttgttttgggggctagttagcaacaagggaggatgatgattgggtaacagtcattgtgaataaggggaagtaatatttatagaagaataagaatgaaaatgtgggggaaaatgaagagggaaataatatgaagatggaataactgaaattttttgacacaaactgtataaacgcttgaaataaatggatattagaagaagatgaatagaaaccatgggagagtggaattttagtaatgattatttaacatttaaaaa

SEQ ID NO: 405604 - DNA, 1470 bp, Cannabis indica
gaaaatagataaaatctaattttttacttaattggttaccttattttttaaaattttgattattttatcttatttttaaatataagttcaaatattttatattttatattattttaattaattttataaaatgaccttattaatattttaaaagaagatatattttaatctaaaaaaattttaaaaatcttaaaccagatttttttgtcaaacttttcaaattttttgatattttatttaaactaaattataaaattagataaatgatatttatttatcattttattttattaattagacattcaattttatttcttttaaaaataacataaattttgaaaagtttgttggcatttttgaatagatatttaggtttgttaaaaatctaatttttcaaatttataggtttaattttaaattgattatttaatttaaattaattaattttcgaaaataatactttattatttagatttttcgaaaagaatttaattatataattaatttaatttaagtaaatcctatattcgactatccagtttgttacatgtgtgtgttttatatattgtttattattcaaactttatttttttttataaaacttattattatttgatctaaattgctatggttaacttgttgacagatccaatgatttgattttaaccaatttttcaattgtcaataggttaaataaataatttgtaacaggtaaattttgtaatcttctttcatctgtgtataaacctagtaacatgataggatctatacaaatcagtgtgtgcctatggctatatgtttgctttgggcttaggtgcatataggaagcccatttaattttgataattaaaatggactaggttgctaaaataatattatcacacatgatagattttatttaggtccaattagtattgggcatattcaatgaataacagttgtttaattaaggttaaattcctctcctttgggccttgtgtgggagttagggggccattagtagtaggtacgacatactgaacccagccctccctcacatgaacaactccaactgtgaaggcccatttgtcttatttaaataattataataggttaattacactagtttaacataataaaattgattagcaacataattaattttgaaatacatgattttttttatcagactattttgaaattaatttaagaaaaacacacttagtttaatgtaacatattaacgataaactagatgtatttttctatatttaattaaatagaagaagttataactaattagatatttctagatacttaattatttgaaatttcatagaatatttatatatttaagttgaaattttttttttcaaattgatttttgatcaacttaaattggaatattttaaaattaatatctaagtagaattttctaggaaattagttatttagatattctttaaaaatatttttaagttgaaaatttgtt

SEQ ID NO: 405605 - DNA, 534 bp, Cannabis indica
ataactatctaattatcaacattaattacacataccaactcattaattaagaagtaaagaaaatgtaactattatcacactttctctttctctcggctctgccattctataatatcttattctatctatttcatttcttctaatttatcagctatattaatttcctttatctttcttgatctatagtataggccatagtgtacccacatctttattaatttcctcagtctatgtataaagtgtacatacaaaaaatgtgtaggaatatttatataaaaatatagatattagcattgggcacaaattgcttaagcacctctatgacattatatttgatgggacacgattttgttcttattttcacggaatgtattccgtgatgtacaacagccgttagttgggggagttatttgatctgagggctttggttgctctaggggtaattagggttaaaaaatggtaacgaaccctgagacccatctaatgtaccacaaaatacattccgtgaaagtacatcacgggacaaaatcgtat

SEQ ID NO: 405606 - DNA, 840 bp, Cannabis indica
gatcatttggcatcctgccttcaggtatcccctagtttctccaggttgtcttttctgagcgttttggggattcctttgggctgcctcctgccccctggttcgggagtctcaaagtctgcctcacaattctctctctccagagttaggttgattttaggtgttattcccttgtgctgccctggctgcagttgcctcatgctctaactcagcattatgccaatttgcctcctccaatcgacgcctgagatggcgattttctaattcgatgattggtatgtactttgttggattataggcaccatcctcatcaactaaattaggaaaaatctgccactgttcattctaggcccttcaagtctggtccccagattctgggttttcctcaaacttgtggttgttcaaatgataaattgaaagatccctggggactcattggctcttttccaggacgatgagtggtttcttcatgaggattattttctttgtgagttcccaatacctcaatcgagatgaatcacccgagggactctcgcttcacctctgaagtagtcattgacagcttccagaaatgcttccaccgtcttcacatggtcacttccttgaccctggagcttgttttgttggtaaatggtcgaagcaagcttgataatcctctttcaagcctcatctaacaagtcagcacatttgtttttttgaagcattcactgagttaagaacgctctgcaatatgacacaattgcagcaaggttccatcacctaagactggtatctcctggaccgagaggaagatggaggagatttcttacaaattgatgaaggagtccctaagttcattggaca

SEQ ID NO: 405607 - DNA, 510 bp, Cannabis indica
atttacagccatatactcaaatcttcttaatgttgctattttatacctaaatttcgtttttttttttattttgcgataataatacaaaaaaattaatatttttattagtatttttaatatctaaaaaaattttagcagagtaataatacaaaaggtttaaaactttttttttttcgcaattgggtacaatttttaatgttaaacgatgacatgataatattgacttatcataaaagaatatttaaatataaactaacactatgtttggtggaggggagagaaggagggagggagaggggtggagagagaggaatagagggtttggagaatccttttgtttggcaagagggagaggagagatagaatgagagagtctctctccaagtacactatttttaatccctcctaacagagaggaattctagaaaaagacaaaaaaaattatataaaatatcttttctacccttgaaaaaataatatataattgtattaaaaagggtaaataccatt

SEQ ID NO: 405608 - DNA, 570 bp, Cannabis indica
ttttaaattaaagaagaagagattaaatttttttacgtggttcgagtgttaataaattctagtctacgaatcaatgttattgaactaaaatagttttgaagtattccttacaaatatttttaccctaattgaagaaccttaattcccagttcttttctcaaaaatttaatttttaacattttgcgtaatgttttgttcttaggagagaatcgagtatgagcatatctaaatcctgtaggattttttggtatcaactaggccctctgacagggtaaaatacaacagtaaatgactttgggccaattgagtgaggcccaattcaccaagtgagtacaagcatagaccgtttgagaatgctaggtgtcgtgtgcagccacgtccatactgagaatgtcaaagaatatgacgttaggaaaaaattgtgatcttcttttggtagtgcactctaggggtgtacgtcggtcggtttacattttattcaatttaatgtaaagatcgggttacaaaaatttaagtgcaacccgtccaattaagaaaaaagaaataataatccgcccaatgaaattagtc

SEQ ID NO: 405609 - DNA, 738 bp, Cannabis indica
atcagatacctgaaccccgcagtcgcccagttcttgtggcgaatgtccctggtaaccctaagggagtgcaagtaccccgaagtgatatcgaaccccgttttcggcgcaaggactgtccctatgaccaccaaagaaaatttaatcagaaataggctgtctggctcaacgcactccaatcaagatttctccaagcctatcaacgacaaggtgtagtcgacaacgttcaatatctcctctagatatcgagtgtcactatcaccctcggtgactacaggatcccctccgtcctccacccccataacatctccgaacatcgcggtagataagtgaattttccttccatacaaatccagtatgctagtggttgggtcaacatgtttgattaaccaactcactagtcgggtgtcaatgtatggtgcatcctctctgatgaatgatccaaatccagcattttggatgacatctttctgctccaggttcaggttcttgcaaatcctgattaaacggttgaaggagcatcgaccgtacacagatgcttcttcactttcagcagcaacctcttcctcatccacctccactttcttccccttaccatcaactgcctttggtttcctcccacttgtttgcactaccttcttagcgggagtagggttagggtcatagtttctccactcagacttgaaacctttatattgcacttttaatttgtcagtaacctgaaatatgaggcaaacttac

SEQ ID NO: 405610 - DNA, 603 bp, Cannabis indica
ataatgacttgacatttaacgactaggaacctataaagttccaaaaatataacttaagtattattaacgccaaaaattaaacttaggtatttatttacaacagagagttaaacttaaatatttatgaagcaaattacaatttatctgattatccttaaaaaatgagatttttacaaaaatactagattttgggcaaaagtttacaattttactatcacacgaatttttttataaaaatactgtctttttataaaacaaccgtaaaataacaaaatagaataattaaataaaaataacccttgaacaaccgtgaaaacttaacatagtatacaatataaaacttacacaatatttttgaaaaaaattctgccacacaagtaaaaaagtaaaaaagtgagaaatttaattgaggaatacatttttttgtatccattaatcaaaaatacttttatattttattttattaaaatctactcacttttacgagtgagttgactaatatatccttaccatctatttaaatgtagcacatgatttacattaatttaaggggtataatagaaatattatctataaagtaggtatatcttaaaaaatatgaaa

SEQ ID NO: 405611 - DNA, 849 bp, Cannabis indica
tggtctcacgccgtatgaattaattcctcaagcatagtacctgctttcaggcttatttatcttgtacactgcccagagctggggttcgcccagtccggctgagattttatacttttacgaacttgtttccgtccctaaaaagggggacaaatttaaagatggtttttatggacttcggtcccatcctttgaatgagggcccggtcccttataattatcagaagcatgtgaaggagtaccgccaccgcttcttcttttcctccggcttccaagccatggactgtccggagcttcttacggagtgggtcagaatccctccctatctgcgaactgggcctactcagttgttcatccaacgggccaacactttctctacttatgacatgaaggccctcaacgttggggacttggtcacgatggagaatttttggaagcccaagctgatatctgagaatcagtcggtggatgacttttgttagtgtcattattttgtgacagttttgttctgttcaatgtctagtcgtgtctggtgtttttattctgttatatctgcactagcgttctgttaagtcagtttctgttaagtgttagttagtgccaaatggactagtttgtggatatataaatagtcggtttcagttagtaaaaagtttatccattaaatcgtatagtttgttaattcagttgttcgtggagatagtgttgtatcttgcttcttgttgttgtgtctacaggtcagatcgtatagcttgaagatggtcatcaatggcggaatgatctgagcctggagttgctgagttctatctgaaaggagttcagtgtcatcttcatcatcagatctgaagggatt

SEQ ID NO: 405612 - DNA, 1185 bp, Cannabis indica
gattaatgtcattaattgattctaccattttaattctttagtttttattttatttaattcctaatatatattaattcaccacaatattcgagtctttaacacattagttgttgatcttgaagttgtgagtatcaagattgaagaatactcttgaggacaaagctcttgactgtataatcacttgtacataagtttttctctactctaatgaagatcaccataatcggttgcttggttggagtacagtaagttcacactcaaattatctctcaatctggataaatttacgtgtctcatattgatatgctttctggttttacattgattattgattgatttgttttctacttagtttgatatgtgtttgttaactgttcacttagattcttgatctagttttaatgtatcttaaattagattttcaaatacatatccaatgtaaccaccacttaaatgttatagcaaatataaatatttttactttttagtattattattgtttttcttggttaatttattttagaattaatacaccatttattattagggaaatttcattatttgcccttaataatataacccatatcaaaatttatactcttttataatttgtacaaattgattcctctaattttaaaagattcctaaaatacccctatattaaactttccctctctctcgcttcccctctctctcagacgttccctctctctctctgtcctcctctcttcacgcaatcctcacgagtcgaaccagtcgaccctccctcttcaccaaccttcgccaccaccaatctccagccgacctcactcctaacccacgaacccacgaaccggcctcaccccacgaacccacgaacccacgaaccgacgaacccacgaaaccaaaggcgaccgacgacgacgaagaggacgaagagaaccatgttgatccacgacgacccacggcgacccacgaccacgaccacgaaccactaatccaatccaatccaacggtaagtttttttctttttaaaatttagaaatttcatagattttggatgcgaatttgtgtatgttcttcagataacattgttttagattgtatatgcgaatctggatgtcaattattgcatgttgtatatgttggatatgtttcaatggtgtttgtgtgtttttacagggttatcgatgaaatgtcgatagg

SEQ ID NO: 405613 - DNA, 1158 bp, Cannabis indica
ttgacattttatattggatttttcatacatattgacagtaataataatatttattatctcatatttcacaaactatatctatttaatttaataaaaaagattaataaaataattcatatatatatatatctatttatgaatttgtaagtaaagagaaatatatataaatattggtgtaggtgggtatatataacacataaaataatatatttataattatttgtaatgataataattgttatattttaatagttaaatacctattataatatatattcatgtatgtacatatcaattatacatagtgttgcccctgatttttgcccaaaatacgtggaccaaccggatgatgacacgtagatggaaagggtttagcgtttgaataaatcagctaagtctccttaagcgcaggattaaccttagacatgcctcccggagaaggcatgtaagtctcacatgctcccggagagcaaggctacaacaaagcatctccgggaggtgtcagatcctatctgaacagtcacctcgcatttaatgccgcatgggaggaggcgtattggaactgccatatgtcttaaagtctgacggcacaaccccctctctgcagctactatgctatgattaatgagcctagtgacggctactttatgaggactcacatcagtcaaaaaggataaaggactacatccataaaacccctacaaagcctagggattagaccatgcattacctatgatatattcattgggaatgtgtggctttactgatagttacagaaatacatgtaccttaattctagggatcaccccacaaaaacactataaataccccccaaactcattaaagaggggtcgagaattctgggtttcataagaactagaagaggaaaaatccaccaagaacattctctgtaataaatactatcataaatacacagactcgtggactaaggctcattaacgccccaaccacgtaaaaatctctctcttaattccttatagctctcttaattattattattatattggttgccgaaaacctcggtcaacattttggtgctttcattgagagctgaaggaagcgtctgaaagtagacactacattacaacaaaacaaaaatggtggagactcgaagcacacgtcaacctcgtcctcttc

SEQ ID NO: 405614 - DNA, 685 bp, Cannabis indica
tatggtagaactatgtatgcaaacaaattggtgacgaaagtacttaagtaataaattttgttataattaactattagtatataaaaaaaattgataacagagttcgtaagtaaaatattttttaaaaataaatacctatataaaaataattcaaattaactttataaaaaaataataataattcaaaataaaaattaataatttttttaattattaatattattttttaaaaaaatattaaatactattataatatgtataaaattttaattgtatacacgtagtcctatcgtaagagtatacatcttacgttataataaccacatgatctaaaatcaacggtcaaaaaatatttcctaccagtagagaacttttgctaggtcctacatagtcttgccttacacacatatctatatcttacaacacttttgtcctttctttattttaaaatattaattttaaaaataaaataaaattttatttatctttttttgatatctctataaaaagattgggctttttcatttttacacttcaaaaactttagttttttttttttttttttttttttttagtttccatttttacggtaattctactatagaatctcctattgcaactagcgctgcaacctaaattacaacaaaaaatcgtatagaaaatcctattgcaactagcgctgcaa

SEQ ID NO: 405615 - DNA, 883 bp, Cannabis indica
cttatttttgacagcaatcaagttgccggagaacagatacatcagcactgacattagaatgggacaatgtctaattttacaatcatccacatgttctagaaaagttaagccgagatcgactctgaaattggccaacggcaattgatggaagaatctgatatctcgaaactcccttacctccagtgtgtaattctgagactttcaggttatacccagtaggtccacttctcgtacctcattactcctccaatgattgtaacatttgcgggtatgatgtgccacgtgatacaattttattggttaacgtatgggctatacatagagatcctaaattatgggaagatgctgagaatttcaagccagaaaggtttgaaaacattaatattgagaatgaatttggatacaagctaatgccatttggagttggtagaagatcttgccctgggagaggcttagctagtagagtcataggtttggctttggggtcattgattcaatgctttgattgggagaaagttgaccataacaaaattgacatgactgaaggtaaaggtcttacaatgcctaaagttgtgtcattagaagccatttgtaaggctcgtcctattatgaattaccttatgtcacaatccaattaattgaggagtactacggtcaaacttttattacaacttaattaactttcatgcttgaaaatacatgttgaaatatttttttttcaaaaaaataaaattatatagtgtccgttatagttacaatatcttcgtaaattttataattttttgtaatagtttacagtaccaaagatagatttaaagttttttaacacacatactagtaaattagaatatcacgaactctatttttgataatgtaaactatt

SEQ ID NO: 405616 - DNA, 718 bp, Cannabis indica
tacccatagagtcctaaatgcaagaaacaccatctgcgtgagtgccagtccaaggcatgtttccagtgtgtcatggtgggccactttattagagattgtcctcaggctaagaaagaggagcctaagaagaatactacacagaacccagggtgactttttaccatgactcttgctgacgctgatgctagtccgtcagttgtgacaagtcagttgtctattaatggctgttcatatactgtgttgtttgatgcgagacctactcactcttatgtgtcaagtagagtttttaaaagtttcaataatccatgtgatatctatgctttggggtttggaaccctgttaccttcgagagaccttattatatccactaggtggattcagtctttgtccttctggattgacggttgtgaattgaccgctaatctaattgaattgcaactgtctaattttgacataatattgggaatggattttctatataagtaaggggcaatgattgactgtaaacagaagatgctagtcttttagtccgataatgctaacccaacggtattcgtgggtaaggttcaaggggcacgcataccaagaataacattgttgaaagctaaggacctgatgagcagaggttgtctgggattcatatgttgggttttgtgctttaaataaaaccctttacgatctgattagctatcaatataagaaatttgaagtgatttat

SEQ ID NO: 405617 - DNA, 652 bp, Cannabis indica
gcataaaacccaacaataataacatcatatagatgtgttatgacaaaactagttttgttttctacatttgtttgttctaaaaattatcttcaagtttgttacattaaaaaaatattgtcgaaaattgagtttagtgtcgtatttgtacttttttaaagaatacaaagtctttttttgttatttaacaaaacagaagtctaatcgttaacttttacaaaatgtatggtccaatatggttttggatatttttacaatgtaccccttaaaaggaatctatcgatgcactctctatctgttttagcatttgagagaattttttagttgaattctttttatggtcgtctacgttgtagttatttagacatcttgcaaaattttgagagatttagaaaaatttaatacgttgaaaatagggttcaaacagtctgttgcacatatctcttttattttatacgcgtgtgaaatatactgtttgaaccttattttcggtgtattaaatttttttgaattgcccaaaattaagggtgaaaatcggtcggttatggttggtttttacaattttataactgattggtcggttacggtttttattttacgaaaaccgtaactgaccgtttagaaattataaccgtataaaaccgaccgtacagtt

SEQ ID NO: 405618 - DNA, 560 bp, Cannabis indica
atttgatatggcccgatggggcctgatggcttgacaatgtagtgaaataaaagagagaagaagaaagagagggggtgatgtaaatggaggatattttagggatattataaaatgtgtcatattccacaaatatcaaatattatgagtttagggaaaaaatttaagcatatgtaagcataaacaatcaaatttccctttaaaaatataaagtaatacatttataaaatcctgggatcccgtttacaaaatacatttacaaaaatttactattcatatacaaaagatttgtcgcctagcgactaaacagcaaaagccctaatgtcccaaagatcgtacgctccaggcctaatcgtcccgacatgtacaatcttcacctgcttgttctcacaactcctcaacttagctttgcccttacctacacatagaaatagcactgtgagtcgacagactcagtaagaaaagcataaacaataacatagcaataactcagattatgatcggacgcccatacccccaatcataaccctatccccgtgacccacacggtgctgagtctagaa

SEQ ID NO: 405619 - DNA, 742 bp, Cannabis indica
gaggtggatgccattaccaagttaacaacccaagtagaggccctaagaaaactgatggctgttcaagcaaaacaagcttaagtggtctgtaagctatgtggaggtcctcatccctatgcagagtgccaggaagatgtaaataatttgccaatggatgaaacaaaagccattggaaattactctcaaaacaaaaacaacaaatatgggtttaatcaaggacggaatcgaaggaatagtgggttctatcaacagagaaatcagaaccagacacagaaccaacaacagactcaggggaattctggtgttcagacagatttattattgcaatttatgagagagactagatcttccattaaggacttacaaactcagatggggcaactggcaactcagatagcaactcgtcctcagggaaacttgcctagtacaaccgaagttaatcctcaagaaaactgcaaggcaattaccctgcgaagtggaaagaaatatgatgggcctgatatggtacaaccaatgatgaagaaattaaagatcaattgacaccaactccaacatcaacagagaagaaggctactgatagtcttgcaccacaacaacagtctccgccaatcattatagatcatcatttgaagatatcgtatccgcagagactttgaaagaccaatctcgacaagcagttctcaaaatttctaaaggtctttaaaagattacacatcaacattccttttgctgaagccttgga

SEQ ID NO: 405620 - DNA, 554 bp, Cannabis indica
tcatatataagaatatgagataccccggatcacttatcagtaattagttttgagatggaacccataattctcaacatagtatcagagtcatatcgtttgcgggctttcgattcacacatatccaaatggttagccaattgtatgagatccagatggtgcaaagacgtttgagatccgaacaaaataagatacaaatgatgcaaagatgcttaagatccatacaaaaataaagcgagcaaaatgacacatcctgtgataaagcgattcaagattagtgagtaaaaataactaccatcctgagggagaatattggagaatattatcccacatgagtcatatataacaacatgagctactctactcatcaccaattagtttgagatgaaactcatgattctcaacaattgtgccctataaaaatatgggtcgtgccgtgccacaatcccaacatagtctatacacacagacgtgattttttggaggaaattacactctataccttctttatattgaccttcttttatttttaccctcttttttaaaatctatcattt

SEQ ID NO: 405621 - DNA, 758 bp, Cannabis indica
tgatgataaatctcagcaagctgtttttttgcgtcacggtattcggaaaccgaggcactatcagaaaaattcttgagagcaccaattcttcttttccagctttgaatcctctccttaaagttacccgtcaaatcatttccccaagatttaagaggttcctgaacagccacaatcttgtcaacaatgttattagaaaggcagcctccccattgctcctgaataatagaaaaacaagtctcttcacggagccaagcattctcaaaacggaaagctttagtagaaccaatttgaaaccgaaaagaagggtcaagaagcaatggacaatgatcggaagtggtgaacatgagattgagtaaccgagaacttggaaataaatcaacccagtccgagttggcaagagctctatccaaccgaacctcaattaaattttccgaatccctacccttctcccaagtgaactgatgaccaaccaactccaaatccactaaatcacaatcagcaactgcttgttgaaaaccttcaagaagccaattcggatagggatttgcacctcgtttatccacttgactcaacacattattcaaatcaccaataatacaccatggaagagccgattcttctttcaaaattctcataaggttccatgtgtttcttctaagagcccggttcggttcaccataaacacccgtgaacctccaatcaaataaattattatgatgaacaatcaaatcaatgtgattctgagaaaaacctctaac

SEQ ID NO: 405622 - DNA, 1538 bp, Cannabis indica
tcgcctccacttcggcctccctctgcttggcctcctctcgaagctttgcctccactacggcctccgtccgttgagcctcctcctgaaatgcctgccttttggcagacaagtcccgaaggatcctcacggcctcgtctatgcccccgaatttggacatgacgaagtcgtggtcaattaaagtcttggaaaggcggccggtctcagaagtaatctgaaaaaagagacaagagtgagattagatgccttagaaaaaatatcaagggatggaataaattacagagtactcaccgcagccatggcagagctaatgtcttggacctggtagatagagttcagagaggcgcaagcagcatagcttttaggcaggaattgcgtcaggtgggggacgaactagctagtcatctctgaggcaaaaggaggcagagtgggcccgacgaagcggttgaaccagtctgtcagcagatccatgttcaggtcccatggattctggaaggcttcctcgtggagagtgttctgttgctcctcccgtaaaatcctcttcaaagccttcacctaagcatgcctccgactgtactcgtcgagggcgtagttgtgcttggccacgcagagattttgcctctcctcatctacaggcaccggagtgaacactacgtcgtgtggcacagtgtattcctccgcctcggaaggaatcccagagtcattgctgagcgccggagtgtcccccctccaggtccgcttagaaggttcgcctccaccatcttgccctttcgcttacgctcaagggcggctgcgtccgccacttcaccttcttcaacttcctcctcctcgtccaccaagacgattgtgcctgagggggcgttggaggaggacctcctggggtaaccaactgggaagcagctggaggcggagaagcatcggggttgtaagcctcagcaagagtagccaagaggtcgtccatgggtctggctgctgcaacaaagaaataagttaagtgttaggccattcatgagaacaacatacacttagcgaaaaagcaataaaactagtcctaccctgactctctatttcggccctagcaaagtctcaaatcatgacgctggcttcatcatccccgagataactgtctgagggaataaaccagctgggagatacgtatgttgagtaatccaaaggaataggcgctggaggtctagaacccatccgggaccgacctaaataatagcctaagtgggaaaaataatactctttggcatgattcccccaccgggtagaaggcattctaaacctacggagacgctcatcgaaccctataggcctaaggctggtatactcacggacgagaggaacataatatactgtcaaagaggacttactagaacccaaagtgctgccatcgagagctccggtatttaggaccgggacaacaggcttgggcttgcgggtcctccgctccggtggagcttccaggcaaagagtcctcccggcagccgcctaggcgttgatataggccagttcctgttccctcttaaagaggtact

SEQ ID NO: 405623 - DNA, 680 bp, Cannabis indica
gaccatgtctccatgtgaccatggaaaaaggtccaggtttgccctaaaaattctatcaagattgacttgaattctggggccaaacctttaccgatttttagtcttcttgttaggaaagtgggatgaacctccacttcttccaactcttctacaggtccaaagcttcctgcatgatcccaaaagcaaggatctatatctgtgtccctaccttgggctagaattcatcgccccttttgggctcgtcttctagactttttgcaggcattttttcccttttggtcttggatagggccaagttgtaacaatgatgggtagactttcggtctcctctcaagcatgccaccccatgccttgttgaaaatttgaggcataagtgatacatagaaatcaccaccttcagctcgctgagctccggtcagccaatcatggcattgaaagccaaggcaacgtcgtgttggaaatattttactaggatcttagatttactaacacttcatgtgtgtgggaactcactcactcactatgggcttcgtttttcagaagtgaagaagagggagagtggcggctaggtttaggaagaaggcactcagttttctttgaaggaataagatgcatcatctttttcttgaagccatcactacctatttatagtcaaccacctgaggttaggttagatttat

SEQ ID NO: 405624 - DNA, 596 bp, Cannabis indica
ctccatacggttgccagcaacaaattgtttcgctggcaccgctagaactgcaacggcttgagcagcttgctgaggaggcatggagggagaccctgctgcctcaacctttgaatttcttcatcctgttggcggattcgatcttgcatttccgcaaatttatgctcccaatctggaggagcttgcagtggatttacaggacgaccaccatgagctctgccatggccacgaccgcgaccatggggattctggggattttgatttccctgactgcctccagtctcaaccatgttaccctaacttcgtgtatttcgctgggcgtccattttataggacttagcttgcgaacccataagccaggcatgttagacaatgatcataaaacttaatactgctcttatggacttaaaggcaacgcacttaagatagataattatattttaatatgcttcctagcatgcttcaataatcacttagagtactaaacaagtacgggcttactaaaccatgaatcgagctttctctgatgaagattgtacatgtcttggcaagcttcggtagaaaaacccagtggctctgataccaaaattgtaacgccc

SEQ ID NO: 405625 - DNA, 563 bp, Cannabis indica
tagaaaaagagtgaaaatagataatgtgtgaatatggtataatgacatcattcatgtgtaagatttattagtataaataaaataataattttttggtaaaaatataagagggtatgtgaatatggataatatttttaaatttttgtattttttatataaattttccattatataatttgtatgctgaaaaaaaaatagattatatatctgaaaaaatataaaattaaacatttgaaaaaatataataaaaaaatcataataattgaaaaattcagttgcaaatgtcgatctcttatccctgacctattgcccatggcatgcgtcactttggactgggctgcctaaccaaggcatttttctttttgtggctacaatttcttttgtcagttttattttcatttttaacatattagaatcttctaaggatgacaaatcataaatgtataatacctacagataaagcatatatttattttatataaagtgtgcctatataactaaatttcttggtttatgagaaatttatgagtgactttttatttatatttaataaaacaataaaa

SEQ ID NO: 405626 - DNA, 613 bp, Cannabis indica
gaaaagaggttttggggtctgttatacccaaaattagactcaaaggaggacacgtgtcaaactaaagagaatatggatcaatgcatggaacggtaattatatttgaaaatggagtaactcattaaatgtggaacccacagagtatatttacaacttgctgactataaggtctacgcgagataaagatatacaaactgttgccttgtgtattaacaagaaactatacagcattggatgtgaaaagcgagacctcaacctcgttacgtatgagtagacgtaagcgagatataatgattgtgaaaataattagcgtataatatataatatacaaactaagtataacagttgggtgaacccaagcaactaatagcgaggcgcctatctcgctataggaagacacgctcttggtactttctgttaagctttgtgtcctatataaaactctatttcaacgtaatcttttctattcaattaccaataaagaaacaaatttattttcattacttatttagtatgttattgttggatatattttaccaggatctagatttactaacaagtatgtttcataaacatcctaatatgaattctataacaatgaaataaacacata

SEQ ID NO: 405627 - DNA, 698 bp, Cannabis indica
gtaaacaagatatttaaagaccaaatcggacgaagcacggaagtatatgtggatgacatgcttttcaaatccaggaaggctggggggcacatagatgacctggacgaatgcttcaaagtcctcaggaagtacaacatgaaactaaatcccttaaagtactcctttggagtcagctcgggaaagtttctgggctttattgtcaatgcccgaggaattgaagccaatctagagaagattcaagccctcctgggtatgaaatcgccgacaagaaccaaggaagtataaagtttgactggtcgaatcgccgcactcagcagatttgtttcaaaatcaacagataagtgtgttccattcttcaatatcctgcgaggaaataagcaatttgagtggatagaggaatgttaaaaagcttttcaggagctaaaagtgcaacttgcaaagcctcctgtactctcaaaacctctggacggagaagaacttgggatatacttagctgtcacggagcatgttgtgagtgtcgtgctgatcagagaggaaaacaacatacaacacccggtctattacattagtaaaagacccattgaggtcgaaggctagtacccattgatagagaaactcgcttactgcctgattctagcaacaagaaagttaaggccctattttcaagctcatctcgttctggtgtacactgaccaacc

SEQ ID NO: 405628 - DNA, 656 bp, Cannabis indica
gtacctgtcgaacaccttgcagagccaaacataagaatcaaagaaacggtagctgcaaatgagcaaggaccgggttggatggattccatcgtcaaatacataacgaaaggagtgttccctcaagaaagggttgtatctaggagattacagtatcaggcacatcgatatgtaatgataatatcctttaccggagaggtctcagcatgccgtacttaaggtgtgtgtcggaccctgaagctaggtggatcatgcaggaggtccatgaagggttctacagagatcacatcggaggtccaagtctctcaaagaaaatactgagacaaggatatttttggcaaacaatgaagaaagattgtgtagactacgtcctaaaatgtgattcatgccaaagatttgcgaacatattgagagcctcgcctaacaaaattactctaatgactagcccctggccctttgtggtgtggggaataaatctcattgggtccttaccaactggaaagggaggggtaaagtatgccacagtagccgtagaatacttcacgaaatggactaaggtcgagcctatgaagaccataactgctaagaaagcattagactttgttatcaaaaacatagtgtgtcgatacggcctgcctcataaaatagtctcagacaat

SEQ ID NO: 405629 - DNA, 613 bp, Cannabis indica
cgttgtgaactgctgaaagacctggaggcgaggctaatcgatataccacttgtccaaccttctcgagaatctcgaaaggtcctataaatctagggcataactttcctcttttctcgaaactcctgatccccatcattggagatactcgtaaaaacacgtgatcccctactcggaactcaacatttctacgttttggatctgcataactcttttgcctgctttgagaggcaagcattctagtttcaattttctcaattgcctcattggtccgttgtactgattctggacccaagtatttcttttcccgtgtctcatcccagtggatgggagacctacacttccttccatataacagttcatagggagccatccctatcgtactctgataactgttattgtattagaattctattagtggtaggtacttactcaaggaaccctcgaaatccataacacaggctcgtaacatatcttccaatatctgaatcgtcctttcagactgtccatctgtctgaggatggaaagctgtactgaacttcagtttcgtatccatagcccgttgcaaactctgccaaaacttagaggtaaacttcggatctctatccgaaactat

SEQ ID NO: 405630 - DNA, 674 bp, Cannabis indica
cggtgctcccatggcagaagaagccatggtttttgaagtgttcgggagaactcgcaaggtcaaaataaatgtttatggttttcggcagtaaagaaagcaaaacaccaagctttgatgctaataaagtgcatttacgtttcattggaaggatcttataaaaggagtggatccaattaattattccttacccagcaaaaaataataatcaattaattattccttactatatttaattctttacttatttctctccgtacaatttaaagttcatgtcatcactctttttatttttttttaatatattataaatatcaaattatcaatccaagaatacgtagtacactatttggtatacctctactttttagttcaatttttttcttggtctaaattgtagttatttacaattattaataaaatttttaataatttattatgtctaaattaaattccaataattatatcccacacctaagaaaaaacagtcacatttacaataaaatatttgaatcttatttttattagtgtaagactatctccaataaaaaatacaaaaattgtattatatcatgaaacaaaaaataatttgtgatttatttgcatctgctataaaataatataaagtagatgagaggaaagaagaagaagatgaagagagaaagagaaagtgaatg

SEQ ID NO: 405631 - DNA, 712 bp, Cannabis indica
cccaagtgccaaccacaccaaaaataaaagcaaaagcaaaatcagttcaaacccatatctaagtcctctgagtttttcaaactaacaaaaatctatcgaagtagatttgggtgactaacctgtgagataggttgaagttggccatcttgaaaggggaaaataggttggtccccactggtgaaatgttttctgccatttgagctggagcttaatttaaacactacataatgcactacatcatcattggtgaagaaggaatggcgacagattagagagtagagaaagagatgccatggtgcgactgtgcgactgtgtagagagagaaagcgagcgagaaagagagagacaagtgctgctgtgtgtgaatgtgatatttaggttaagcttatattttaagttagggttttttaattgggcccgaagcccattataaaatttaaattattttgcttcagtggataacaatcgcaaactttttaacttctgtttacaactgaagccaaagaaatttgcgtctcttttccaccgaagcaaaatgtaaaagataattttcaaattttttactttttgcctcggttcgtcttttcgcgttagtgtagtagctgacactaattattttttttttgcttcgattatctacaaaagcataaaatatctgcctattttttacttcggtcaaccattttagggagacgcgttgaccgacgcaaat

SEQ ID NO: 405632 - DNA, 532 bp, Cannabis indica
gtgtgatgcttctaattatgataaaggagttattttagagcaaaggattgataaaataccagatgttatttcctactttagcaaaaactctgaatgaagctcaattaaattattctacaactgagaaagaatttcttgctgtagtctttgccttaaaaaagtttagatcttatctactaggatctaaaataattgtttattctcatcatgctactttaagatatctcttgtcaaagaaagatgcaaaatcacatttaattcattggatacttcttttacaagagtttgatatggaaattcatgataaaaatgggtctaaaaatgttgttgttgatcacttatctaggctagttattgaaactagtaagagcctacccctatcaccgaaactttttctgatgaataattgatgtatatttcttctctgtcttggtatgttgacattgtacatactcttgttactggtgaaatatcatctcattggtctaaacaagataaaaataaattttattccgaggtgaaatttttatct

SEQ ID NO: 405633 - DNA, 523 bp, Cannabis indica
ttataattaaatgacttaactgtcaaaataatttatagtatggatttatatataaataaaaaaattatttataaattctaatagtaaaaaaagtcttgttaaatatttatttaattacttaaaaaatagttaattataattaattaattctaaaaatagaagttttacctattcgtaacctgctattacatgtaaaaaaaaaaaatgtaaccatatggttacaataaaaatgtaactattgaatagtcacattttttttaataatggagtgtaaatagaactccccaaataaaaatataattaagtttttcatttaaaatgaggtgtattcataacttagtagattgcaaatataatttctcaaattatatatacacccctaaatataattagaaatttttacatgaaaaatccattttgcacaatttattacctaaatacctctacacgcttatgtctacatttttacttacaaagttggttttattacataaataccacttagtcatcattccatccatca

SEQ ID NO: 405634 - DNA, 516 bp, Cannabis indica
cctgggcttcgttataagtcttatgccttccctccccctcctgactctgctctttctttctttctttctccctcaggtggctgggacttagccaaactcaatcaacattttgactcctccatggttgccaatatccttcatgttccaacctctggcattagtggttctgataaactcatctggggacaggattcttcaggaattttgagtgtcaagagtgcttatcacctagccttaaccaatcgtagcatagcttcgggttcctcttttcaaaatagcaaacgattttggactaaggtctggtcttccaatgttctaaagtcaaacatttaatttggagagtcttatctcactcaatccctgttgcctcatctctattttttcgacatattattccatctcctgtctgcccaatctgtcatcaaaccacggagtcagtgaaacatgccatcttggagtgcaaatatgctaggaaagcctggaaaaattcaatcttcattgacttttatactaata

SEQ ID NO: 405635 - DNA, 396 bp, Cannabis indica
tggtgagtatgtatcgacttcactaacctcaacaaagcgtgtcctaaggacttgttttccactcccaagaattgatcaacttgtggatgcaatagtcgggcataaaatcctaagctttatggacacctattttgggtataacaaaatcagaatgcatccacttgacaaagaacatacaagtttctgaacagatgtgggtccatactgctataaagtgatgctgtttggtcctgaagaatgctggggccacctttcaaaagttagtaaacaaaatgttcaaaagtagatcgaaacaaaatatggaagtatatgtggatgacatacttgtcaaatccaggaaggctgggggcacacagaggatctcgatgaatactttaaaatccttaaaaaaatata

SEQ ID NO: 405636 - DNA, 1105 bp, Cannabis indica
agaaaaagaaaaaaaaagagagatataaacttggtaaaatgggctggactcaatcggcctagtcaatgcgaggaggaaggcgaggaccaatacgcgcctcaagcatggcatcaagtttcttcttcttcttccgaaatttggcaataacctcctcaggcttgggatagaagtcgagcttgatactttggccatttgtcgactaggccatatagacgccatcatcgaagagcttgacgcagcgcttacaagagatgggggacaggacctcatctcttttagccttcttcaaggcctggtctctgaagtctttgagctccttcatctccacggccaagttggccttggactgcaagtctgcctggtgcaactcctctaaggacttcaccttggcagccatttcatccacggcctccctagcctcccgaagttcacgcctggccctggcaacagcctcaacctctgccttcagcgcctcccgatgcctcgcctccagctcagcctccctccgttggacctcctctagaagcctcgcctctgcctgggcttcccgctgtttagcctcctcctcaagcttcaccatagcaagggcctcccttcgctcagcctcctcctggatcgcccgcctttcagtagacaggtcccgcaggatcctcacggcctcgtctatcccccgaattcatacatgacgaagccatgattgacgatggtcttggagaggcggctggtctccgcagtaatctgagaaaggagataaaaagtgagatcaaatgccttagacgaaatatcgaggaaagaaataaaccgcaggtacttaccgcagccatggcgttgctaatgtcttgaacctggtagacggagttcaaggaggcacaagcagcgtaccgtttgggtggaaattgagttaaatgggagacatactcgcaggtcatctctgaggcaaaaggggccaaggtgggcccaaggaaacggttgaaccagttcgtcagcgagtccatgttcaggtcccacggattccggaagtcctccacattgagagtgttttgctgctcctcttgtaagaccctctttaaggcctccacctcagcatgtccccgagtgtactcgt

SEQ ID NO: 405637 - DNA, 658 bp, Cannabis indica
acttagatcacaagtgttgtggatatatagtagctctcttaagattacaatatgagaatggatttggcgaatcccaagtgatggagaaagcctatgcgtgtgaaagagaggagatgaatgtcaaacttaaagcttgtgagttagaactgagatcttaagacttagggagttggggtttgattaatactctttatacagtagagcttacatccctaatatcccttaaaaataggtaaataaatctatatttacataattaattaataaagtttaaatgactaaattatctctcaaaaataagaaagttgctgatatttttgtggaatgtcaaggtccaattcgttgcttgacttgctctccatggatgaaagtttagcaccaaaaacctaccaagcaaaagttggtcggccatgcacctgccagggtgcatggtggctagccacacagtgttgggttttgtgctctaaatgaaacccatttcaatataatgagatttactaattaataaagatcaaaaatcattttatgttgcatggttcacatgatttatttcatgattaggtccagaatatatgtatttgtttatgattatagtgttgtcagcacagtgggatataatcacgattatatgttcaaagttcaattccctgatttgtca

SEQ ID NO: 405638 - DNA, 569 bp, Cannabis indica
ataaatgtaaaatttagaaaaaagttagtatttagtgcaaattttcctactaataaagtatttgagttctagatatataagagaagaataataaattcaaataatgatatgaagaagaaaaaaaaattgacagtttagttgtgtatacatagaaaaggggtaaatctaaatcatacataaataataatactaaatattaataaatctagtattcagtaatagtgctgtatatacgggccaagttttttgacacgacacgaaatcgatacaagtccgaaaggtacaaacacgactagtaagggtgtgcagaaagtcatccaatccaatcccaaccgaccgatcaaatctcaaccgatctaatagaatcggatatctactcataattagatcggatcggatgcaaattttaaaaatccaattggatcagatcggatgttggatgagacatccgattcaatggataaccgaaccgatccaatccaatatcatccaatgtccatccaatcatagttaatatttataattttatatattaatattttataaattattttattatctatgttgga

SEQ ID NO: 405639 - DNA, 587 bp, Cannabis indica
aaaaagaaaaaaaatccactaaacatctccttcccgaaaagaataaaatccataagaattttattttattatttcttttgtttttttggaaaaaaatatctttgtcttgaatactaataaatacaatattaggaatgtgttttacctgcactattttatttatagtgcatctgatttgtactaatagcacatttactacacagtattcagaattagaataaaataatagaaaatataacaaaataaataaaaataatctgaatcaatatttgtaatatgttatttactaaaactgcttagaaatagaataatagtgatttatcttttttacttaatcaaaaaacgtaattgaaatgcttaaattaagtaaattatttttttgagttgaactatagtatatgacagctattttgtaagacatattttaaaggataaaattgttattataaatttaatattaaaaaaataaataaaatttattactcttactacataacattgtaaaaaaattacatttttatgtgtaaggaattttttttttttttacatttttacgatttttcatagaaataacatgaaaataacaa

SEQ ID NO: 405640 - DNA, 539 bp, Cannabis indica
aatggacttagaaccaaaaaaaatggagtacatacattttctttaaaacaagaccaaatacatattatatctttttggcttaatggaattatatcttttagcaaaaaaaagaccaaatacatattatcaataaacaataattaaaaaaatatattattttataaggtaatttgtgccataaaatataaataaatacatttttattagtagtattatctaagttgtaattttaaaatttctgaagctacatgtatatcaataagaaaataacaggtaaataataatataatatttaatggtcaaataccgaaacttaaatatttatggcgcaaaatattctatgaacaaagtttttgggctcaattttttttaaataaaagttttaaggctcaattaaacataacctaattgagcatttacttaaaggtcggtttttatttttagggattttttttagaaatatactatattaggtaagtttttacaaaaataacgttaataatgtatcacacacaaaatgacgtgacacgtcatcatct

SEQ ID NO: 405641 - DNA, 533 bp, Cannabis indica
atttagttttttttttttttgcccagttttcaaaatccttgtctaggtgttaaacgtagtgaaagaaaaaaaaaacacattacttgagtcgaagctcaacttgggtaaaaaagaatgcatcaaagatagaaagttgagtgtgaaaaagatagaatagaaattaattacgtgatggttcagatttaccttggacatgcccgttgaagaagaacatgaaaaaacctacaaagacaaatatcttccgtcagcttcacgagttcagtttttatgtttgataagttcaaatgtcagtggcatattcgtcattacatggaagttttattccatttatgagagaaatagaaactcattttatgttatgtaggggcacgggcacccaaaaataaataatgcttaagtagaagggaattttttataaatatggaatttcttaaaagcattttaaaaattatggacatttatagaaaaaatttaaaatctggaaaaaaaaataaaaaacttaaaaaatggaaaaaataaaatacctataaaag

SEQ ID NO: 405642 - DNA, 591 bp, Cannabis indica
ttattgacgagacatctctggagaagttacattggcagccaagaagttgacataatcagcaaaccaaggtaccatcaagctctccctcaaactaaagagttgttcatcgagaaactcttcatttatctgcacctcttttgcattctgtctttcttctatttcgagtcttgaaagatgatcagtaagtagattttcggtccttttcttgtcctttatctcaatgtcaaattcttggagtagaagcacccaccgaatcaaacttggttttgcatccttcttggtcataaggtactttattgttgagtggtctgtataaactatcaccttattcccaatcagatagggccaaaacttatcacatgcaaacacaattgcaagcatctctttctctgtggtggcataattcagttgagcatcattcacggttctactagcatagtagatggtatgaaatactctgtcaacccgttgtcccaagaccgctctgattgcgtagtcacttgcatcacacattaactcgaatggcaacgtccaatttggtgaagtgactataggtgctgatatcaatttctccttgagaactttgaaagc

SEQ ID NO: 405643 - DNA, 690 bp, Cannabis indica
aaaaactcaaataagaagcccaaaagataaaaataagaaagtaaacccaatcctaataatcgaatacattgaagttatttgtaaatttttataattttctaaataatttactaaaacattcttgttgtcagaagaaagtagactaccaaaaatcatgagtactcatgataaataagaatgctcacttacaaaatcacgagtattcacttaaattagtggtaaatactcaaagtaaaatagcaaagaataaagcaacaacacttatagtggtttagtcagagttcggtctgcttagtttacttttgcaaaatttttgtaattattcttattttgggttagattactcctttatatagaaattaagtgatcctttaagttacataactgatcagttataactattacaacattaattaaatttaattaagatgaaaaacgtttacaaaataaatgaaagaacagttttgatcgttcttagttaatattcgaacgtatgtgactttaagagttgcatactgactgttcactttcccgagtaacatatgaacttgcgggttctttggtgttactcacatataaagtctcgggactacaaccttggggtcatttatgagatagaacgcctggactatactggtcatattgggcgttcataggggtgttcattggatcacatccaatggatttgga

SEQ ID NO: 405644 - DNA, 724 bp, Cannabis indica
catatatctcttgctactttacatttgaataataagtagtcactattttgtttattttaaattcatgaatttttattattaattatttttatgtgtatccttaatagaagaactaatataaagaacaaaaattcttcaaattttatgattatttttagaatggaaatatggtaatttattaaaataaagaaacatccattgcaatgtctaataactctgacggggaattgttgaaataaaaaatacgatctaacaaataacaggcgctatgcgcaaaaaaatgtgcaatcttgttagcagaacgtttgacaaaatataacttaacattactcaactcaaataggagctgtttgcaatcccaaactagaaacccgaaagcagatgacatttggacattacttttgatgtcttgaatagccaccatgcaatccgtttcaagagtaacatcttgccaatttttactcttaatccagctgagggcctctttgatcccacttgccttgaaaatctcagataaaacttggcctggtgttagagtctcttgcaataaaaccaaagccaaaagaaccagctgcttcaaatatagccccatcaacatttatcttaactgtattagccaaagaattcgtccaatgctctatctccaatccttgaatattgtgagcaaggagagatttcattcaattttgttgagcacaacaccattgatataaaaattgttata

SEQ ID NO: 405645 - DNA, 819 bp, Cannabis indica
cattttttttttataattttcatgaatccatgaaaataattttatatggatgtattaggcgtgcacacagatcatgtattccccaactatatcgtttttgtcatagtcttatattcaaaacacacactcacattcacacaaaaagtcttattcttatggatttcccattattattcttatggatttcccattattattttcacaataactagctagacgagttagatcattaactgcatattatgccattgaaaaactggtgtggagttaggaagaaagaagagaactttctatgagttatttcaacaaataattagaaggcattatattgttatataatgatcctaataaacacacaaatttatgtagtatatataaatatgtacaaaggcaatacaaacaaaaaaaaattggagaatggagaaactagagctaaagagagaaactaatacaaattttgaaaaggaaagctaaagacaaagttacatacattcaaatagaaggaggaggcagagggatgctggcggctgtgattgtcgatgtgtagcgttgatgttggttgttattatcgatgtgtagtgttgatggcctggcggaggaggcagagggatgctggcaatggtgggtacgttgggagggcaagagatggcagaatctagagttccgttggggtgttaatggctatggatgagatttgtgtgaagggcatattaggtaatgcacttgtaaaactgggtatatttcaatcggggagttctatttacaccccacaaaatgataagtacaccctattattaaaaaaaaatataaacttaaata

SEQ ID NO: 405646 - DNA, 711 bp, Cannabis indica
gtgtaatttatactgtgtactgtgttaattttacggttgttctatgttgagttattaaccattgttgtttaattgttctgtttgttgtttgtcgattagttttttaaaaaaaactaagtattttcttaaaaaattacgtgtgacagaaaattagtaaattttacctaaaatttaatattttgttaaaacctttttattgcctcctctctctctctctctctcataattttatcttctttattcttttattaatttttattattttaatggttttaacaatctttctctctctcacaatttttttttatttttatttttaaaaacatttagagaactctctctcttttacattcttttactgtttactgaatttttcggaaacttataataagaagagattaagcaaaataaaataaaaataaagagagaataatattggattaaaatctttgatgtaggcacatatgtatttgtgtgtattgctatataaagtttgacccaaataaagtggtcattttagtaaggggtttttacaccacatactgaaatttccaaattttttacttttatactgtggggcggaatttttttccaaaagtattatgttttttttcaaatatattgtgtagactttatactgtatactatattaagttttcacagttgttccacggttgtttatttagttgttttactgttattttaattgtt

SEQ ID NO: 405647 - DNA, 566 bp, Cannabis indica
ccaccagtttttttaggatgaaggggtgaagcaaatttgatctagctgaagctctaccaaaattcctataagctttcttcgtttttcaagagaaatattaggaatacaaaacaaagctaggggttttattgtacacatatattgtattaatcaaacacttcttgtgaggctaatacaactgactcgtggactaagcataattaacgcatgaaccacgtaaaattatctgtttattatttactgttttattaacttttgagattgtgaatatttattttttaaaaatctcaataaacaaatataaattattatcaaatattcagaatgcactatcttatttattattattattttaggggaataataatgcactattaagctttctgtcttgacatatttaaaaaaaaaaaaataagcttcctgtctttacatattttttttattaaaaatacattttgctatgaaaagtctctctatatctttatatattaaaagtgcctatttaacggcatttcttggtttaacattcttgctttaacagaatatacttaaaaataaaagaatat

SEQ ID NO: 405648 - DNA, 603 bp, Cannabis indica
tttttttagttaaaaaacctaattattattgttcaggtcactaaattctataaaatcatctatattagagccaagtcttgaaccgtcacattatcacgagattgaggcaccatcatgagtagggtaattaggttgtgcaaattgttgcgtaggtaagatctccataaattgtcgagtttgcggacgaaccaaagtagtctactattgttgctgactctccgaattgaaaaatctgactatacattgactgttgtggagatcctcctatttgaccatacataggcccaataatgtcccaaattgaccatacacaggttgttgttgtgatgacccgaattgaccatacatagggtattgttgttgtaacgatgagcctccaaaatagccaaccataggttgttgtgtctgagatcctcctgtggcatccaaaaaatatatgggaggagacagtgagggatgctcgaacatgtaatgtaattgaggtgactgtgaagagccagcagacatgttgggagaattttgttgatgttgatgaaagaacagaggcatctgagaggagttaccgttaggttactttttagtattaattttaaaataagttta

SEQ ID NO: 405649 - DNA, 606 bp, Cannabis indica
aagcagaagatggtagtgtttgaatctaatagtgccaacccagcagtgtttgtgggtgtgctacaaggatcacgcatacccagaattacaatcctgaaagctagagacctaatgcgtaggggttgcataggattcctagttacaacactggatactagccaacctatttcgactagacctgaaaatacgagattggtgtgtgaaattatagatgcattttcaaaggatctacctggattaccaccttctcgagagattgaattcattatagaattatttttgagagcagaactagtatcaaaagcaacttatcgaatggctccagcggagttaagagaattaaagattcaacttcaagaattacttaacttggaatttaccaggctaagtttttctccttgggtgctccagtgctatttgtgaaaaaaaaagatgggtcgctttgcatgtttatcaattattgggaactgaataaactcactattaagaataaatatcctttatccatgatttatgacatgtttgagcaattaaagggtaggacagtcttttctaagattgaccttcgttttggtttaccatcagttaagaattcgagaagaggat

SEQ ID NO: 405650 - DNA, 1022 bp, Cannabis indica
aaattcacaaataagacattgtcgttatttaaaattctaattaagtaaataaatcaattagttgaggctacaaaataatattatcctagttagtgtagagaccatgggcctatgtaaccaagttcccaataagtagttctagaatttaccaagtgaattctctattttattaactcctcctaactccagtaaagatttagaattgcactcctaattacatcaaacgctctattcaccaaaaataaatatgatataaataatccattatttcaatctaaataatcaaagatcctctataaataatttacatcaagtagggataaatttaccgttttacccctgaacgtaattgatcctgaaaatacttagcttcttataaataatatttcactaaactcatataattactggaataagagctatttcatttatgtctgttagccaagctctaagaaaattatcgtttcacttctaaatagttatagaagctatagattctatatctatgattagcgcttgcactcaattgtactactatgttcccaagatgtaagtattaggtcgatccaagtggttagttataacgaacaagtcaaagaattcatgcagtacagttaatccagaacctaatcttaggattaaatcttttgatctaagataaactaagtggcattgactttgtaaagatataacggtaagtttatgatatattatccactgtcaatattggtccagtctgatgtatagctaatacaaatgatactagtatacgtttctaatgccctagaaaggacatttcacatatcattgtgcaagtaaactttgtcgctgattatcacgtcagtgtaaatctagtgcactgataaatcataggataaaatagtttaaagcacataatcacaattactttccattgtgataatatcattgtaattgtgagtaactatatgttcagaatttaatagaaattatatattaaaactataagtataaaaactacatgtaaacctaaatgatttcta

SEQ ID NO: 405651 - DNA, 404 bp, Cannabis indica
cataaagacttaacaaataattcgagtattatgatgttttgatccacgtgtccctgtccggttggtccacgtatattgggcaaaatcaggggcaacacttaccccccaagccttgcttatttgaaaaataaaaaaaggcttgttcaagtgcctccggttgactcctcgatttcctggcacgtcctttgggcgcgtgaaggtgcatttaatgatcaccattaatgcagtgattcactttttgcagacgtcgattcgtttcatggcctttgattgatacgacgcattaatggtgtcaaacggatactcaaatgtttccacccccttaattacgaatcaatccaaccgttgaattgtgcgcctccccagctgtaacatcctaactaacataggcgtattacgtgatt

SEQ ID NO: 405652 - DNA, 514 bp, Cannabis indica
tatttgagcaaaatacacgattttctcacacagttcaaaagctacgctctcagacaaattccaagggaaaaaaacacgactgttgatgcgttagcttggcttgcgagtagtagtgtaagtgatagagcgaacttggttcctatcaaattcttttaagaacctagcatcactggcacggaagagatcaaaatgattgatacttccccaaatcggatgatgccaatagcgacctaccttaacactgggaaactcccagataatcgaaatgaagctcgaaagatgagaaggaaggttgcacggtacatcatagtagagggaatgatgtatagatgagttttctccatgccattgctcaaatgtgttacccaagaagaagttgcaccacttttgtctgaagtgcaggatggattttgtggaaaccacgccgccgggcagagtttatcaaagaaaattctaaggcaaggttatttctggccgacaatgatcgaagattctaagtgttggaaattatttt

SEQ ID NO: 405653 - DNA, 728 bp, Cannabis indica
ttgcattcattttgagtacaatcgaagctataggtatagctcttgctctttctctctttagtttcttgaaaatcaagtaagaaaatggttgcatgcttagtttttggtgttgtgcttgctgttagttgttgttgttgttttcagaagttttgatttgtttaattgattgaattcaagctagtttcgttgttaattgatgggatttaaccttgtgtaaagctttaaactcaaaactatgatttttatggtaaaatgagcaattagttgttgtgattgttaattttgcttgggtttgttttctggtattatattatggttgttgatggtgaattaaagcaggtttgatacatgttagttagatttagctaagcttgagttttgaactcaaagcttggagctttaatggtggtttttgattctgtgcatgctgggttgttttattgctttggaattgttatttggggtatttagaacagctctggaaaatttgaattggtttgggattgatttggtcgagttatggaattttgaaaaatacctgcactaaaccggaatttcggtttagggaggccattagcaaccggtcgaccggttgggggttccaggaatttttccagaaccggtctaccggtcgggacaaaattgggaaccctagttcttcccatttttgtgttgtttagggtatttccatgcttgttatcaatagggaaacttttagtttctagttt

SEQ ID NO: 405654 - DNA, 639 bp, Cannabis indica
ataaaaattttaaaactttttttctaaagcattttactattctggataagaaaatttaccgcaaaaattttcaaaaaattcagtttaatacagataagttctcaacttctaaaaatagcggtaatagttctcaaattcatgttttttatttgtctgttagtcctaattttaactaagccgtttacttttttaaaattgccacgtgtcgaaatattattagtctaaattattattttaatttaaaaaaataaaaaaataattttttttcttttttttcttttttttctttttctttcttttcttcttcgttattcgtcttcttcttcttctcatgccagaaacccaaccccaagccagcaccaccaccactaactcccttcgaccaccgtccacggtcccctgccattcaacctagcccttcgactatgttcccaatcgacctagagcccttcaattcttcttcgtcttcttcgtctttttttctttttttttttcttttctttcacaccaaaccccacccatcatcactgtcatgcacatctgagagggagaaaaggaaaaagacggagaggcaagggctcaagggtggaaggtcagagtttgggtttcaatttttttgggttcatttcgagcttggag

SEQ ID NO: 405655 - DNA, 619 bp, Cannabis indica
taattataattaattatattatagacccaaaattaaatatattaaattttatattaagaaaaaaaccaacataatttacattaaaagataaacaaacattaattatattatgttgtactaaaattagtatataaacaaaacattaaaagatgttcgaatcagataataaaaaaaagtaaagttctataggcgagtaatatcatcgtcgttgtttctctgagtctggggaggatgtgatgacgatccagcaccaggagcaggcaatgacgatccagcaccaggagtgggcaatggtggaagatccatgggaggcaagttgaaacccggcacagctcgagaaagatactcaaactaatcttggaatcgtctgaggtagagttgttgtgcttcatattgctacctcgtatattgagttttctactctgcttcctccactttttactgtaaagcctcgtactattccattgtaacagtcgtgggggctgaaaaatgcgtggcgtatgctcttttggccctaactcccttcagtctagggagatggccaaagcctcttagatgtcgagatcgctccccgagtacttgcgtcataacaggtaagtctcgggggtactgtgtagga

SEQ ID NO: 405656 - DNA, 785 bp, Cannabis indica
tttttgtggcttgggatgcgaacccaggtgccgttgccccatgtgggtgtgccgcggcccgccctcttgtttatgggcatattcgaatgcaatttttgaatgttcatagctttgtgatctggactctgttttaggagttctttatatcgttggaaagctcgttctaagctctatgtgaatatatgtgatttaaatgccaaatgttatattatgtggaagtggaattagggattaaccttatatttgtaaatcccagatattgtggctaggattaccgacacttggtcaagagcacccgggggtttggaatctccacgtttgcgggacatcagataagatagtagtttgcacgtcgagctatgcgcggtggcactcatgttttatattatagttgtgattaattaagaaccgtgattagggttattaccctaaaatgagcggttatatggtctaagattatcaccctagtagttaaaagatgttggatgttatgccatgataatatttgggaataaagaattatgcatctaaggcataattaagctagactcagtaaactattaccttgagtaaatgttaatgcgatataggattattaccctagaatattatgaaggtaaaaaagcgatgatatatggtaaagtaatattgttaatccagtgaagacatgagttagggttattactcttaatagatgttatttgggcatattgtaatgtgatacatgagtgattacttagtatgtaagttagggttattaccctaagattttatatgttatggta

SEQ ID NO: 405657 - DNA, 365 bp, Cannabis indica
gaaacaagcgagaaatttatggtataatcaataccatctccttggtaaagctttttccacaaaacgttctttataccttcaatctgtcccttattatcttttttagttcttaaaaatccacttgcaacctattagtttaaaatcatcaggtaaatagaattaactctcatacatcattttttccatggactcaatctcatcatccatcgcttttatccattctgaagaatgtgtactattaagtactttactataagtgagaagatctacaaaatgatcaataccatattctcattttctaaggtaaacaaaattatcatcacaccttgttgatgtcttttgtctctgagatcttcttagaggag

SEQ ID NO: 405658 - DNA, 374 bp, Cannabis indica
aactaaattaaaatttttgtgactaatacttttagccatggaccttttagtcacaacattaggaaaaataatttataattagtctacaatttttttactttaatcacaaattttgttgtgactaaattaagattttttgaatgcgtatccatctcaaggttctattgggaatatgtttagggatattactttggtcaattttcaattaatcaaactagtattatgattttttaaaaatcaaaataaaatcagactaattaaatgactaaattaatccactaaaaaataaattggtttaattcaaaaccatatgggtgggaaatcccctaataggggcgcactacaaaaaataactacttttagtgacaattttt

SEQ ID NO: 405659 - DNA, 465 bp, Cannabis indica
agtttgtatttttaataatgctaatactctctattttaaaatcatacctatttagtactttaaatttaaaattttttaataaactttaatcaatacaattagtctaaaattttatgaattttaaattaaaatttatttatttgattacatataactgtaaactctttgattaaattgataaaattgtattgattaaattttattttaaggtactaaaatgtacaatttaaaaatataaggtaccaattaaatattattgaaaatataagataccaaatatattttttataaaagcacaaggtattacatgagtatattcccttatttgttctactagtaaattgttcgcgtttcgcgtgcggctgtttatataaattgtaaattatatgtgtaaatattcattgaataataaaattgtatcaaataattttaaatttattttatgcataattttaaaaatatatt

SEQ ID NO: 405660 - DNA, 542 bp, Cannabis indica
tttttttgttttattttcatgagaaagtgtataaaaatgatatttttcaaaaaaaaaaaagctcaagcccaatctagtcaaaacttatctggactcggttcaacccaaacccgacccacctgcacccatgttgtgaaaattatatacgcaagtatacgcagtcacacaagtaataaagtgataagtaagatcgtctccacagggattgcaaacaaagtttgatataaaatcaactaattacaacttaaaataaaaagaaataatatgtaaatggttgagtaatgattcaaaattaaaattgacaagaattaaacttgctaaaattaaaactactgctgctagaaaaattgtttgcaagataaaaaatataatatggcaaaaatggcttgaataactaattccttctagtcaggtttttttacagtcagtacagcattggttcagcattactttagcattctgcacagagataacaacaaattcctctaggcttgtgagaattttccaacactcacaactttaatcctaccattaagctcaat

SEQ ID NO: 405661 - DNA, 664 bp, Cannabis indica
taaaaaaaatatatgttattggtgtgatatgattaaaaaataatgttataaattctaaagttaccattaatgtagagttgtacaaagtacaaactacagaaattataaaaaaatgctatacaaactacataataattgcttgagcataaataagaaagctcatacacaagccatacaaaacaaacaaataaataatgagaaatactaatgaacgatactagtagtacttttattaatcttgttattagtataattaagtatcgagttcaataatataagaaaataacttttaaagaatatcgataagagcattgcttttgaatactagtgatgtctaacactttcataagtggtgtctcacgattaattagcgatatttcttaaaagttattttattaaattatatgagactcgattcttaattacactaataacaatataacaccgaaaagactgctaggcttttttagtaattcctctattatgaataatcaattgtaaagtaccacatataaaaagtaatgggcaccaatagcaatgctctcaaaatgtatggtatttactattgggtgattctagaatgcacccccttaaaaggaatgtactgatgcatcctctaattgttttggcatccacaaaaaaatttagtctaattttttttcat

SEQ ID NO: 405662 - DNA, 639 bp, Cannabis indica
ggcatcaattgtaaaatagttatgaattacacaataattataatatgatattttatatgtgttgatgcactaagcgtttataattatattcatacagagtgttttcttcttaatatcaaatcttacttacgagacatatatgtatggattgtttttcaagcgatgttattcattaatgaaattttaaatttttttaaaaataactataattaaatgttcattttaaaaataaagttttaataatccgttttaataatccaatcaccgataattaaagaaaaattggaattttttacttaattttattattaataattaaatttttttccttacactatataaaatatgttaatatttagtattatttttatctttttttaacttcaaattcaattttttttaatctctatagaataatcttaactatataatataaaattgaaggatttttttaattagataataaaattaaatatcaaaactacttaatttttttaaataatactcattcatattcatagataatatccaaagacaattgttaatatagaatagatatatattaatatactagcaaaaagactacgtgcgaggcacgtatactaaattttatgctagttttttttttctatgttattt

SEQ ID NO: 405663 - DNA, 435 bp, Cannabis indica
ttttaaattataaagagttttggaataaaattttaataatttaagagtaaaaaaaattactaaatgatccttatttaataataaattacaaaaaattaattaataattataattaatttaattttaaaatagaattaatcttcattaaagttttataaggaaataaattattagataactattaggtaataagttaattattatttatttttatttaattttcaaattaattatagctatttaataataatgcaaaaaaaaatgtaaccatgatatatggtaacatatttaacttccactgtatatctgtatctgtatgtatgtatctattctatataaagtgtgccaatataacagaattcttggtttatgagaaatttatgggtgactttttatttatattaaaaattaaatgatttattattaaaaataaaa

SEQ ID NO: 405664 - DNA, 561 bp, Cannabis indica
cctatctttttgatcaagaatctctaccggacgttcattgtaagacaagtcttcctacaaaccaagtgtttcataactcaaaacacgtgatgggtcagacacatattttcaaagttggaatacatgaaatacattgtgcacccgagataatgatggcagtaacgctatcctgtaagttacactgcctactttgtccaatatctaaaatggaccacgtatcttggacttagtttccctctcttgccaaacctcttcactgagagtcctttttgtaatgtcactcgaagaaacacatgatcacccacttcgaacacaatgtctctccgcttcaggtctacacaagatttttgtctactctaagttgtgatcattttagccctgatcttctgaataacttcattggtgtgctgaactgcatctagccctaggagcttgtcctcccccaactcatcccaatgcagtggaaacctgcattttcttccatacaacatctcatagggtgctaccccgatagtagactgatagttgttgttgtaagaaaattcaatcaaaggcaggtat

SEQ ID NO: 405665 - DNA, 1065 bp, Cannabis indica
gagtatgtgtatagctgcggttgctaggaaccatctgcgaagggtgatgagtattcacacgtcccggttggattattctgatgctctttgtggagaagttgcggcctgctgcttggcgatgtctgttgcgatggatcttcagcattagtatattatagtggagagtgactcgaggctagcgatcgatgctcttaatgggaaggcatcccattgggctctagagaactatgtctccttttgtactaagtcttctccttttttcatttgttgtaatttttcgaacattagtaggtcttgtaattttatggcccataatgtggctttttgggcttttaacaaccatatgtacagatctattccgattaactctgtaccggagaacattttgtgtaatgaccgagaggtctaatatctttattatatataactacgctttttctcaaaaaaaaaaaaaaaaagaaataagtatcatgaagtgatagagaagtgtttcctaatcattcttgtctatttgaaagtagtcatttgttagtatacataaatgattcaatacctctgacaaaaagtaattttaaaaaaaatatataaaattcatcataccattatttattacatataataaaatatttaaatatataccatatttcatatatgattcaaagcttgtatattgtgagtattatgtaaaaatatattttgatacgtaattttctaacaaaaaaaaaaagaaaagatatatgttaacttatataatatataatataaataatacttactttttttttattaggggtgaatacctttctacaatttcttttttccatggagctagaactgaaaaatgataaaaaaaaattagcattaaataatgtttaagaggtaatacatatattgaaaaaacataaaaaaaaaaggagtagtgattacctattttatatcattgaagaagagttttctatttttatactagaaaatatttataaaaatgagaagattaaaagataacttttcttttgtatataaaatcaaaaattagtggaataataattattgtatgaattctat

SEQ ID NO: 405666 - DNA, 564 bp, Cannabis indica
attatacttttattattattattgaaacgtaggcactctttgaaagatttttgtacacaaattaagaagacaattcttcttccttttaaatacaatttatttcttttctaaaaatagtctatatttctgattttatgtcacgtggcgcacatgcaagttggttttgggtatcatagaaaaaagctttgacattaaaatctgatgagaaatctaagccgttgatcatgatttgtggtcctagattgaattcgtgcctttttttccgttttgggaccgattgggaacttaacatctcaactcctctctttggatggttaactatgaaacagagaagtagtcttgtttcatcaaattcaaatcatttgttttgatagcaaccgtctgatctgtggaccattttaagtggtcagtaatcataaattttatttaaaaaatggtactagtatctttagaaggtgattctacaatgcaccccttaaaagggatatactgatacacctttgacttgtttcggtattcaaaaaattttttagtctaattttttttctttatattcatgtacgt

SEQ ID NO: 405667 - DNA, 476 bp, Cannabis indica
aattctttttacccttacccatgtatttgttatatatatatatatatatgggcacttcttatttttacttttattcccaaagaaaaaacgattacaatgaaagaggcatccttagctttaagttgtttattagtttgcttctcatctatggctaacaaacattctttgtttacaatttttcctttttgttttagactttttatttgtctactaattcattttggtgttagtatttttttttttaaatttttgaaaaaagaatatttaatctgatacacacaactacatattaaatagtgtgtaccctcaaaagtcatataaatgaatggttaaaacaatgtctctatactataggaacaaaaccaatgtcactaccatagaattgttcattaattataattattaaataaatagttttggcatttataggattgaattagaaaatatggtattattgaaaagaataataagtggtt

SEQ ID NO: 405668 - DNA, 511 bp, Cannabis indica
atcatttggtgtggccaatattttcctgtggtttctctcttgtactttgaagtgattgaacacttctgattgattactttaaccactaatttttgaatttttgacacttcaatttcggaagccatggtagctaaagcatcggtatacctatttcgtgttcggggcatgtgctcaaagcgacattccttaaaattctttgctagttcttggaccattgtttgatatattgctaatgatggtttgttcacagcgaattcccctttgacttgttgaataacaagtttggagtcccctctaatcgtaactctgctaacttccatgcttagtgcgaccatcattcccaaaataagtgcatcatacttagcttcattattagtacaatcaaataataatttataagcctgaatatgattcttacctgttggattggtcaaccctattcctgcacctccccctttagcggttgatgacccatcaaatgttattgtccatctttcttgtgtttcttcat

SEQ ID NO: 405669 - DNA, 556 bp, Cannabis indica
tttcttggactaaaataagttagttttgtcttttactgtagcatttctatcatctctatggactattttactattagacttaatttagtaaataagttaaaagtaaaaaaaaaaaaattgttactctaattatgctctctattttagttagaattaattattattaataaaaataatataaaaatacttaaaaaaaaaaataagaaactctctatctattttctattttaaagggttatttttttttcttggtaggtagacctcaacccttgagagttgagatccaccacctttggtgatatagattagacccgttcaattccaaccactatattgccgatatttggattcaatagaggtggatctcggttgatgaaggtctacattatgtagggttaaatgcaataaaatgtgaatataagaattttgtcgccaataaaatgaaaaaaatattacaataatacaatttacttgagatttcttttgggaaatttcaatttttgaccctaataatacaagccatatcaaaatttatacccttccttaatttgtacaa

SEQ ID NO: 405670 - DNA, 546 bp, Cannabis indica
ttgttcccaaagacttcaagccttaattggagctagaaacgatggatttcaagactgaggagcttccgaccaatccaaaccaggggaaccccgtagcccgccatgggcaatcctcacaagtgatccttgagggcatagatcttgtgagcgatcttaaaggtcctcctaaggctgataaggaagtttagagaaaatttggcatggtttctgatgaatttgggaaggaatttggtgtggtttctatcagagaatccagccaacccgagacccaaacctacgccagaatacctttgcgccaacctctttctagtatcaaggaatttcctgaggctcggaaagagatctcaggttcaggaagtgggattttctgatgatgaggggaatgaggtctgtgcagagaccaaggctctctacctgtagccggtctttctcaagctatgtgaagtcaaccatttttcgagctacgtgtagacggtctttctcaggctatgtacaaacagtctttctcgagtttatcgactgttaccaccacatacttagctcctc

SEQ ID NO: 405671 - DNA, 505 bp, Cannabis indica
tggttgttgatcgtattatcaactttgctttagactttaattttttggattaagtttctggtagaaatttactatgatcgctggaatttatgttgaccaatattataggtggtagaaactttttttgagggtctattgtagtttgataatggttttttttttcgattgcaatttgcttggcggtggattttattgaatcttttacaatgttgataatgacgttttttttgtcagggcattgtgcagtgtcgacaatgaaattgaatggtaaccactcgtgtgaaatttatggggcagattgttaccaattttataaatttgatataaattccattctgttcttaaatgatgatgtctcaccataaatgtgttaagtgtatatatttaaaaaatttcttataaaaatgaattagataaagaagcatcttttttatatggcattgaaaggaataagttgaaaaatacctctttttttgtatctattaattaaaaatattctcatatt

SEQ ID NO: 405672 - DNA, 589 bp, Cannabis indica
aggcgcttcttgcaagaaatatcgaaggcagacgctgattcttgcgagaagcagcctggccagaaccccccagtgtgtcctttattcctgtggcaaagcctttgtttttacccaacgtcacgattgcttttgaaccaggtgatttggattttaaaattatgcctcccaagccacgtacctctaaaactcctcaggatcccaacgtcaacttcgaggttgagttgatggaatcgaaggtgggatctatctcagactatactggtgagatgctaaagatgtgtggaatttcacttgggcagtcatgctaggttaggtcagtatgagagggtgaattcagttgctaccctccatgctttgccagcagtaacccaggaaccagtagtgagactagtactagtggtacaactagtatgggggcctgaagccttgagcatatttgtgcaggggccatcctccctcttcgggactacttcaaagactacataaatcatattggggttgccccattgcagccgaatcccatttcctacaggatttttgctagtttgaaagttttgtacaaaattatgaattggggttgtcccacacc

SEQ ID NO: 405673 - DNA, 503 bp, Cannabis indica
gtatattctttatcagcgagaaggccctccgatctcaagttagcttcgctcaaaaggaagttgcatgatcgaagaccgtagggaagagttaacgggcgcctattcctactaacaatctcggggctagggggtaggtcgtcgtcaaaagagactggcagaacaaacaaaaaaattggtcataaacttgaaaaaggaagaattcatgcaaatgggtaaaaggagaaaaatcacttacggtgtttgcgaaacgtggttgtgtcgatgggggagagaccagaagtccagaagaagttgttcttaaaaggatactttctttggaaagtctacaataattttaggctcgctgggatgaaaaccgagaaagaaaaaagcccattgcagcgttcttcctcgatagaacaaccttgactgagtaaaggtactcaatctctaatggagtgggacacccccaattcagaattttgtaaaaaactttcaaacaatcaagaatcctgtagagatgg

SEQ ID NO: 405674 - DNA, 636 bp, Cannabis indica
gtaatgggacagtttgctggagctgttcaacctttcagatactaagttaaaattttactcattgtggaatgaatggtcactcgatcgagagatgctacaagctgaatggatatcctcctggacataagtaccatggaaaatttcctaatcgtgatgcaaaaggaaatgctggaaaaccagcaggagttaacttttcaggagctgatgaaggaaagactgagagccttcaatggaaagagatcttatctctagtttgtcgagtgtccaatgccaaaagttgatggctattcttgctcaaaaggccactgagaacaacactcaaaatgcctctgaagatcagcctgttatctcccacttttctggtatgaaaaactctacccatagctcttattggataattgacacaggagcaacacatcatgtgtcttatgattttcatttgttcaaaaataccactgtcaataccaagttaaaaactgttttgatgcctaatggattgcatgctgagatttcttgcataggaacggttcacttgagtcctgaacttattcttgaaaatgttctatatgtgcctacctttaagtgtaatttgttgtctgtcaattcattaacaaccacaactaattgcactttctt

SEQ ID NO: 405675 - DNA, 753 bp, Cannabis indica
aaaaaaaagataaagaaaagcccctgatcgatttaattatgctgaattcattgcatatgcatgattggagaagaggttgacagttgttaggttatttttagattaattttagactaaatttagtatatgtttaatagttttaaatcatgtttggagcattttcacgcttgttatctaggaataagatggaaaaaaaaaagataaaaaaaaaatctcacaaaaaaagatgatataaaaaatagagaaattgtgcaataaataaagctaaacttcaaacttgaattcaactatgttctgattagattttaaaaaattaaaacataaaagttctagatctctcttttatctttccagaatatcttgaatcgtcaaattttgagcaatgtcgagagagttatggacaaaatactatcagtcgatgcaacaaaaattcactgccccttataatcctaaggagaatagaatggctcattgtgttgttgggaaaaatcctcaaggtatagcatctggatttatcttgcatatcaaactcatagtaaacataataaattaaaataaataaataataaattagtactaaaagataaaatttagaacaacaaaattaatactaaaactagagaagaaaaccaacagttcagaacccactagctttcaagaagctatgaaagtaaagatgatgcatcatggttgcaggccatcaagaagagatgcagtctcttaaaaagaacagaacctaagattattgtgaat

SEQ ID NO: 405676 - DNA, 946 bp, Cannabis indica
atttatatagaagaaataactaaaaagtaccagtgattactttgttatttttctatgtagtaaagatttattatattggtaccaactaagtattaggtcctatattagtttaatagtaaaaaaatttaagagtatcgttagcctatcgcaaagtgacacgtactaaaaagttttaaacaccacttctgtccaataataatgttatggttagtaattatttatgttgtttaataaattaaaagaaatgttaaggtgcataatttattgttattggtgcaatttattattttaaataaactttagagaacaagagagaaaaatagatcaaggtaaacaaaatgtattgcatttaaatgaattggttgaattacactgattgatagttagtttagtctttatatatataaagagttagttagaacagagaattagttacaatgacaacctctaataactaacacccaaaatagaatctaacaactaactaacctctaatcctattctcaaacaaatatcacattattttttattaatgctaactgatttcacttataatgtctcatattaatataatgttgagcacttttttttttttgagtgataataatgaactaaataataatgttccaatattaatattattaaattaagtataattgacccaatattaaattatattataaggtgcatctatctattgtggtgctagttatttctcatattttatttactagcaggctttttgtccccttatatatgaacctttgttaattattggtttcatcttcatattaaggtaatatatgagctttaagttaatatattaagggctcgtttggaacgctgtattaggtcgtattgtattgtattgtattatattgaattgtattttatgcaatatttttatgtaaaactatacgtggtattaacttttatggacacctaa

SEQ ID NO: 405677 - DNA, 501 bp, Cannabis indica
actagcaagaaaagcataacacacaataagcccaaaaaacacgacactacatattaaaaaatcatataatttattcataataataagatatgaatttatcaattataaataagtataaaataataataaaacttataatactgaatactataattctataattaagactattaaagcacgaaaattagaattatatattaatttatttatagggtgtgatataaaaatttgagtatttataatataaatatttaaatttattaataattttttatatgattatttataaaatattgttcaaaagttatatacatataatttagtaactgtaaaatatatatatataagtaaagcacgaatttaagtttggatataaaaatgggttgacctatttaagaaatacgggccgataagaatataacacaacacgaattcaagcacgacacgaaaaatactgggtctacaggccatgtcgggcctaccctttaaaaatgttggcac

SEQ ID NO: 405678 - DNA, 823 bp, Cannabis indica
gtatagtctctagcgacctcctctttgatttcttcgatttatgcatgcttggtgaattttgttgctgtagttgctgctagtgtttgttattgttttcagtgaataaattatgcatagatatgttgatttaggcttgttatgatggctggtttgatgtttgagcaagctttgagttttagaactcaagcttggctctctaatggcatattttgattttgtgcatgttgaggtgttttgtttttttagatatgttctatgtggtcttaatatcaggtctggaaggtttggtttaaatcggggttgatttgagggagttatgattttttgttggtttcctgcactgaaccgaaattcaagttcagggggacctgttggaactcgaattctggttggtccacagaaaacccctctgaaccggaagtccggttgggaactggtctatcgattggggcaatttttgggaccctagtttttcccattttttagatgttaagggtattgtcatgctattcatcgatagggaaacttttagttttaagtttatgtccccagaaagttatttagcgtgtcacttacctatgttatgattgatgtgatttgaaagcctgtaattcaccgagcagttgttccactcaggttgcctggcacaccaaaactcggaatcaaggtaagattagtataatattatacatatgttatcacatgtttagcgtacatgttgtttatgcttgttagagtacattgatagtagtaatagtatacttagagttgtactgattattgataaatgtatgttggctgaaatactgatcgatgctgtcac

SEQ ID NO: 405679 - DNA, 729 bp, Cannabis indica
tttttttttttttttacttcttgataccatattagaattcaagataagatgcatggggttccatatcaaaattaactaattggctatgagaggagtaactcatagatcttatatattctattatatttccacaccttatagcaatgtaagactctctaacgtattaagttgtattgtattgtattatattaaattgagctatatattatatttttatgagtaatttacgacataaatacttaagtttaattctcagttataaataaatatctaagtttaatttttgtcggtaataatatctaagtgttaagtaaagtgtcacatgtggtaattcctaattggtccacgttatatattaaatttttattttttttaaaaaaattagcttaaatatactaaaaaaaataacacgtggataatgatttgacatttaaagatcaaacacctacggagtttcaaaaatataatttaagtattataactgccaaaaattaaacataagtatttatttacaactgtaaaataaaacttatgtatttatgccgccactataaaaaataactatatttagtgataacttattagtcacaacataaattttttgtgactaaatgtgacttttagtcataacaaaaaattacttgtggctaaaacataatatttgaatacaagtcgtcactaaattagttttagtcacaacaattattgtgactaaaaatacatttagtc

SEQ ID NO: 405680 - DNA, 1942 bp, Cannabis indica
atgaagctcaatctcttattcgaaaagagaggtgtatggttgttggatctggaatgagtattgatatccttagggaccattagcttctgaataaagagaactcatttgtggtttcagattaccctagtttggtaaatcaaaaggtctctactcttatgaagattggagaagcgtcttgggatgaagtggttcttaaagacatttttttaaagacggacgtaaagcttattttgagcattcctttgttcccctcaatgtttgacggtatttggaagtggaatggtgagagttctggtgtatattcgatcaagagtgcgtatcagcttcttcaaaagcttaaaggtgagttagttggagttggtaactcgatcttttggaaagagttgtgggatttgagagtgccacctaaagtcaaggatttggtttggagggctgcttccaattgtcttcctacccatatccaattaggcgtgaaacatgttcctcttcccttgttgtcgtgtccaaggtggttacgagttggagagtctatttctcattatcttgtggggtgttcgtttcttttgcttgctagcagatgacaggcatttcagtgatagagattggtgacaacttttttaggggatggcttcatgatagatttcagtattggaattttgggatgtaacatagagttattatgctttgttaggcgttgtggtatgtgcgcaatgacaaggtatgaaatggtaagaataagactgtggttctattggctaagggtagttttgatcaatggagttgtgcttaagataaaaaatttggttcctctttgttttctttacaagacggcgaagggcacgagcactggattgtaccggttagtaatataattaaaatcacagtcaatgcaattatctttagcaatcagaataagtataggcatggttaggtgtcgctgaacttttctggtcagcttattatggctcagacaaccaaatggactattggggttaagaaagtgttaaggtggttgaaagaaacaagactgcatgatgtggtggtggagtcggacagtttggtcacaatccaagctatccgaagttcgttagatatagcttctatttttgggttctacatttcagagtgcagtaagattctttctagtttgaataatgtctttttaatttttgtcaaacgatcttagctagaacatcatggttaaatgatagttgtacttattcgaattccacgatttcaagtagtttacgtgatttttttggccagcttattatggctcagacagccgaatggactattggggttaagaaagtgttgaggtggttgaaagaaacaagactgcatgatgtggtggtggagtcgaacaatttggtcacaatccaagctatccgaaattcgttagatatagcttctatttttgggttctacatttcagagtgcagtaagattctttctagtttgaataatgtctttttaatttttgtcaaacgatcttagctagaacatcgtggttaaatgatagttgtacttattcgaattccacgatttcaagtagtttacgtgatcttttaggtcagcttattatggctcagacagccgaatggactattggggttaagaaagtgttgaggtggttgaaagaaacaagactgcatgatgtggtggtggagtcggacagtttggtcacaatccaagctatccgaagttcgttagatataacttctatatttgggttctacatttcaaagtgcagtaagattctttctagtttaaataatgtctttttaatttttgtcaaacgatcttagctagaacatcgtggttaaatgatagttgtacttattcgaattccaccatttcaagtagtttacgtgatctcttttaaatcttttgaatgatttaagttacgaaattgcatctttctattcaaaatatatatata

SEQ ID NO: 405681 - DNA, 705 bp, Cannabis indica
ttcataaaatgtagactaaatatcaaatcaaatatcaacatcaaacccatcagattacttgctttaaacttttgttcagattcttgagcatcgtctactagtgttccaagaacatcaattatgggagagaataagttaataagcttaccaatgtagcataatgtgaatcccaacgagtatcacttggacgcttaagattggtttcttgattagccctcttccacttgcaatttcaccacgcttgagtgcttcagaaataacaacatcttgcttttctctaagaatatcacaacgcttggaagaagatccaacaacatttatcaccctagttaccacactaaaaagatagccgactagaatatatttctttgccacggctactagagcaagttgaagttggtgagcaaaacaatgaacataaaaggctgatggattctctttcaaaataagagttttaagacctttgaactctccttgcatattacttgccccatcataaccttgccccgcaatttagatatgctcaaccatatctagaaaataatttatcaatagcacctttaagtgacacagctgtggtattggccacatgttcaatccccacaaaacgttcaataacatgtccatctttatctacataccgtaatacaacagccatttgctctttaatagaaacatcacgagattcatcaactaaaatagaaa

SEQ ID NO: 405682 - DNA, 823 bp, Cannabis indica
gaaaaagaagataaatacaacagagtactgtaatagtaagggtgtttcttggcaagagatgaagtaccttgcagatacagaagagggatccctttaaaacaagatatacaagatctcaaatcatgggtatatcttatatatctccttacacttttaattaattctgtatatactattttatttttattaattttatcaaacaccaagaagaactattataatattgttgctaggctagctttaattatcatgatataattaggtgggtttttagcgtaggcaatgatggagagcagagggggcagactttatttgtgggatttttatttgcatctcaataataagagtggtagtcttctatctcttactagaatttcttagtcaatatttatactagaaacatatgttagaattatttttttttttaattttttatagcagtgttcgttatacttataatattattcctgtaaatttttaaaaattttaatttcgaatagtttaccgtgctaaaaatacatctgaagttttttggacgcgtatggtaaactagaatatcagaagggatgatactgaaaaaaataaaaattaaaaattaaaaagaaaaattctgacatgtgatttcgaagtaaaaattgactaaaaaattgtaataagagattgtaattagcattccaccctcaaaaaaatatatctcattttattattttatttttgtgtaatatatatatatatatatataaggagcttcttcgtaccggggctacaaaaaaacgaccccatcggtgggagtgtctcggagccaatatcagggcgtgagacg

SEQ ID NO: 405683 - DNA, 846 bp, Cannabis indica
caaaacaaccacctcgacgagtatgtcacacccacgctagccgtttgtcaaaacagtacacgatgtcgccagaaagtcgttagaaaggggcggagctataaaaatgttactagaaaaagtagaaagttgggtgaaatagcttagtgtaggttgttctcctcgatgaactaagcctagtggtgaagacagttcgtcaaacggacaccggaggtggccggaaaatccgttcaaagtttgaaccgccaaactttgacttgcgatcccgagctaacagcgacaaaagaagtagcgctgtttggggggtgaggtcatcggtacttggacttttgattggtttggcacgtggggttggacggtggccggagatgggtcaccagagagtggtcgtgatggtggttatggcttctttgaagcttgaagagagagaaagagaaagagaaagagagagagaatgctgatggtgatggagaaaaacgttatttattttatatatacttgtttctttatttatttattatattatatatatatttatcattattattatttatttattattatatatacatataaccttttgactcggtcaaaactgactcttcacattctcccttccttaaagaaatttcatcccgaaattttaaagtacagcctcaagttgaaaattaaacaagtgaggatacttcatatacatctcagactctaactaccaagtagcctcgtcttctctgtggttattccataagaccttgactaccggaatctctctattccttaacacttttaactttctcgacaagattttgacaggttgttctacataagttactgttgggttttgtgccc

SEQ ID NO: 405684 - DNA, 955 bp, Cannabis indica
cggttcagggggacctgtaggaaacggtctgtcggttggtccccaacgaaatcatgtagaaccagaattctggttgggaactggtctatcagttggggcatttttaggaaccctagtttttctcatttttttaatatttagagtattgccatgttatttatcaatagagaaactttttgtttcaagtttaactcaccgaaaagtgatttagcttgtcactcaccaattttacgaataatgtgatttaggggcctgtaatatgtcaagcagctactccctcaggttggttggcacacatgaattcaaaaacaagttaaaattagtataatagttgcatatatgtatacatgttcagcgtacatgttagttgtcgtcagaataggcaaatatatagccattagattagcatatcagtgcattggtgaggtgtacatagagttgcaccgagatgccaatagatatatgccaggctatcaggtagtgtgagttatctactaccacattagtacgattagagtaccgagtataggctggatttgcagtttatcagactttgtcgagaacgttcttgactcagttagtagattgtaatcaggtgtatgggcgcctggttgcagtctggttatatgtttatgtttatgattatgcttttcttactaagtttgtcaactcacagatattgtttccatgtgtaggcaagggcaaggctaaggttgagtagccgtgagagcaagcagatggagattgtacatgtcgagcggttaggcttggagcgtacggtcttcgggacaacaggacttattttgcttagtcgctgggcgtacaaacttttgtgttatgcgctataaaaactttggtaaatacttttgtaaacaggatcgcagtttaataaaagtatgttattttgatattatatttagttaactaaaattttaaattattctacgattttcaa

SEQ ID NO: 405685 - DNA, 1106 bp, Cannabis indica
ttatataattaaagttgaatctaaaattaactaagaattaattttcaatttaaatttaattttctataaatatattaatcataattcgaaatcaattgtattttaaataaatacatttttgaaatagtattaaaataaaataaaataaatcttgaaaaaaattgttctaatttatgttgatctaaaattaattaataaattaattttcaacatatatacaattttctattttattaaattttacaataattattcaatatttaagtatcttgaattaaatcaacttaaatataaaatttttatatatagaaaaaatacaaaattgtttacttagaaatttattaatataaaatttatttcataaattaagtgttagtttttctaattataatatattttaatctatttattttagttaatcattaatgaaaattacttaaatttaagttgatctaaaattaattgagatttaattttaaacacaatttatttttaaaattccaacatttttttaattaaaaaatattattcgaaaataaaatgataattaaaataaaatgaaatgtatattttgaaaattattctaatttaattttatctgtcattaataaatttctaacttaaatatagttttctatttaattaaatgtattaaaatagaattaaataattaagtatcttaaaataaatcaacttaattactaattctatgtttaatattcaattaaaaatattctaatttatgttggtataaaattaaagaataattaatttttaacttaattatatttttctatttaattaaatattagaaaaatacaaattagtttactagaaattacttatctagaatttatttaattaaactaagtgtgtttttaaaaattaattttaacataatctaataaaaattaatttaatttattttaaaattaataatgttcctaatcaatttttaattaagttaaacaaatataattagcctaatacaattatttaaataagataagtgagccttcatagttaggtagttcatgtgagagagggctaggttcagtatgtcgtacccactactttggccccctaactctcacagaaggcccaaa

SEQ ID NO: 405686 - DNA, 623 bp, Cannabis indica
taatctatgcaaaataaatataacacgaaattttacaatgcacctcttaaaatggatatatggatgcatccttatctgttttagcatctgaaataattttttagaaaattttttttcatggtcatgtatgttatagttatttaagacatcctacaaaattttaagaaatttagaaaagtttaacacgccgaaaactactttcaaacagtgtattgcacgcgtgactgttttattttatacgcgtgtacaatagactgtctgaacattattttttatattataaattattcagaattactcaaaattttgtaggttatcttaaatagctataacatacatgaatatgaaaaaagttaaattaaattttttttctagataccgaaataagtcaagggtgtatcaatacatcccgagtgcattgtagaatcaaccaatataataaaataaagtgtattcatattattttgggtttcaatttggtggtaatgcttacgtgagcaaattaaggctgccgccactttccaattttcatgacatgcatctataaaatgtaagaaattgtattttcagtataattctaattttttatatgtgttagagattttattacaatggaagaaaat

SEQ ID NO: 405687 - DNA, 802 bp, Cannabis indica
cattcaccaactcttgagaaaggatgagcaagagaatgaaagagctagagtagagatgctggatctacatcgaaggatggctacaacatctaagggaaattaagaaggatgatgaattcgacgatgaatacccctttctcaagggaaatgcaaatagaagcacttcacccaatttcaaggagccacacatgatgccatatgatggtacaactgatccaaaataccatctaggtgcttttaatgagctaatgaagatgaaaaaagtgtgatgcaaggcaaggtaacaatgctttgtggttacacttaaaggggtcgcatattagtggttcaagaggcttttaccaggagcaattacatcctagaaataattttcaaaggcattcctccaatagcatcaagcggagagtgattacattgtgtgtgtaatgagtatcaccaatgtaaagaaaagagagaaagaaagcttaaagagatacatccaacactttaatgatgaagttgccaaagtaggaaggatgtccaaccatgaccataagtttgccatagctgttggaatatgccttgggagtagattatggaagagtatgctaaaaagagaattggatggcattgaagacttctacgagagagtggaaaaatacatttgtgtcgaggaagaaaacggagtcttggagacagacacaagcaagtgtactttgggaagctcgccaaacccatgcagggtctattagatagtacccctaatactcgtaagccgaaacatccaagtgaagtctctactatacaacccataaaaataaat

SEQ ID NO: 405688 - DNA, 329 bp, Cannabis indica
aggatgatctgatctgggaacattcaacttctgggattttcacagtcaaatcaggctatcacctcagtttttcctctactagctcttttgacattccctcctcttcctctccctcgccttggtggaaaaacctttggcatctttcgattcctcccaaggtgaaacatttttctttccgtgccacaaaccaaaccctccccactacaaaaaacctagctattaggaaaatcatcaaatccccgggttgtagccgttgtggaaaccacgaagaatcggtgtcacatgcgctgttctactgtcagagtgtccgaagagtctggtaaggtacg

SEQ ID NO: 405689 - DNA, 789 bp, Cannabis indica
aattagtcaaatagtcattatggtacttgatccttttataatcatttaaagcttgtttaatggagattgtcttatcatttgggtcgtccattcctagtaaaaaaaaaaaaaaaaaaaaaaaaaacaatggaagtttaaagtgtttcttagctaagagctaaagaataatagaaaagtatcgttgagaaaattattaccattttcagtaataatgatcggaggatttccatacttttgtttaatataattcattaattttttcatgccttcaggtactatgtacaaccacatagagtttgcctacatgtcatcaaatgttaacacacatttatatagtttatttagaaacattaaataaatatacatcatatatcacaagtcaatttgtatttatacatatacatcataaaaattaactcagatacccttgtttactaattggttggagaaaaataaggagcctgataaaaaatcaactataaaaacaaaatagtatatatatatatatataagtagacacacgcagagatgtttattggactatatctaatatttttaagtttattcagatctgatttaaatatattggatgttaaattttattatcgtatgtaatataattaagttcaatattagatgttggattagagcagttttatccattgaatgtatttcattgtatatctattggtttaatttgtaaattatcttaattttttaaaaaaccaaaatacctttttggtattcagattggatccattcaatatattagatcaagtatgtattgga

SEQ ID NO: 405690 - DNA, 874 bp, Cannabis indica
atgaattgtcatccagtaagttaatattttagcaaattgtattttaaaaaaatctatcataaatgtttaaatcaccaatattttaattagtatatgcattttgattagttaaataaagaattaaagttacaaataaattttaaatcattacaaatacgatatttttttgagaccaattagttatgatttcgataagatacaaattggttacttttgataaaattatcaatcttaataaaaagacgatggcctgattaaaaattctataatcaggtatgtctatacccatatatgtcaaataaatttattagtttattttggcaaattgaaacaaatttattctttatttacatatttcgtatagcctatcatcgtatatgctaacaaatttattagtttattttggtatattaaaataaattttcatttttctttcgtatattagaataacaattaatttcattttatatagtctaccattatatatgtcaataaacatactaatttctatttgttggaacaatattttattttttttaatacaaagcaaactataatcaaacataatgattacattaaaaaaataggtcacaataatactattttattttattttatttaacaagtaaatataaatataaaataattttatttagtataactcataatttaaatattatttatttgttggtaaattaaatataaaagaaacttttgaaaaaaaaactgaaaagaaacttaaaatactaactttgatttcagctagtaaaaaatatatgcttttcatgtatcaagataattattttaaagtagtagatcataatggtgtaatttttgagtaccaaataattattagtgtagtaaaaaaaaatac

SEQ ID NO: 405691 - DNA, 806 bp, Cannabis indica
cagccgtgctaaaacaacttaaggacgtcttaagtgtctcaccgagctgctgctttatattggttagcgaggccgcttcgggtcgtctatccctagctttctggaactatttcttaaaatccctagacagctgcttccaagaggtgattaaatgatgtaaacttgttaaactagctactcactgctccaacaagcgaggtggggaataaaatatagcataaattgttcgtcacattactcactctcattattgtgttaaagttattcaaatgcgagactggatcagtggttccgtcatatgacgtgacatgcgggtttttaaatccagaaggaaaaggggtattcattatatctggatgatatggctcaagcttctcgtctgagtcgtatctagattgtttacctagttcccccaattgatatctcctgaacttgtcctccaactcatttatctgcaattggatgggatccttttgctttggaccaagctattggcgaaggtcaagtttcttccaattcaagtgctctcgcagatccagatgggagtaattgctagcagacctcgtctaactcatagatcacgtcctactcatagattttgtcattgagtaggcttgcggatttactggctcccatactttctcaatcattagcttgttgagtactttctccacttcgagtcgatcgattgtgggttcttgactgcctcgaggtcacacttgcttcttcacactctattcttcccccttgagagtagtttgtcgtatttcccttattagggtctgtacgagtcctcgctctatggg

SEQ ID NO: 405692 - DNA, 560 bp, Cannabis indica
taataattcgtaattattcccaagcacaagaattataatgttgttgccttgttggtcaattcataataaatcagggaaatatatgtatatactacgaaaataaataaataaataaataaataaaggctaattagaatttttgccctgaactttgatatgtattaaattaaggtcgttaaaaatgtttcatgaactattgagacggttaaatttaaagattttttttccaattttagtaaaaaaaatctggatgaaaattcatggggcatgatttagtagttgtaaaagttcgaggggcttgatttggtagatatcaaaatctagagagcatgatttagtacataaataatcactaaaatagtaaaattgaatgaaattagacaaaaatccttaaatccaaaagatacattttaacgaccttaaaagttcaaaaagcatgacttgataaaagagcgaaaattttaattagctataaataaataaatgaaaattgcattgtgcttacaaaaatatatatatatatatatatcaattgattgagtgttccatcgaactttatt

SEQ ID NO: 405693 - DNA, 594 bp, Cannabis indica
agagagagagagagaatagttggagattgtttttcggttaggattttgggcggagggaacaacaaggggatttgagaggagatagtcacgtgagtcacgtgtgaatgagtgtagcggtgtggtgggtgagtagtgacattactttcccatggtttatttggaccgttattgggcctaggttcagtcctgtttttagtttttttttgaaacagtcctgtttttagtttatcaggagtttttacaaggaaattaaattgtatacttattttattttatttattttaatttttacatttatttttatatttctttaagatataatcactcttatagatgatgtccttattatattctataagttaatataaatcatgtgctatacttaagtaaaaagtaaagatatattaagtaattcactcataaaaataggtaaattttaatgaaatataatataagggtatttttaattaatagacacaaaaaaaagtattcttcaacttattctaatttttacactgtctttgaaatttttatttttttttccttttttttattagtgtagggtaaatttttttaaaaaaataatgtgtaagt

SEQ ID NO: 405694 - DNA, 1122 bp, Cannabis indica
gtcccaagtcacaagtcccggccgggtccaagtcccggtccgagttcttgtctgagtatggatttacgtttgggtcctattactgtctcatgtctgggttctagtccagacctagtctgttatattgggttcgagatcgggtttggatcccggtctgggtctgagtctaggtctggatcccggtcttggtctgggtccaggtataggtacggatccaggtccgatcctagattcaaacactgactacgggttaggtccaagccttaagtctaaattcggatctcaatcttggatctcggtcttgttccagtcccaatcccgggtctacggctgggtccttaatttgggtttgggtcttggttcggggttgtgtccctgtagtcaggtcctcagttttgggtcctaggtcaggtcccgtgtctcgagtctagggtcaagttttgggtctccgtcccggttttagggcctagtttcaggtccaagtgcctcatctaggtcttgattcatggtccagatctgggtctaggttcgggtttggggcccaagtcccccatctaggtccggatcctaggtcccggtcaaggtccaagttcaggttcgagtttggctctccaagtttgggtccgagtctaggtcccattatgggttcaagtttgagtctgggtccgggtctcgatctgagtcaaagtccctattcgggtccgggtcggggacacgattcgggtcccactcaaggtctagatgctagaccaggttctgggtctgggtttgggtccgggtttaggtcctgagtttaggtctaggtttgggtttggatccgagtctggggaatctagatcctggtttaattctagctcatgtcttgggtcctggttcgggtcttaggtttgggttccaagtctaaggtcgggtcctgtgtctcgagtctaggttcaaattttgggtattaaacctcggttctgaggcccagtgttgggtccaagtcccccatctaggttcggatcctttgtccaagtcttggtccaggttcaggtttggggccaatgtcccccttctaggtcatggttcggttcttaggtcccacgtttgagtcttgggtctcgggtctcggtcccgggtccc

SEQ ID NO: 405695 - DNA, 772 bp, Cannabis indica
tactaagtctcgataattgatttattattcaattaagattcacattattaactttgtcaattatgagtaatttttacactcattgaaattagagaagtaaaataagagaaataaataaaaaaggtattttaataatcttgacattatattgttaaaagttaataaaattatttaaattatattgtatttaataatgataagtgattaataaattaaattagtatttaaatataaaaaatattggggcttttttatttttacacttcaaaacagtttttttttttctatttttacagaattctacataaaaacctctattgcaactagcgctgcaacctaaatcgcaacaaaaaattgtatagaaacccctattgcaactagctctgcaaccactttagaaatccaaaccgtaaatttgaaaaaaagttataaaaatagtacatggagtaatttcctaaaaatatttaattgtggtaaaaataaaaagagaatacattttaggtccaatgtaggaaaatccataggaaaatttacatagattactaactttttccaatttattacatttatactgttaggcagcattttaatcttttttacttgtgtatgtttttgggtttttatacggcagtatagccttttttgttacaaaggttttttatttttttttactttactcgtatcattataagatttttccacatcaaaatttgaaggttttttttatttagaaaagttgattggacatgggatgtgacaaaagtgacacatt

SEQ ID NO: 405696 - DNA, 1053 bp, Cannabis indica
tttaatatctactaaatcatatcattcgaactttgacataaaataaatcaagtctcttgaattttcatccatgttaggcttttattattaaaattgaaaaaaaaaaaaaaatccttaaaatctagagataaaaattaataccacagaaataagtaagcgcggggactcgtccctaatagtgtgaggattctccgtcttgatagttaatgagacggtggtgaggaacaattttaatacctgtagtagggatggagaggatcgagaataatactaccgtattcgatcccgatatagatacatagtttcattttattttgaaggtatataaaatagagttattctacaatgcaccaccttaaaggagatgtactgatgcaccatctacttgtttcggcattcagaagaattttttagtctaatttttttcatattcatgtacgttatagctatttaagatattttacaaaattttgaaagattctcaataatttataatatagaatataatgtttaaacagtctattttacgcgcgtataaaataaaatagtcacgcgtgcaacacactgtttgaacgcagtttatcggtgcatcccgtttaaggggtgcattatagaatttttctataatatatattattgataattaaaattattttgattatcatccataatcatatcatatgcttaaatcatgaagatctaataacggtaatgaactagtaatcattgtagattacaagtgtaaagatatttttttctcgattcttagtttcatatttatttagtttttaatttgttgggagacttgagaagtataagattatgatactatacttgggttgggttatgtttttaatttttcaaattttgagacatatttattttttattttttattggactatgcttctttttttgtaactatgaggcagatttgtcttttattttctatagattatgaaggtataataaatatttgtgaaaatattagtttaatttgaatttaaaagttttttcagttattttaaattattaatttttttttttctatttt

SEQ ID NO: 405697 - DNA, 781 bp, Cannabis indica
tttttttttctttttgcagaaattaattgtataagttgaatgtattttgtttgtatcctagagaatattaaactatgtatgtgtaagcagcgacggacacagtaataagagtgtagggtcaatagtccccactaaaaaaaagttaatgtgaaaaaaaattaaatatcttttatttaattaaataattatacaacaaaatagtaaaaagtccccacaaaatagttataattttaatgtaaagtaaataataaatatttttataacaattaagctcccacaaataaaaaaatctggatccgtcactatgtgtaagttcgattctcatttaaaaaaaaataaaataaatgagcgaatggaatggccatagaatatcgtttttttgcacttagtttatccaaagataacatcactatatttacataatacacaagatacatatatataccaacacttttcaatggaaaaactaatttaattattattattatttttttatgaaatttaattataaatattaattttaaaaatataaaatcattaaaagaaaaatttgaatatctgtatctaatttagttattgatcaataaaaaaataacataaataataggggtttttttatttttactactttaaaataagttttttttttgttcattttttacgtaaattctacaccgaaacccctacttgtcaactagcgttgcaacttaaattgtaacaaaaatacgtgtagaaactcctattacactagcgctaaaaccactttagaaacccaaaccgt

SEQ ID NO: 405698 - DNA, 726 bp, Cannabis indica
ttacagaaccatgttcactctacacatcgacggtgagctccccgtctgtgcaatttcaagggcagcctcataaaagaaaatgagcatcgtgtgatgcataataatagtcatagcttaatttgacagtatctccaacaacgaacaagaaagtgacatatgtatatgtatgaatatgaatatgatcaatgaagatgtttcatatttgtataaatttatctttcacttgtaattaatgatgtcgttcacaattaacttttttttttagatttcaatcgagtaagtgatcaaaaaattattttttaaatttaaagagaagagatagaaagaagaaagagagactaaaatagagaaagaaaaaggaaaaaaaaaaattgctaatgtgatactaaactgtcgtgacatatcgaaaaggtgatagacatggtgccaaataacaatactctattttttaagagaagatcttgatttctatggaatgatctcttataattagttagcaatttttaatattatttattaaattaaaataagtataatttgatattaaattgtattaataataggaaatatttgtactaagctttgaacatttctaaatataattccgcatattgggcttaaaaatagtaatcatcgcatttcaagatggcaaaataaagcatattttgatcacttattaaaatttaatatacgaactaaattgactacaagttactattgttttta

SEQ ID NO: 405699 - DNA, 533 bp, Cannabis indica
ggttacaatacatctctttagcatgtgctattcagtcttggattgtgttatgacagccatgcatgtatgtttagttgcaatttattattcatataccatattgatctaggtccaattactaattgtgccttgtgcaacaacaaggctcaaaatgtttggagcttgtgggcaaatttaagattacctatttttagtacaaattatgataatattgtatttggatagaattttagctagtaatgagtgacgaaactattagtgatgcttgactattatgaaaaaacttttaaatgtctctttttcatatcattacaaaaaaaaataatcacttttagtaacaaatttttaatcatgtagtactaacaatggagatcgaatattcttataattaaagctcattattttaatgagttgtattttcattttgatacttattttaatctattattttaacatatatttatttcattaaaattactaatttaaataactcttaatataaattacaattcaatatttataaaattatactt

SEQ ID NO: 405700 - DNA, 567 bp, Cannabis indica
gtacttttctttcttgctgaagtaggctggtacgattcccgaggccaatctagccaatcgatcaaactaagttgtatacttagtaacactcatattttccttttgagtcagctgagtaaattcttttcttttcgcacttctaacttcctcgttgtaatactttggattgaacaactcgtggagctcttcccaagtaatgatagtaacatcctgagtcagggacaccatgtcccaccatactagggcgttctcctagaattggaatgtgccacaggacactctatcattatcagtcacacccatgaagttcaaaattcttgtaataactgtcagccactgctcgactttcatcacatcaagacctcccagtaagattggaagggcctgcttgcaaaacctttcgtacaatggttccatccgattcactgcagcaattggccacgcttgcacaacacaggtaggagccatctgcattttaggagcaagcactataggagcaccatgctgcctcaagcgtctgatttcttcatcttgctcattgatcttggcttgcattgctacaaactt

SEQ ID NO: 405701 - DNA, 518 bp, Cannabis indica
attgatttgcttggttgacaggtagaatggcaccgttaacctggtttgaactatcaggtatgacctctctttatgaattattagacaaggtctgcccccctaccgcaaggcccacaactggaactcgtaaccggggatttggcggctgacaatttgcagtctgagaagtattcatcgtttaatcttcgtccgtctcgcccagggggatgacacttggaggttgctggcctacagtttggtaggcttttcgtatcagcacaatagctttgtgactacggttttcaatctctgtatgatgagcccttaacgcttccatctctttatctctccactcggtaaacatacgcctttgttccttgaaggcgaggtttaccgcagcgcagagatcttcctgatcatgatgtagggtatttgcatgaccttacacgagcccaagagtagcacggaggttttgtaactcagtatcatctccaaaggtcgtttgagtgtttgtaacaggcgaaacgactgtgttatga

SEQ ID NO: 405702 - DNA, 809 bp, Cannabis indica
aatttttttcacatggtcaggttaaacgggtcaggtccaggcgagttgacctgattctaactaaaatcggccaaaatgttcagtcccactaaatggctctttcagtttgtgaattaaaatttgcaaaataacccatgcaaaatcaagaatgtgtttttatacaagggtaaatagtggcataagtacccaaagttttatgtttttaagcggcataaacccaatgattatttttagcggcataagtgtccaatatttgtaaaactgtaatttgatattgtcttaaacaggcacatataaggactaaatttttgatcatcaggtctagatagaaatatatagtatcagttacttccaaatatttttttaataaattcaaaatagagtctgtattggcaaaattggaaaaaaaaattacagttttacaaatattaagtacttatgccactaaaaataaacatttcgggtttatgacttttacgaacataaaattttaggtactgccgttatttaccttttatagttatctatttatttaagttttgccgccaaacataaatccatttatattatggcattttacaattttgtatacattattttaattaattacaaaatatgtgcaaaaaaacttattgtcattttctcatacatttttatatataattaaaaactttttttcaatttcttttataatatatatatggtaataattattgattattatatatatatggtaatattggctatgtttatttttatgtttacaattataataaaaaacataccaataataatataaatgttataaa

SEQ ID NO: 405703 - DNA, 627 bp, Cannabis indica
agagtattgatttcgaaagtgtttggttctcccctgttcgtttcagtcctgattagtgttagtattaggattatactagtattagcattatactagtatcggttttataatgattaattttttaatctaagtattatactaaaattagtatttttaaccgtctctgtagtattagtattatactagtattaggattagtattagtattatactagtacaaatgtcttgtcttttgacatggttctatatttttctttaattggttttgttttattgatttctggcgttagttattggttcttggttctgagtttgttcggctgtccatggcgtcaagtagttatcagcgaatggaggcagcgaagaaaatggcagggatttttatgccaaaatggcaggtgcaacctgaaatagctgaatttgttggcataaaagaagcttttaagttggactgaccgtcattcgtggggacaagtgattttgaaaactgatagtttaatttgtgttcaagccgtgcaaagctaaattacttgtcatcctcttttggtcttttagttcataatgtttgtactcttctcttatctttaaataatattgagttgtgttttgtcaaatgatctgcaaaca

SEQ ID NO: 405704 - DNA, 559 bp, Cannabis indica
ataaatagcattgagaagagaattgaagaagatatatgaatgaatagatcattattgtgaaaataaaaattattagtattaagtatagtattagtatgatatatatatatatgatttttggtctacataagagggttacaaaattagtaaaaaaatttaaaaaaaaataagtattagaaataataagaatcttaagcatgctacatcaactctttaaaatcttcctttatatatattgagtgattatattatatataaagttacaatatatgtaagtgttttttctctacatacttttcgaataaaacaataaaagtaaatattaaatttagaagttatattacaatttattttattttatgtctctctaaccactaaagaaaaatatggatttgttgtgttatgaaattaaaatttaatttgtatttatgttttatgtactgttttataagatttgtttggttatgataataattgtgtgcactctaatatagcattcttttcttttttttagccttctaatataaaatttgaagatttttttatggatagcaataaa

SEQ ID NO: 405705 - DNA, 609 bp, Cannabis indica
acagcgtcggtaacgaattttattaaaactgatgctgaaagcccttaaaaactgcctctaaaaaccaattttataatagtgataatatatacacttaatatataaagaaatattttgtcaaaaaaaatatataaataaacataataataataataataataataaataaaaaatctaaccttgcgactggtattgctccgctcgattcgtccgctctgtggtgttcgagaggacatctctccattgttttggtggagaagtttgagatggtggttgtttatggtggagaaagtgaagaagagagaacaaagaagagaagagaagaattggtggaaaaaaaaagactaaaaataggaaccctaaatttttttctatatatataaaaggtaatatagctaatttttgcgcggctaatttaatttttttagtataataaatagttacataaaaatataattctaatatatagtaaaattataaatatattatcttatttcatattattataaataatttatttagtaaaaactaaatgcgcaattttattaattattatttagaattatttattaataaatttaaaatttattatatgtagtattttaaatt

SEQ ID NO: 405706 - DNA, 588 bp, Cannabis indica
actttggaaatccctcagggatgggtggtcaagccccgtcgcactccgctccggctgcgagcttagcaggtccctctcaaggctcccggagcaagaggtcctcaaaaggcagcaaccggacggaggataagcggcagaaaagggggtacagtccccagtatacccagtacacggagctaacggactcccaagagcgtgtgtattttgctaccaggaaaaatacgcactatcggcgaccgccccctctgtataaggatagctctcggagggatcccaataaaagatgcaagtaccacaacgacattgggcacaacaccaatgaatgtaaaaacctcaaggatgagatcgaaaacttgatacgattgggacatatctacgaatggatcaagaaccggttgcctcacctcaatccggttcaggcagcaggagctttgcctcaagggtccccagggggtgtagccggagcattggccccagttgctctccccagagatgcccagaaaattcctggcttgctgccaagacccaacgagagagtagccatgatcttaggaggacctcacatcgggggaactacccggaaggagc

SEQ ID NO: 405707 - DNA, 535 bp, Cannabis indica
caggccaccccgcgatttagggatgcacagtttatcctaagctcggagatgaattccatgatttcctttctcaaaaccccaccaaaaatctctgaccaagccatcaatcttgttaaccatacgactggagagtttagtcgtttgcatagcatacattggcagagacaagccaacagattttataagagtagctcgccctgctttagacaaagttttagccttccatccctgaagctttgatgtgaggttatccagaataaaattgaagtccgcatctttctgcctagatctaaaaagaggcagccccaagtatttgatacaaccttcaggggaatcgatccccagagcctccttaatctcaccgcgcaaattcaccggggtatttctactgaagaaaatagacgttttaagtttatttacctgttggcccgaccaagagcagaaattctctaagcatcgccaatatctgttgacctctattagattcgctcgaccgacaagaattaggtcgtccgcaaagaagatatgggaaaga

SEQ ID NO: 405708 - DNA, 605 bp, Cannabis indica
agaggcaaaatcacagtagagaatacgacatttataataagagcatctctaatagttaaattttagaagatgtttgcttatgtaaattttttatttgacaaaacacaaaaatgttataacataagttaagtaggtgctattatagaaaattgtattgagcatatgagattgatgctatctttttttaaaaaaaaagttaaaaattaaaggcaaataagtagtgtgacaatacttataatatattaaataataatttgtgagattataattatagtatttttaaaaatgtgttatagtattagcagtgacgaagccagaaatttagttgagtgagggcttgaataaatattaagtcaaaactaataaaaataatgataaatgtatctttcaaattttcatcttcaacaaaataaaataatactgttgacaaaaataaaataaaatattgtcaatggtattattttattttttaataaagtattattttttttattatttgtattggactacttttaaaatgggcttgattagaataagagtaggctcatgaatcatgattaagatattgagtgagggcttttgtgaattggactttaataaattga

SEQ ID NO: 405709 - DNA, 971 bp, Cannabis indica
cttaacttgcctttctttccaaacagtctaaatacttctgttctcccattttgtcccaatgaattgggaagcgacattttctgccatagagcaggtcgtagggagccattctgatggtacttcgataactgttattgtaggagaatccaatcagaggtagatacttgttccacgaaccttcaaaatccataacacaagctcgtaacaagtcctcaagtatctgaatagttcgtttggactgcccatctatttgaggatgaaaggtcgttctgaacttcaaactagtacccatggcctttcgtaaactcatccaaaactttgatgtaaatttaggttctctatccgatacaatagattttggtatcccatgaagacgaacaatctctttcacgtacaagtcagcattttgatctactgtatatgttacttttacagacaaaaaatgcatggactttgtaaagagatccactacgacccaaactgagtcatacattcctgtggtcctgggcaaatcaaccacaaaatccatcgcaatgttttctcacttacattctggaagtgataagtagtcctgttggtcactgatgttctgctttgatttgttgccaggttaaacatttagtcatataatccaccatgtcccttttcatcccgtaccaccaaaaatagggctttagttcttgatacatctaggtggttcccaaatgcagggaggaaggggtagtgtgagcttcatccataatttccttcttaaattcaatgttactcggaacacacacccgagctttaaacaacaacatcccactactagaaattgaaaagtccttagctttgcttgctaagacatcttctcgaattttaagcagttcaagatcttctagttgtgccattctaatcctctccaacaagtctaactgaagtgtcagattatgcaatattccaatgacgaactcaatgtttgccctagacat

SEQ ID NO: 405710 - DNA, 609 bp, Cannabis indica
gttgaaactagaaaaaccccaattcttgctggttctagggtgcttcgagaaagagagagagggtttattttcttaatttctattttttgtaaaatatgaaatgaataaaaggttttattaattaataacacaataacattgagcataataaatctattaatgtccactaaaggacaaaacattaacttaggcaaaatgatcattccctcccaaaccaactaatcataaaaatcatttaggggtattttagtcaattctaaaatctcaacttttcccgatattcccagtgtctaactatattgccccgctatactaaaaatactaagatgtgattctactagccgaacaacgcgttccaatgttgtcgggcacaaaacatgcaaaattatgaaattccgtaaatgccacataaaatgcattctgaatttaaataagtcatcataaattaataattcaaagctaattaacaagtttcataattaaaccataattatctactaatttctaaattaaagctaagcggtctttacatctacttactgaaagctcggttatatatgttgggttttgtgccctaaataaaacccatttcatataatcggatttact

SEQ ID NO: 405711 - DNA, 617 bp, Cannabis indica
cgaaaaatcaaccttacataaaatatatacattaattataaataaattataaaataaccaaaaaagaatatctaacagtatactgaagtttgtatttttgtatataaaaagttcaattcgtaatttttttttccatattaacatatttttataattttttttttcaaacttttagcctcttatgtaaaaatttttgaattaatattcttcaataattatcaatatataaatgtttattaatatatatttatatgcttaataaaagaaaattttaacttttcatgcttaatttaattacttaattaaaaaaattctttttatattatataaaaaatatgttgggaaatttgattttttatacttacaaatacttaatattttttccttaaacacataacatgtaatatttgtgggatatgacacattttacaatatccctaaaatacccccatttacattgtcccctaccccctctcttcttctctctttcttcatacccatcggacccaaaagtttttccagtacatgcatcggatcccccatcggacccgtcggacccaaaaactaaattttttcgcacatgcatcagacccccatcggatcccatcgggccatcg

SEQ ID NO: 405712 - DNA, 498 bp, Cannabis indica
gttacataaaaattcaagcttagactttgattgaaaagatcaaaaggagaaagcacgaaagggagtaaggcagacttcaaagcaatccttccattttaggaaggagggttgaatacatgccataaccccagtaatctttctttcacaaaaaatattgtgcatgagagagtcatgataaatttttatgaggcaagcttcggcatccacgaaggaaggttgaagttgcataaaaattcaagcatagaatttgacttgaaaagaacaaaaggagaaaccaccttggggagtaagacagttttcaagtaatccttccattctgagaagcagggttgaaaacgtgccataccccagtgatctttcttgtacgaaaaatatcgtgcatccaagagtcacattgaatttttatgaggcgagcttcggctttagtgaaagaaggctgaagttaaataaaaaattcaagcttagactttgcttgaaaagatcaaaaggagaaaacac

SEQ ID NO: 405713 - DNA, 527 bp, Cannabis indica
tcaattagaaagtcggccaaagcatgacctttgattgatgctctcaggtggtaggttacatcaaattgtcccaatttgatcgactactttattaatcttcctgaagcatcatgttttgaaaaacttgtcttagtggttgattttaagactttaattggatgcgcctagaaatatggccataacttgcgagatgcatggatcaggcataatgcaagtttttcaaaagaggggtatctcgattatgcccgtagtaatcttttactgacatagtaaataggctgctggtgttttccctcttctcgcactaaggtcgcactaatggcatgctccaagacagctagataaaggtacaaaatttctccagttattggtttagctaaaactagaggcattgataaatgcttctttatgcctttaaaagcttcctcgcatttttctgtccattctaatttcttattgcctcgtaaaacattaaaaaatggaagacatttgactattgactacgagattgttggaaatattttacc

SEQ ID NO: 405714 - DNA, 504 bp, Cannabis indica
atgctgctgtcaatatttcttctagtgttgtatggacttggtgctctacttcgtaactctaatggtgatgtcattgctgcaatggctaaatccattaaagggtgcatcaaacctgaagaaatggaagcgttggctgtggcttggagtctcaaattgctggtgtctcattgtctgactgttgatctaattgagactgactcattattgattgttaatggattaaagtcttcagctaaatgtctgtcagctttttacttgttacttttctgttatccaattttccacgagcacaaatctctcatatttatagatctgctaataacgaagcccacttgttggctaagtttgctcttacggtgaattcgagatgtatttgattggagaaacttccacctcctcttatggaaattaatataatagtcttttctacaaaaaaaaaaaaaaaaaaaaaaaaaaaaaacattcataaaaattaatacatgttacaaactttaccacaaaact

SEQ ID NO: 405715 - DNA, 791 bp, Cannabis indica
attttattattaatataatttttaagaatataaattaagaagaagaaaaataaaaatacgtaatacaattaaagagataaatattatataaataaaattattataataaaatttctttaaaaaaaattaaagtataaataaaatttccctaaataaaattttggaaactccttaggtgagagcatcacttgtgctctcacttgggaaagcatttttatagcctttgatttataatttgatggtagtaatttatttaattataatttggaatacatataggattaataatttttatttattattattgtaacataatatatgctattaaaaaaaaaaacttgaacaggttaatcgaagcttctaagtttctctctcgcgtatacaaaggagtacggtgttctctcttttgcaggtcggcgattacagggattatgactcaaccgtctctgtagggttcacggtcgttggtttctcttctccgcgctgtcgacgactggcggagactcttggtctatgaacctttgcaatctgcttagtttcgggaaaaagaaaatccttgcaatgtgctgacaaattgttttcaaaagtgtttggttcttgcctaatattggaaacttagagtattagatttagagtattgatttcgaaagtgttggttctcccctgctcgcttcggtcctgattagtattagtattaggattatactagtattagcattatactagtattagtattataatgattaatttttaatctaagtatttgttggactttatgccctaaataaaac

SEQ ID NO: 405716 - DNA, 521 bp, Cannabis indica
caatgttcaaattatgattggaataacaacttaagttatacatttagcaacatgttagtattttaatagaaattgaattcaatttttgtttttatattttctttcttgcaccatttttatatttttcagtatttgactttttttttgttatttattttttcagggtctttgtgggggagttcaagttgctgttagatagaggttagttttttttttttttgtacatgtatgtttggctttggaaatcataacaatattattctaacattaagaacaacaaagtaaaaaattctaatcatattacgagatttgaaattttaaagaactaaatagtttttttgttgtcttacgtatggttgtaaatcattttgtaaatgaatgcaaactgttgttatgcaatataagcaaaagaaaaggaatgttgttgtgttatcttttgtttctttttaggcttcaatactgcttcattcttgcaagatcgtttgttgtgtcctttttggttgcaatttccacatctgatt

SEQ ID NO: 405717 - DNA, 605 bp, Cannabis indica
actaagattattatcatatacttttataaaaatttaaactaatgtacttttttagaagaaaaaaatgacacacatataattattgaaaaaataagatttataccattttgaatattatattttgatgaattatcaaatataaactctatatttttgaaaattatattctgaaccttgttttataaaaaagattactattaagaccttatttttaaaaatatgatcataatattatgagctctatacttttgtatcataacattaatttttttaaaaattatattttggatcataatttttaaaagattaattaaaattagaaatcaaaattgaattatatttaaaatattttcaattacaaccaaactactcttgtttttataaatgattgagtgattaaaaataataataataataataattcaaatacatatttgtcatctttacactttttgctaggattttaatttaggataaaatgtaagttgaacacatgcatgttatatatgaagattcttaggtaggaacattttttatttctcatgctttaaaaaattacattctattttttcatatgacattgtatattgtagctgtaatagcca

SEQ ID NO: 405718 - DNA, 516 bp, Cannabis indica
caagttgaaattaattttagactaactttaattaagtaaatttttcattaatgaatacctaaatagttattttctgtatacttgttgtatttttttagttatatttaattaaatagaaaattattatttaagttaattttattcaagatacgtaaatatttgatatttttcttagattttaattaaaagggaaaattatatttttgttgaaaattaattttttaattaattttggaccagcataaattagaataatttttcagaatttattttattttatatagattttgaaaatgtattaaatgttaaatacacttaatttcaaatcttgcgacatatatttattagaaaatttaatttgagttgaaaattaatttaaattaattttagaccaacttaaatcaagtaattttcataatatttattgagaattattactacaatggaaagtaattatgttcattgtcagatctatctaagtataatcttataaatattaaattaaaatttatattt

SEQ ID NO: 405719 - DNA, 554 bp, Cannabis indica
taatatgggtgaaaacttaaaacttagaatattgataatatatgttaattaacaattgtaacttatagagaagaaaatgaaattgaaaaaaatatatgctacagaattattaactatttaaaagtgtgtatatatcgacaataataaaaaagaacaatcatatttaaattctaacaaaatttgttactaacctaataatattggtcacaaaaatagaatttattgaaaaataaatgtttttttaaatacaacaaatctataaatatagataataaattgtcaataaaattatattaataacaacatagagtctaaatatcatattttagtcataattttgtttttgttaagactcaaggatacttataattacaaaagagctcactttattaatttcaaccaaaaataaaacttaaaactcttgcaaaaattacgagaaatctttttttttaattgttttgaaatttgattaaattgacgtctttaatttgtaataacaataataaaaggaaactttgacatctctaaaattggtcttatgtgttgatatatat

SEQ ID NO: 405720 - DNA, 716 bp, Cannabis indica
ctaataatatctattaaaaataaacattattaattttaaaaatttgatattttatgtttaaatattcaaattaatattttattttgatatttataatttgaagaaaaaaaatcgaaaattgcgtgaaaaaatcacccaaaaatcaattttgggttgaaaatttggttgctacccaggacaggttgccggcagcctcatgcgcgcgctcatgagggagattgcagcctccctgatcgagttttctcagtcgtgtacaacatgtctgcgctcgggacttgggcttgattctgtttgagcgtgcttgggagcgagttcagacaaggtgatgtctgaggcatgcacgcgcgcacgagcaacttgtccaagtgactggagcgtgcaacgtgcacccctcgacacaccttgcaccaatttttaaaccaccataactttctcattttttatcggaatcgagttccgtaaaagccaaagttgcttaatttttcacaaggaatccaaataaattattgtcagaaagaaaataaatttattttcatggaaaaatttcgtaaatcacatacattcatcaaataacacataaaccaacatgaacacatccaaatcaatacaattaacaatattcatcgttttaaatccatattacatgaaagtaaatcattactatggctctgaggccatttttgggaatattttactaggatctaaatttactaaca

SEQ ID NO: 405721 - DNA, 716 bp, Cannabis indica
tctttttattctattaaatttaagtgcactttaactctaacgttagttttataaaatacacattaaacccctaaaatataaattaaaccattcaaaacgctaatttttcaagccatgaactacccaagaaaactactctcccaagtcgtcgactaggattatgtgatctgagtctgcagtctcctcccaatccaagcgcccgtacaccatcacttcgctccatggaaatggtatcgttctagaaatatcatcacttcactccatggggatggtatcgctctaaaaaatctctaatcaacaaccatggtgacaaaggtgcaacatcctttaacctttccaaaagagtccatatgtggtgacggttttaagcggctaatgtatcataaagtccctaatagtaatgttcttactataatatatttactatacactacaagaaatgtcacttttgccagtacattttggtgctggcaaaagttggtattgcgctggtaaaatagaatttacctatgatgtgttggcaaaagggggttggcaaatcaatgttggtattagaacttttgccagcataaaatgaaaagctctggcaaaaaagacttttcccagcgcgtaaatgtgctggtaaaagttagattttagccactgcaaatgtacgctggtaaaactttgatctctttgccagcgcagtttacgaaatgcgctggtaaaagtgacat

SEQ ID NO: 405722 - DNA, 538 bp, Cannabis indica
gtgggagccagaagggcgtgatgtaagtgtgaataagttggatggttgagcggacaatgcatgcatgtagaaattgacagggatgctatttgagatagttgactcgagagttacatcctgcgggatgcacttttagatggcatggtgtgaatgaaaagttggggcggtcaggcattcgcgtgtgggcatgttgtcgaggacgccaagatgaagtggaggaaagacctttacggttcactcaatatactaaggattcattacaagcatcgagatgagtatcatgaagatttattattgttcaggatataaagtcaagaagactcaggacacaggcagtgccagttatctagggtgaaagtctgcaggactcaggtactaagataacaccatggcaatgtttggcctaaggtgaaagtcagcaggactaaggtactaaggcaacatagaaatgtcgaggggcgaagagtcagaatgatcgaggcattagttcaacaacttcatcaaagtgaaagttggaatggaaggccgtatgcgagta

SEQ ID NO: 405723 - DNA, 619 bp, Cannabis indica
ttctaaaattgaaaaaataaaagcattgccgtctcaaacttttcaaaatatgtactcaaaaataaataaataaatctttattagttttggacaaatatgctattatttaatttatttgtataggagtatttcatataattatcttcaaactagatatttacaagacaatgtggattcgaaactagatgagaggcaataggggttcgcgaggcactcaattgtattaaaatgaagaatggtagaatgtgacactgaacatcgatttgtttggtcgtggtgtaaccgatttgccataaaaaaataagaggttaagtgtataaaaattaaagagtaatttgcggcaaaacccccttaactatcaatttacttgcaaaaaaccatccaacctcatattttggtgggaaaaccctccaaagtactattctgtttacattttaagatgccgtctgtccagctcataattttgcccacgtggcaatgacaagtcactaaaaaattatcctatgtggccatattttacaaaataaaaataaaattttaagagtaatttgcggcaaaactcccccaactatcaatttacttgcaaaaaaccatcaaaaaaactttaaggttggatggt

SEQ ID NO: 405724 - DNA, 569 bp, Cannabis indica
gtgataaacttgcacagaaaattcaaacagtaagaacacgaaggtttttatgtggtttcgcagttaaaattctgcatagtccacgagtcaatcttgttagattactgatacagttctagggccttttttcttatgaatttttcctcctttttttagtataacttgcctctatttataattacatcatagggcagttaattacatagttgactgatatcttacaataattatcccctgaaatcatggagtttaattacataccacgtaaaataaatgtggtaaatctttgaaaatcacacagctatgataggtccatttttacctggtcaaggtaaatgtgcattaaacacgtcgtaaactgtaacgctctggaatttctcgttgggaacatggtgataatagccttggtattgagctggaacctttcccatgtcttctcgaggctaatgatgtaagcctcgtcattcctgcgcctaaagacataatgccctatctaaaaacccgcagttcttggctacagatgaactttaacagccaacatcatttgaatgtcagcttctatctgagag

SEQ ID NO: 405725 - DNA, 504 bp, Cannabis indica
acttatattacctacctttaagcctaaagcaccctattttgagcaatagaagccatgttacgaattattaatgacatctaaaatacgacatgcaaatggaacttaaaaatcatatttagtgagctgctaactgctttctttgcttatttatttttgggaaaattatgaaacaatcaaggtttgaatttaagataaagtaacaatgtatagattgtagagttgttacccattgacattttatgaattagattccctgtttcgagtcacaccatacctataaaatttaataccaagttgttacaactaataaattgacatttaaattaaagttcatcaatatctttatataataaaagtgtctatctaacggcattttttggtttaacatttcttaatttaacagaatatacttaaatctttatatattaaaagtgtctatttaacggcatttcttggtttaacatttattggtttaacagaatatacttaaaaataaaagaatat

SEQ ID NO: 405726 - DNA, 614 bp, Cannabis indica
ataaaaaaaaaatagtcacaaaagtgacacgtccaatcaaatcagtaatatttagggtgtgtttggaagtaaccgtgtaattattaggtagagtaattattatggtggtaattacacggtttagtaattacactatattttaaaatacaaggtgtgtttggatatgaggtgtcaattacatatgaatttctaatatcttgtacggcaaaatagttagtaattacatgggaaaataatattttttagtagctaatgtttaatatggaaagtttttcgtaattacacagtgtaattacattcaattctcatgggaggtcatgagaattagagagtgtaattggaacccctcaattatttccaactaggcaacataaccgcgcttcgcgcggtcattatactaattaataaatattttttagttcttttaaattttataatttactgttacgatattatgttatgctgcaaatatctttttattgtattataaaatatattaacttttatgttaattttaaagtagtaatgaacaatggttagtttggtaggatttaataattttattagtaattttaaatttcatattttataataaatttattacatgaaaatac

SEQ ID NO: 405727 - DNA, 679 bp, Cannabis indica
ttgggagaatcaagctaaggtaaccacaaagaacccttctatagtttttgagttttgcttggtttgagtttatgattttgagaattagtggctgttagggtttgggatgtttagcattcaaattttaagggttcacttaagttgattttaacttctactagatgatttagtggtgttttcttggatttatgcaagttggagctttgaactcaaagctttggtctttaatggcaagttgagtttcatttaatttttctgtgaaatattgactataacatattgtatataccctaattaggtactctggaaggtttgttgacgtttggtggagttttgagcaagaaatgaaatttcttgggtggactgatgcaaaccaggtaaccggttttacacgtacgtgtaaaaccggctagcccatttttgttatgctccctgggcctttcatttcctcaattctcattctttctgtgtcctggtcgggtgtttccctatttccagagttagattaacccctagaaagtataacagaacctagagttacgggttcgggtttcctgggattagggttttaagcatgtaacttacccggtttctattatgtgattaaggcatccatctagcacgagacttttcgttcaggtcggccagcacacttgaattcgaaaagaaggtaagaact

SEQ ID NO: 405728 - DNA, 639 bp, Cannabis indica
agattttaatgagatattgtcatcagttgtgaagtacaagacaataagaattatgcttgcactggttgctcaatatgatctagaacttgagcaaatggatgtcaccacagtattcctaaatggagatctagaagaagaaatcttcatggaacagtcagaagcctatgaaaaaggaagtgctaaggactatgtttgtcacttgaaaaaatccttatatggattaaagcaggaaccaaggcaatggaataaaagatttgactcttttattactcagcatggttttgtaaggagcatgtatgacacctgtctatactacaaaggttcaagtattcttcaagctgaataccttctgctattgattagcaaagaaagaacaaaggtagaaagaatcaaagagattctgaaatctgaatttgaaatgaaagatttggggctgcaagtaagatacttgggatgaatatccagagggataggtgttggaaattattttaccaggatcttagatctactcacaagtatgtttattaacaccttaatatgaactttctaaacgatgaataacacatataagtttaggaaccttacattggttgcagcgaatataatgactccttccgttcagatatctagccattgatt

SEQ ID NO: 405729 - DNA, 1693 bp, Cannabis indica
gattgaccatctcgggggtagggactggtcctttcgagagggttgtaaaaaacaaaatattagtcagaaaacttagaatgaaaacaaggattaatccaaccgaccctaatgaaaacaatcacttacgaattttacggaaggtggttgtgctgattagggggaagccagttgtccaaaagaagttatctttgaaagatattttgtttggcaagtctgaaataagtttaaactcgttggagtgagtaccgagataatagaaaccccatgcgtcattcttcctcgctggaatagccttaatagagtaaagatactcgatttgcacaggcatagggcgctcccacttcagaattgtatacaagaccttcaaactggcaaggattctgtaggagacgtaatttagttggaatggggcaagcctgaggttgtttatgtaatccttgaagtagtcacggaggggaattatggcccttgcactgatgtctcaccactggctccctcaggggtctcacctgtaaggcgcgctggagggtaacaactaaactcaccaactcgcactgacctaacttggcatacttgcccaagtttgattccacaggtccttagtatatcacccgtgtagcctgagatagttcgtaccttcgattctattaactcggtctcaaaggtgacgttaggatcctgatgagtctttgatgtacgtggcttgagagacattattttaaaatccaagttacctggttcaaaagcaatcatgactttgggtaaaaataaaggcttaaccaaaggaataaaggacacactgggaggttttggccaagctgcatctcgcaagaaacaatgtttgccttcgatgatttcttccaagaagcgcctgtggcgactagcgttatcttcttgataggctctcactaaatgttccctaaccctagcatcgtttaactctaatttggatgtgggttttgaagggttgggcttataagtgactgctgattctgtaggaaattcaagttctaaatcttccggacgataaatttctaaaccagattgggacattactgcaagaagaaagcaatcccaatccctggaaagaattttagcaaacctgaaggtggtgagttgaaggttctgaaaaaacctacgtattgcctgaaccctaatgttgacccaaatacagttcaaccctaaaaattactaaaaccaaatgagatggcgacgatacaaacaaatgatgcagcaattaaacccaaaaatgcaacgtaacaagcatgtaagatatcaagaagaaaagcacttactgtttgaagttagggtttggggcgatagacagctcttcgacctgcgaatctttgaatgcagtgaggatctcttcaagaatgtgaagtcagaggaaactcgcagaaaaaatgtcaaggacagggatggcatgcaaattctcgggcaaactcgatgctgtttcttagcaaagaagcttaagagtttctcagaatttctaaaatggaggaaataatgcaaaggtggttcctttttcttactttatacccttgaaatcagtttcatcggatcagagagatgtttgatcctacagacagaattcaaagtagaagtggaaaatggtcatttaatgctgatgtacctcgaaatcgtaaaactgccaaaatcagaggatatgcgtttttttcaaaagggattatga

SEQ ID NO: 405730 - DNA, 764 bp, Cannabis indica
catggaggggacacgaccgtgtctcatgcggctcgctcaaacaaaaccctttcagacaagggtgtgtccatagttttccccccacctgaccaaggtctcatgcaaatagaggctacgtgcagcctcctatctcacctagcctttcccatccgcgcgcgcaatttttagtagaattgaaacaaaattcaaaatttagtagaattttgtgtagaattcaaattttttaattaaaatctaattatctgaataaaatgaatttttttattaattttttaattaattaaaaatagttttagatattagtagcctttgaatttaaaatttaatttttccacaaactagccttatggttaattttgaaatttttgtttatttttatttgttttatttattttagttataagattagatattacttattttattattaaaatttgaaatgatcttatttttgtattaaaatagtaataaaacttataaataatctagttagaatttcaaagtttgctaaccatatcagattttcaaaaaatttgttatttttgaaatataatttattaaattaaattataaaattagaaaaatgttacttttgacatttcatcttattgaatatttattttaattaattttttttgttcaaataacttgaaattttgaaaattttgttaattttagtttgaatagaaattttaggattttgtgaccataaaattttaaacttaggatattatgttttatttaattattagtataaaattgag

SEQ ID NO: 405731 - DNA, 1036 bp, Cannabis indica
ttacataccttatttatacttttgccgcaatctgcagctgcagttcattgctcaaaataggctcagcattggcaactggatgttgatgggaactcaaagaaacattcgtattattttggaattctttttctaccgatgttggttgcatctcatcccagtaaaattgctgatttgaatggaatcgtaatttgaggggaattagtttcatcacgatcgtaaagtttcattttttatatatgtttttttgttgagttaacgaatctaatgaatggaatcgtaatttgaggggaattagtttcatcacgaccgtagttttattttttttatatatacatatttttttattttttttgagttaaaagattgtttaattttttgggtttaattattgagtttatttgttaacaggagatcaaatctaatcgttaaatttaacagaatttttattttttttttatttttaagtatattctgttaaaccaaaaaatgccgttagatagacactgataaagatatatatatatatatgtattgatatatttgggtgattggtaaactaaggtgacatttggtaacatttatttaatcagtttgtaaaaataaaaaataaaaataaatactaaaatttaaaaaaaaatcatataaaataacatgaaaaataacatttaaccaatgtcaaaattacataaagaaaaaactaatatacaaataacaaacaaaaaaaaaagcaacaaaataactaaaatataacataaaaatatatcaaaaaaatcacattttatgtaaataaaattttgaaagttgtaaagtatttaaaattccgtacaagtagtttagtatttttttttattgtgattttttttttaaataatcccaaataaaaagccattatggttatacaagatcagtcacgatatcgcaccccatacaatattgcttgcatcccatagcattctcatgatcataataatacttatactagtattagtttcaacaaatgacactaacaacaatattagctatggtgacagacacc

SEQ ID NO: 405732 - DNA, 516 bp, Cannabis indica
aataatttataatttaatttatttttagtatgattatgtacattatatttgtaacatacattttactatatggtttttttccatgtgtgtaaaaaagaaaaatatagtcattgtttgaactatgtttttagcaccataaattatgagaaattttctaaaaattggtaaaaattatgttataatgataatgtacaatagctatatgaaacctgaaaattattgtggaaaccgagtttggaatgtgttgggtattgagagagtttaagatggttgttatgggctgaaccttataaaccacttaagacatttccaatggtgaaagcccatgtactttttgggcttgacccacaccataaagcccatattagttttgatccattatgggcctacatcatatattgggctcacccctaatttgggactagaaaataaatttaatcttttcatatatttgtttgaaattatttaatattataagggctattttcaaaaatatgggaaaaattattaaggtta

SEQ ID NO: 405733 - DNA, 528 bp, Cannabis indica
cggcggtggtagtgctgtgaccgacgacgattggggttcaaagacttcctcttcaccctcgataccgcgatcatgaaaactgtctccttcacttacccgtattctctcaccacattcagatacttttacttgattctcaataccgctatcatcaataaaaaattatagcaaacctaattgatattcagatgagatgaggggtcttcttcttcatcttccacttctataaattaactctgctaacttttttttataaatttcttttttttttgagtttatttttaattttagtattgaaattgtttttacagtaaaattatctcaattgggttgtccaagcttatcaggtacaatagctttccacttctaattttaattgttttgactttgaattcaatgataattaagtttatgtgtatgtactgttatttgtttagtgtcacttctactggttgtgattgctatggttaatttctgtttgtataataagatattatgaatgaaacccaattcatcgctcaacagcat

SEQ ID NO: 405734 - DNA, 555 bp, Cannabis indica
tcgctctatcactctctctatctatcattttacaactctctctttctctacccccctaaatctctctcctactcccccaagaaaaacaccatcacctaaccaaaactaccaacacctcaccaaaaaccaccaccacacaaaactcaaatcaaaagactcaacttgaaaacacaaaaaaaaatacaaattataaaacaccaaaatacaatttcttaaaccaaaataggtgtttttccaaatcacaaaatacctagatctcgaaaaataaaccaacattttttataagagaaataagtcgaggagaggacttacgagagcatcgagggagagagagccatcgaggtggctgggggttgtcagagaaccgtcagactgaaagagagagggggtcacgagagcttcgggtggtcggacaaccaccgaggtggcctgtggtggctaccaaagggttttgaaaaccctaaattgggactaagagggagagagagagaggagatcgagatcgagagagaggagatgtcgaggtggcttggggtggtcggagaactgccaggg

SEQ ID NO: 405735 - DNA, 927 bp, Cannabis indica
ggcctctttttttcccatccgtctctcaccactaagctaaccttagtggtttacataatttataaatcattacttaaagggctcgtttggaacgccgtattaggtcgtattgtattgtattgtattatattgaattgtattttatgcaatatttttatgtaaaactatatgtggtattaacttttatggacacctaaatatataatattttagtataaattaaagtttaacatagtattatataaaaatatgatatataatccaattcaatataatacaatacaatacaatacgacctaatacggcgttccaaacgaacccaaagagtttattattgcacaagcgtatcgatattaaaataactattcatgtcattttgatatcttaaattttatgaaaactattatgaccatattatatatacagttatatataaataaaattataaatataatttatctatgtaattaattaatgaaaatattaaaaaaaaaacactaataaataacaacaacagctaacaacaacaacaataataataattatataaaaacattatattaacaagacatcgatcttaaactgttactctacttaagtaatgtcttgccagctgacatgagtggaattttctctccaggtttttgaaagtttgtttgcgattaaactgttttcgtgcgactcagccttctgtctccgattggtgcgactaaggcttctgtctccgattggtgcgcttctacgggtggagcttggtgtcgactggtaggtgatcatcatcgttaggttttctttagtttttttccagcgtctcgggtctgcgtgttgggattgaagtctcggggttctgggttgttttttggttccgagtattgcgtcttcatcggtggagtacgttgatgctaaatttataatcactacgcaagt

SEQ ID NO: 405736 - DNA, 253 bp, Cannabis indica
tacattaaataattaatagataacttatagcgtatatactatacatacactatatatattctatatacataatacatatattatatatacaatatatatatacaaatatatagtcaggtatcaaagtaatggggtcgaccaccaccattgaccaccgtggtcggtggcttgacaaccacctaggcccgcggtggccatgggagaagtcgcacggaggcgaagcatggaggaggttgtgttggaaattatttta

SEQ ID NO: 405737 - DNA, 691 bp, Cannabis indica
acttatagacaagtaaaaacaaaaaaaaaaaaaaaaaacagttacaaagaattaactcaattcaattaaattgaaaggagaaaaaataaatttacttacattagaagaaagctataggaaaaataaattaattaaaaaaaaatatatactattttttgcctatatataaatacacgatacacttaaatttttacttttatattcatacaagaaaaaaaaaatatcatttttagttgtttaaaaaaatataaaataacacatctcaatataatgtcatgaattatatgaacattataaacagtaaataaaaaataataacaaataatagaataactatttaatagtaaaatttgtaaaatacatgtagaaaaataaaagtatgtaatttttctcaatcaaaaaaagttaaaataaattcatctctgatgcatcagtcggttctttattacaaggcagtgtgaaactctttaactctgcctaagcatcaatttgtgctttggcaagtggttaatttttagcttttaactagaaaaaacatggcaaaaatgaatatacagctaaattctttatgcgatctggtttgtgaagagtggttagagaccgtggcggacccacatataaccggggcagtcgcttttgaaaaaaaaaatagaaaaaaatatatatgtgttataaatattaataattatgt

SEQ ID NO: 405738 - DNA, 871 bp, Cannabis indica
ttatcacaactttttcaaaaaattattatagtcttttatactataatttattttttttaaatatgaacaattcatatacttacaaaacataaatcatacaattaaattttggaaaaaaaaacaggaaaataaaaaaaaggaaaaaaaaattaataaaatatattgggtcggccatttaaactattatacagctcacaaataaatatttacaaaaataccacattctctaaacctttagccgcatgaaatagaacgatgaagaacaacaatctcgatcgttcaaaccagcaacacaaccgaaatgaaaccaaatcaaaaggaagaccaccattaattccgaccaattttactggaaaagaagacatggaacaatctaaacggaaattgaggaaaaacagatcagaaaaactgggacgaaattgaaattaaacactgattttcaattttattcgatcaaaacaactcctcctaatatcgaaattcagattcatataatgtagatctctaacaaacagatctggagctccccccccaatccaaaaccaggtataatgtgaaaaaataataaaaaaaaacaggtacatgaataatagatctacgttatatacagttgtattttggttgattactgtgtttccaatattgtggaatatattttttaaaaaaacacaataagaagagcaaatttgaattaagggacaacacgttacgtataagtctgtttattttttgttttggttgcattatagttgcattatcgttttatgatagtttatatattatgcaagtagcaaaaccataataaaactacaaaataactgtaaacaaactaaaatacagaaaaaactctttgaacatcaacatccatgat

SEQ ID NO: 405739 - DNA, 551 bp, Cannabis indica
agataggcaacagcactagtcaccttggcaagaacacctctccaagtaggactgatctgatcgtgaaaggctctattgcgggcagtccacaaagcatcaaacaagcaaaccccaaatctcagaaattcacccaagacttccgcatcagcacctttcaagaactccggagataagagccacaccaccatgtctctaggagcaccaaagttaagtgtatcacttctaatagcccaacgacttgcaaaccacacggccttagcaagcggacacttgaagaataggtgtagggccgagtcctccgctgcaccacagatcacacatctagtgctatttccgaagatcctttgaagccggttcccaaacgggatgatatctctacaaagtttccacagaaacattttcaaccgctcggtgagttgaagcttccaaatccggagccatatttgatctgtctcaccccaacgactcttgataatggatttataagccacgctaggggagaacataccattagtagcatctttccacacgagaagatcatcttgagagct

SEQ ID NO: 405740 - DNA, 1510 bp, Cannabis indica
gatgataaaaacttcaattgacttttttcagcgccaatttactttttcagtgctgatgtactttttcggaatcaatgacttcttcggagtgaattgacttcttccgacatttgatgtctacttctaacgtacttttttcggtgattagtttattattattatgagtttttaccaactattatttatggttcttttacttaatttctctatattttaattattatttattttttactctattattttttttaaaattattctatatactattttttaacttttttttttaaatttacagtttgggttgctctagtaatttttttcaatgatttttatgtgggttgttatgtggattttagttgtaatataagttgttcggttagtttcaatagaatttttatgtgaaattttctaaaaatataaaagaaaaatactattttaaggagtaaaaatgagtgacactctcattttttacattattcatttctaacatataaaaatacacttcattagtttttcccatatttattgaaaaaaccccttctattgtatgtttagctaatattttagttagtcactgtgaaaaatggcggaagcagcgtcaggggacatagccataggagccaccctcaaccatatttccagagaatccactgatattaggcgcctcgctaatttctacaaacaggtttttttttttttttttttgtatttattcttctttttatatttttctagtgaatttcattcataattgagttgaagaaatagtttgataatcaattcataggataattgcatttgcagatatttgggttcgaagagattgagtctccaaattttggggattttaaagtgatatggctgaatcttccttcagctttcgctcttcacctcatcgagagagaccccaccaccaagcttcccgaaggcccatggagtgccacgtcacctgtcgccgaccctagccatattcgcaggggtcaccatatctgcttctccgtctccaattttgaatcttttgtccaaactctcaaagtgagtactttatttttgatctctccgattaattgtttttttaaagcattttgcttgaatgaaatgaaatttcgggggttttcaggaaaagggtattgagaattttgagagttctgtacccaaccgtggagtcaagcaagtattcttctttgacccagatggtaaggcttttcttcctttatcaattgatttttcattcatttggccttgtttggattcattccagaaatatcaactttctgatgccaaattcacatttcttgttaatttacagggaatggtttggaggttgctagtctcccaccacagcaataaacttaagtcaagaaaatttaaatgaagatgaggacattatcactgtcctagttctgatgttgatgcagtatagtctatagctttctatggtctgtgtttagcttactcttacatagggttgctttttcattgttatgtaactattctgtaaagaagt

SEQ ID NO: 405741 - DNA, 665 bp, Cannabis indica
ttgttataatcctaataatgaattatcctctattgaagatctacattgagtagggacaaatttaccgttacaccttcaatatattttatccttaaaatacttagctacctataaatgatattccagtgaacttattataatcactaaaatgagtactcaaccatttatctttattaagccgagctcgaacaaaattatcgtttcacttctatgtctggatagaagctatatatttcgtatctatgaatagcactcccactcaatttaactacaatgtccttaatctatatgtcacgagaagatccattggttgactttaacgaagagattgaagagcataaataatgcaactgcactagaacctaaccatcttaggattgagattacttgatctaagatcaactaggtgatattgaattgaatagatattacggttagtttattatatctaattcaagttcaatatcagtcccttccgatgtatactccatacatctaacccaagtttactttaaccaatgtcctagaaagaacatagcacttatccaaggtgcaagtaaattacattgtagattatcttatcagttaaaccctgcgtactgataaatcataggaatatatttaatcacacaatcttgatcaatttctactgtgttgacaacaca

SEQ ID NO: 405742 - DNA, 1315 bp, Cannabis indica
tcagcgatgagttccagtcgaagattgacaagactcctactgaggagctgctgcctcgctccgcggagctagcttcgcagtttatggccatgttctcgaaggcttttgctaccgggtccaaagaggttgaactcgcgaagaaacatattgctcagcttcaagaagacaataagaagctgaagcaagatgcgtcttctaaggacaaggagctcgaggaactccgcaaggccaaggagcaagtcgagctagaggccaagaatgcacaggcgaaggtcgaagagatgtctcgcgacttggaaactgagaaggagaatgggaaaaagcagtatgaccaggcggtctcggactacatctacaccactctctccaagattccagacttcgacttttcaatccttggagcagaagccgctgaaatggccgaggcttttcgtgctatgtcgcccacaccaactcaaggtggtggggggaatcttctcgaggagactgaggtcgcggaggtggaggaagtcgagaacgaggcggtcagcaaagtcgcggatgaatctgttcctgctgctcccaatgcttgacttttcctttaatatttgcttgtgttaaactatatttcttttttagtttttttttgtttatgcggtacaggggtactcgcactctgtacttagacaaatttgcattttattttgaacaactttatatcctcgcggggatatctgtttttaacattttcgcagtacacgggtactcgcgctttaatatctataatatttcgactttaattacaacctggtgtaataagtagaaaatttcataagacttggaaaattttaaacttgaaatttaaacttgaagaattacttgaagaatttccaagaattttctttatataatcaatagtacattatggtatatacccccctatacttaggatttttttttataaaaaatgactaagtataagtacaaggcgaatacaaattagacaatgcgagtactattgataatagaattttaggctttcgccattccaagctcgtggaatcgcagtaccatcgagtgctgcgagtcgatatgttgcgtcaccaatcttttccgcgatgagatatggtccttcccaattatccccgaagaccccatgcgctgggttcttggtatttggcattactcttcgaaggaccaagtctcctgttcgcaggacttttgccttgaccttggaattgaagtatcttgcagttcgccgctggtaagctgcattttttaagtacgcctgatcccatttttcttccagaagatcaaggtagagtaactgtttttc

SEQ ID NO: 405743 - DNA, 550 bp, Cannabis indica
tttggcaatgacattgcagagagaaatggagcgcaactcactcatttgctcaaggttcttccttttttaggattagcacaatactcgtattattcatccctaccggcatttgttcggttataaagaaatatttaactgtatggatcacatcactaccaacaatggaccaatatttctgaaaaaattttgaattcatcccgtcaggaccgagggacttatctggatgaatttgaaagactccctctttaacttcttgatccaatatgggccgtagtaaagcctcattatgctcatcttggacagtaggcacaacacagtcaaacaactcctcccagctagtaggttcagcagtaaagatttccttgtagtactcaaccatgacattctcaagcccattatcccattgtctcaaattaccctcagagtcatctacctagtaatgtgattatttcgttttcgcgcagaagctttagaatgagagaacttactgttttgatcacccgcttgaagccataactgtttagatctttgtcgcccaaaaacctccctt

SEQ ID NO: 405744 - DNA, 654 bp, Cannabis indica
ggtacatgtcaaagttcgaaaggtaaaaatcctaatttacattttttttttaaaaaaaaatcttaaaattaaaagaaaaccacacaacaaacaaccatgataattattgcgctcacacttcaaggaaacctttgttatatagagttacatttggtagaatggaaatgtcaaattcaatcctggtaaattaattttaaaagcttaatgttatagtgtaaatttaatatattataatctcaacctgaagaatgaagaatgaagttaattggaagcttgccaatgtttatatccccacaatgtttgggattttcgagatgagaatgatgatgagatcacgactatacgagatataaactatttgagtattcaattattcgttcaacttttacaactcgacgatgtcgaaaaaatgcctgtgttgatgtcaacccaattgaagtgaccagcagggaccgtgagcagcctcactgtcaagatttagatgattttattgtttatagtgatcatgatgaagatactagtaataataataatgaaaataatataacggttaatgacgatgattacaatgacttgtagactttaaagtattgtaatatttaaactcacagttagttaaattaaataaatgttccttttgttaatacgttgatt

SEQ ID NO: 405745 - DNA, 584 bp, Cannabis indica
tcttaacatgtgtactaaaaaatcaatgaataattgcaataaatattaatttttgtaaattttttacattttatgttcaattttatatatatatatataaatatttatggtattctaaaaaaacacaagaaaataacaaaaaattacatagaaaggaacaagaaaataacatacaaaatagcaacaaaacaacatcaacgacaaaaaaaaaaataatatacaaataatataattaacaacaaaataacaagagtaaatcataaaatataataaaaaaactgtatttatgtaaataaaatttaaaattagtaaaaatttaaatatttcatacaattgtattttaagaatttttttttttttttgtgttgcctaataattctgagttcatttactgagtcctgagcccaattcatgttagaattctcacttaaaacaagcactatgatacaggagaagttgaagaatacttctttttttatacattaatcaattttacttctaaataaaatttaattaaaatatatctctttttatgagtatcgtacccaaactatcctcacacactcacataactaagatataat

SEQ ID NO: 405746 - DNA, 673 bp, Cannabis indica
gtatatatttatatatgaatataatgttaaaattttatatctcaaataaaatttatttcaatataatcagatttactaattaataaaagattagaaattattttatgttgcatgattcacatgattgctttcatgactaaatgtttaatgtataaattctattacattcagaaaatatagttattcatgattatagtgttgtcaatacagtagaatataatcatgattatatgtttcaaagttttatgtcctgtgattcatcagtacattggatttacactaatatgataacagcgataaagtttacttacaccttggataagtgttatgtcattttcagggtattggcaaagtatgttaggatcggatgtatggagtatacatcagactagaccgatattgacattggataagatatcataaacttatctatctaatacagttagttgatcttaggtcaatagatcgtaatcctgatatggttaggttcgatctcaactgtattatttatgttctttgagttgttcattaaagttgaattggcccaatacttacatcttaggaacatgatagtataattgagtgtgagcgctaatcatagacatagaatctatagcttctattataaatacatctaagtaaaataatgatatccttcgagtttggcttgata

SEQ ID NO: 405747 - DNA, 525 bp, Cannabis indica
aaattttaaaaataatttctgataacgtcattacttagatgaacctaaaaaaatactattacaatctacttttcaatgtgaaaatttcaagatgtggaaaatatattttttgtttgctatttctaaaaaaaaaaactatttagttactaatatagtgattagttactgttttatatatatgtttttaaaatttcaattaacattcattttataatttcgttaactgaattatattatattatacgaccactaattagctttcaaaataataaagatataaataaaataatcagtatattaaaatagtagcttgttatattacatgtcagctcattaatttcgaaaatattttttaaggttacctaaatgtattttaaattataatctatcataatataacttaaaaataactaattagttactaagatgtatataaataaatttttagagagtaagcaaaatgtatctcaaattatataatatcaaaataaagttttttatttaaaggtaactaattaatttctt

SEQ ID NO: 405748 - DNA, 512 bp, Cannabis indica
cctgtacctccaaactcacaatgaactgacattcctaaagatattcttgcaatacaagtgataacacctcctgaagacaagactataggaagaccaagaaccaatcgcatagcttacaaaggtgaatttcttaagaaacaatataattgtggagcactggacagtcaggacataatttgcaaacatgtccacaagtgccatcagatggtagaagcacaactcatgtgtgatttattattatttagttctctaaattatatatttaatgtttcttgtgtttgatatgtgcaaacttttatttatatttatttgtaaaatttatgctaattaaagtacttattatggatcttgtgcgactctgtgcgaccaagtatatttcaaagtatatcctaatatgtgtttatgcgacccagtgtgactgtcacgacccgagccctaggccgtggcgagatatgtaatatccataacttgggtggtcaaaggtcacactttgacccttgttggaagataaa

SEQ ID NO: 405749 - DNA, 573 bp, Cannabis indica
taaaactaggctttcttgtagtggttcttggaaacataaaagaaccctaatttattttgttttgttgttagttatgtgaaaagaaaatatttttcaataaatattgaataacttaatattaaaaaaagtaaccaatctaaagtaacagatccattggattggatccaaaatataaaatctacatttattgtgaatcaaatgtactatgagtaaaatagtacagatcgaatgtactatgagtaaaataatacagattgtattaaataaacaccctagagttaaattttaacaaaatgctgtaagaaaataacaatacactatatttatatttatagttctctattcaaaatgtttttacactttaattaatttttcatctacttttccactaagattataggggcacgtgccacacgcacttaccctactactagtatatatacaactagtaaatatttcgcgcttcgccacagatatataaaatattttaaattatatataaaaaataaattgtgtattttaattaataataattacttaataaaattatattaaaattttaactttactatt

SEQ ID NO: 405750 - DNA, 516 bp, Cannabis indica
ttatactttcttctgactatattatttttctttcgtgcagatgatcaaggctttgaagaagagagtgggaggaagcttaggcttatcccctccagccaagaaacctaagggcggtgaaactccatccaaggataaagtaccagctggagaggtcattgatctctctgaagagcaaactgctgtggaccctcctaccttgaaagttactaaatccaaaggttctcgaggagggagtttgcacgaacctgagcaggaaaaaggtggatccgagctaatcagaagcgggtctgaacaagttaaggctcccgccccacctttggtattgcagacggagaccaaaagaggcagagacatgctcaaccactatgtcagccggtcagtcccagaggtgaacgaacaattggctggggcggataatgagttgtctttggagctggttatgggaggagtcttgaaagagctttcgcatgtaagtcttttctgacatttttcttttattcttccttgactagttcg

SEQ ID NO: 405751 - DNA, 509 bp, Cannabis indica
aacctacaccacatcaaaggaaataaatcaaacacaaggtaaaacctgacctttaatccttagtcaaagcacaagtttgacccctgattttaaaccccacaaacggcaacccctatttcatgtactacaagtcgtttctatattatttagggcgtctccaacggagaaactcaaatttggtgttaaatcaacaccaaaaaactactattataacactaatcttttttttcaattccaaccacaacactaaaaattacaccaaattttatattctttattattttattattttataatataataagaatattttaatactaaatataagagtgaaactatactatatttggtgttttagtgtcccattggagatggccttagaaaccctaaattgcatcagacatatatattctctttttagcattcaaacactcaaacacacacaacccagcctccactttgaaaaccctagcagagaaaccctagagctgccttcgtcttcgatgttc

SEQ ID NO: 405752 - DNA, 937 bp, Cannabis indica
gatatttcatcaagcttaatgttttaaatctgcctactcaaaccttacatcccaaaagtttggaaaataccaatgagtagacctttcaaaataagcaaatttgtgttcatcacatataatataatagagaatcaataagataagtatgcttacattaatttttgttttgagtttgaaatagtgaagatttcattatctgccatgaacaaaccttccttccctgttctttctttggtttttattggtggtagaaacctcgagtctgcaacaagcttttcctggttccgtagagatgattaggccaagaccaagagaaccctttccggtaggagttgctgtaatggaagaacatttggaccatcattgttctcattgctattccagaaccgtactagattttcatctcatttcatgtggttccttggatcataaataaatctaaagtattaatagacattaaagtggttagaactaaaaacatgaacaacatgataaggcaaatggttaattgcaacttaattactcttcaacatcattacacatagttgtagaaatcttaaatagagaagctccatagaagagaaatggttaattacaacttagttactctttaacataaagcaaaaatttacaattttaatgtcaaataattttttttttaaaaatactatcttttataaacaaccaaataaacttatacaatatttttaaaaaatgtgagcatgtgatgtaaaaaccactaaaatattactgggtcaaatttatatggaatctcaataatagggggattcgagtagaagaagtctttctgtatgctttgattgttgttgaaactatctagaggatgcgaaacgattttatacataataactctcatccggatgttttgaaatgtattgaccaaatttgtacttcttatgcagagcttcatgatgtt

SEQ ID NO: 405753 - DNA, 779 bp, Cannabis indica
aaccttaaattaataaaaattcagattaataccactaaaaataaaataaaacttaaccttagaaatgaccatatttccctttcaaaagaaaacttaaactattaaaatataggggcgttttggtaattttaactaacccgtcaaaccgaaaacccaacactttaagctattctggaaataaaaatccaattcaattcatctgtcgtgacatttctgacctctttgcaaaattctacagtcgccgggctagaaaatattttatttcaaaaatggcatccacgatacccacatattccaataaaatcttcgtaattaataaattacgctttattcaatcatttaataaattcacactaactaatttaataagatcataatcttacttcattactaaaataattacatatttaataaaaaatgtctaattaaatatcatattatttttctgggatattacaactgacatctgtcccaaataaatgtcggtataaagatattcgtaatacaaaatcattataataataatagaagtcatattcatttcttgataaagtatttataattaacattcatacattactctcatgcacaagtccaagtcaatacaaatattcattcaaaatcaatattagtataaatatttaatgatataccaatactcatataataatgtaaaatatatctgttacctcataaagtaaccatatattgcattttctaatcaggcaagtccgtgccatagcgtaccacccatatattgcataatcgcatcacctaat

SEQ ID NO: 405754 - DNA, 871 bp, Cannabis indica
aattaattcatgagaattaaacagtagaattatagatcagcggaagcgtaccaaagtccactgaatcgcttgaaaaaggatatgatcttctaattttgcagtaaaatatttctctgtatatatgtcgacaccataaacaataatgaaatatatattttgacattcactaaattgcaaaagtaactaaatgcaagactacaaatagtacataaattctcaagaattaatttagggatgctcttgatactatatgttataaacactataaatattaatttagccctaattaattcatgagaattaaacaatagaataatagattagcagaagcgtactagagtccattgaatcgcttgaaaaagagtatgatcttctaattttgcagtgaaattttttttgtaacctttgtctcttgatgatggggtttcaagaaaatgaaaagatacgatattggggaccattactgtttatattactaactgacaaaactgttagtaatatttattgactatttttatttggcccctcatcaaattagaaattatgcttatggtatccacatattaaaatcatgacaattacgccctaagtcagaatttttttcttcaaaatagattatataaatttgacttatttattagatcatacaaatacatattttatacatacaattgtgaccctaataaatttgtaagatagtcaagtaatatgatacacgatggtgatacatatagacagggaagaagaaagtggtggagtaatttttattgaagtaggaacaggactgaccatggaattggagagacctagtgcatgtttggtatcataactaaaaaacctgtttttttgtttttaaaaacagaaaattgtt

SEQ ID NO: 405755 - DNA, 703 bp, Cannabis indica
caaaataattttttcaatgtagtttagggttttcccatttctttggttttgtttttttgaaatgtattttgagattgtattgtaatattttaggaaaaattacagtgcacttccttaaaaggtcatttcagtaatttgcttgtcatctagaaaaagggaaatttaaaaaattgtactttaaaaaccctaatattttattcttaaaccaatacatttcaaactaagaaatatatgatacttttatcaaaaatccaaaaataaccctcacataactcaatcctatttttttcaacccgcacatgcatcagacctccccatcagacctgtcggaccccccatcggatcggtcggaccccccatcggaccagtcagacccctagcttgcaagcatcggacccccccccccctcccctcgggtctccatcggacctgtcggaccccccattggacccatcggaccccatagtccgaccattggacccgttttttttttttttggtttttcggttgaagctcacaggttgagagagaggaagagagaggggggctgggcccgagagaggggggctgggtccttcgtcggaggtggtgggtggtcctcagtggtcgtcggaggtggtggaggtgagccgtggaggaagagagaggtcctcggtggtcgtgcgtttgggtggtcctcacgggttgagagagaggaagagag

SEQ ID NO: 405756 - DNA, 951 bp, Cannabis indica
cattgatcaacaatgggttctcatgcgtcccgagttgacactcgcctcatcacgtcccgtccttctccattgggtatgggtcgttgcatgccccaagtgaaggtttgtacgtgccccttccctgtaggttcgagaaggacgttggcgatgtctcagtggcaacccacctgtcccaggttgagtcttaagatttccctcgttctaatgagggatttcttgttccctggttccaattcgccttcttttctcatttctgggagaaggctctggttggtcatttggttgttcattcttagggggaccctcagttttcccaggttgttcttcctgagcattctgatgattctcctaagttgtctcctgcctcctggtttgtgagtcgcgaggtctgcctcgtggtctcctcactccaggatcaggttgattctgagtgttattctcttgtgctaccctagctacaaccgccttccattccaactcagcattttgttagtttgcctcctccaagcgacgcctgagatggcaattttccaaatcgaaaactagcatgtatctcgtgggatcaaaggcaccatcatcctcatactccacgagttgagcaccaccaacaattatgttgggctctttgttccctgtttcttggttcttgccattttcacgctaagtccttcttgagcgtgtggactgtgtattttggcaaccttcaggttgggtccttcttgaacgagtggaccgtgtaggtcgtgaattgggaggcctctgtgagcccattagctcttttccaggacggtgagtagtttcttcaagatgagtatcaacattttctccgttatcagccatggagaaagacttttcttttggtcatgagggttttttctgagcttttttcacgtaggctctcaatgaaagcgccaaactgttaacgcagattttcgttaacgataataaagc

SEQ ID NO: 405757 - DNA, 624 bp, Cannabis indica
acattatcaagtaataaaatagatcaaacatatgaaaataaatgcacaaaataatcaagtgttacaaattcaacaaaaaaaccactaaaatatatattaaaatatatattatttacttttttaatatttttttagatatacataaaaataaacaattgttttagtatatataaatataattgaattagatcaatttttaattagattttgagattgacatccaataactgatccaattcaattagaattttttttaacatctaatcaaagccaattataattgaatatctatttttttgtaattagattaaattaaattgattcagtttaattaaattatagattgcatgtttcccacctttactttttaccacaaattaagtttttttgtttttgaactataaatttggttataccaactcggtctcaacaatatcaacaacatcaaaagggagattaaagttcgaaaaaatacgatgagcatatacagatactctagtcataagatgagcagtctaatcgttaaacaaaacataaagaaacatctctaaaagaagataaaagttgtttacaatcctcaatcaacaccaccaaaaatggatgacaaaatattcaaatttctaa

SEQ ID NO: 405758 - DNA, 554 bp, Cannabis indica
aagtggtattctaaattttttagagagttttacattttttatataaaactagtggagtctcacgtgcttcgcacgtgtggctcttaaaaatatttagacacaactattttaaaaaataattagtattttatctatgaaacttataacactactaaattgtatcctctaaaatatacatcatgacgacaataatttgtgacctcttctatttacagaaatatagtatttttgttaacttttgttcttttttatcgtttcacggttcacgtgtcgttgtaaattaattacttttttcatgaacattgaccactaataaattaggtctcttcttaaaaaaattaattaaatattttttctaataattaaaaaattataatctaaatatattattgttgatttagataagaaatttgcaccttcatttcttatgttttgagaataacaatttagtatgtaaataatatgaatatgattggtaaatgtgaagaaacttcaatctgatttgtttaagtgaacttaattttttaaagaaagaatttaattttttttttttt

SEQ ID NO: 405759 - DNA, 1136 bp, Cannabis indica
aacttgcttctcttaaaggtaattctgatccttcttcaaatgttaacttcggttatgagcaaaataactattttgagattctagtccaacaagagttatattggaagcaacgatcaaagcaattttggcttcatagtggggataaaaattcaaaaaaaaaatcatgcaatggccagcaactggaaacgccgcaacaatattcaatatcttcaaaatggctccagtatttggaatgcttggaacagtggtctcgaagaggtaatcgttgattattttaccaacatttattctgctggaaatgttaattggattcaggttgtgaatggtgttaattgctcggttaccactgaccaaaatactgaattgttgaagccggttactagtgatgaagttcggttggctctcttccaaatgcaccccgacaaggccccgcgacccgatggaatggggcctgatttttttcagaagcactggcatattgttggttcggatttggttaatgctacctatagtttctttgattcaggcacttttccttgtcatttgaatgatacaaacttggtgttggttcctaaaaagaagtctccaagtactatgagtgatctccgtcctattgctttgtgtaatgtctctcacaaggtgattgcaaaagtccttgctaaccgtatgaagcttcttattgatcacatcatctctcccactcagagtgcagtcattcccggacgtttgatttcagataatattatgattgctttcgaaataatgcactatcttaaaagaaaggttcatggcaagaaaggctacatggctctcaagcttgatatgagtaaagcctatgatcgcgtcgaatggggatacttaagagctgttatgcttcaaatgggctttgatcaaagatgggtcaacttgattatggcttgtgttactagtgtgcgatactctattttttataatgttcatgtcatgggaccgatcacaccatctcgtggtatccgacaaggtgatccgctttccacttacttgtttataatctgtgctgaaggtttctcaacacttatatctcggtttgaaagggagtgattactccaagattgccgtgttgctcaaggtgcaccaatggtctctcagatgctgtt

SEQ ID NO: 405760 - DNA, 879 bp, Cannabis indica
gtaaaattaagaaaaaaaaaaagttaaaaaataatataatggggtaattttcctagaaaatataactgaaattttagatttaattattattattattattcttaatatttaaattaataattaggtaataatgcatgttactaatacctagttataaaataaatcgaaaacctctaaactgaaagattaaattttgttgtttaaaaaaaaaaaagaaaagattaaatatgaaaattgtttggttaatataatttcacctaaccaattttgattaaaaaaattgttcacattattataactaataattttttttacttcaatttaggacaacttgtaaataaatgataacaaataattattgtaggcacccaattaaattactctgttaagtttattctaaacatattttctcaattttattttattcttttttgctgatttaaatcttttttaaaaaaaaaatactttcataagtaaacataaattagaaaatatatatttatgacaaaataaataaagtgttataataaaattgagaaaatatatgaggaatcatcttatatattacttttttaattttatttttatttttaagatttgagttgttctaataagtaggttgctatatatatatggattgagaaaaatacattctatacccacttttcatttcttattttaatgtttacctttcttttattactattttatttatatctgttatattcttattatgtgcattagggactttaattttgataagttatctatggtcatatttggtattttcattataaagatgatatttatcaaattaaaattattttgctgttatatttggttaatgtgtaataaaaaagagaaatttacatggtatac

SEQ ID NO: 405761 - DNA, 938 bp, Cannabis indica
gagagagagagagagaaataatataaggtaattggtttcctatatcttttttacatcttttgaatgttcccacaaaataatagccatatttttgtaaactttccattttattttaataaaaatgtgtaacatcgctaggaacttcttgatgacaataatattataatgaagaataatagtccatacaaaaaaaaattataggtaaatattattttagaccttatattttataaaagttattaattggaccctcttgttttgttaaatgacaatagaccctattttttctttttttaaaatggtaaaaattagtcctgagctcaatttttaacaattttattttttaatataactaactttaagataatttctaataccaataggtatagaaaatataatcaattttgtcataacatctttagatcgtattattattaagttttattttgacaaaaaattaattcagggtcctgtttgtataattttaaaaaatacatggtctattttatcatttaacaaaacggaggatccaattagtaacttttgcaaaacataagattcaaaatggtatttacctgaaaactatacatatatgtatatatatatatatatgttatagtgagatttctctcacctagaaactcgagaccagacccccactaaaaggacacgtatactcagattttccacagaaagctgggatgtccctgagggactcctcgaagttttaaacctcgcttaggatataaccagcgagaggtggcgagcaagactaaagtctaatcgcatccgagacaagagagtagaccgcatatatcgaatatatgcgatcatcctccccttgtcccttgtataaaccacggagaacgattctctgtaggtacgagttgatcttaagaaccctgcagcctttactaatgcaatatagactcgcatgt

SEQ ID NO: 405762 - DNA, 1029 bp, Cannabis indica
ctttttaaatcttgcctcaggaggaagcaagtactcttcaaggagatcgaaaggagtttgagcacttgaagtttcagcaagattcgattagaaggtagaatacatcaagcttgcgccatacaataagagggagtctatttatgcataagtcagttacattgtattcttgagatttatctaatgaatcttatctctggttgtggcctcgtggattagtaataatctgaaaggattgttaaaaccacgtaaaaaaaccttgtatgtttttacttttcttacattgtttgtttttcttggagttacagagttctcttctgtagctatagaaaaactattttagtactagttttattattctacatttaattaaaaaataaactagaatatttaaatacagaattttaaatgacttacgaagtaattatacaagagcacaaacacaaaatcaaaaacaatactccaaagaatcacaaagaagaaggtaacgaattaaagcagtaaagcaaaaaagataacactaggtttaacgggttcgagccttttgcaatgctctccgttacggtcgaaacaacagtggtcatatctttattgataatattgtttttcaaagatacaagaatcctttaaaactaagaaattacaagatgaactttctctctctagtttaaactctctctaaccttacacaaacacgattttctcttaagctttcaatggactaatttaccatagatttcaaatgtgatagctatgtatagaattttcatatagttgcaaaaatttgctgtaattctgtcgtggctaattaatgttgtcttaaattctctgagtgagtgccaacaacatattgttggaatatatatatatatatatatatgatgttagattttgtgccctaaacaaaactcattttaatataattttttcactaattaataaaagatcagaaataattctttgttgcatggttcacatgatttatttcatgattatgtttaatgtagagattatatttgttggaaattattt

SEQ ID NO: 405763 - DNA, 389 bp, Cannabis indica
aaaaaatgtgagttagcaatctatttattttatttcattttccattagttttttaatttatttctcttctaagtgatatttgatatacttactcaaaaaaattaatataaaataataaattataaataatgatagaattgaatttaattatataattaaattaataaatctacaatcaattttttatagtaattaataataatataaacataaaaatgttatgttttagattatatcacttattataagtacaatatatatttatatataaagattataaaaatttgggaagaccgcgcttcgcgcggcttagttccctagttattattgtaatataatcttaacaactcgtaacactttaaaatttataatttatcaagcaccctaag

SEQ ID NO: 405764 - DNA, 619 bp, Cannabis indica
ttttattataaactttatttttcaattagggaattccccaccccgtccccacccccattaggggatttctcgccccatccctgatgggaaataagtgggatagagattaaaatccttaacggggatgggaacgggggagcactccctgctaattccccgccccgtgtgcatccctatgaccgtgtaataagccatctcctccatctctactttttctcatggtttcttttcagctaataatttctcatctccaagaactttggagaccttttggtgcactaggatacctttcaaactttctctctatagcgcaaagtcccctgttccattgaacttctccaattcgaatctcgcccttgacaatgttaattgtttcttgaagaattacagcgaaaaaaatcttgattgattaccaagctctaattggtggaaaaattacaactaaagtacagaatcaaatcaattagaacttttatcaacaaacaattagcaaatgagaagattaacaaataacacataacaatcatagataaaatagggatgaacagagtattaaaaaattagaaacaattaaagcaataaataataaaatcaacatcaagatatatactggttcaag

SEQ ID NO: 405765 - DNA, 693 bp, Cannabis indica
ataaaaaaatatcatataatagtagcaaacttataaatattattattttgtaatttttttttttaaattccaatgtaatttttaccatattatatttaattatttatttgagaagatattcaagccaatatttcagaagtgtggcaccgcgaaatacatgctatatatgttatttcatctttaacttatatcatcattaattcacaatgcactacacgtgatgagtgccattcttatggggtccacttcctctatgatcttatgatacatattacatatcttctctaaaccctagttcattaatggatatcttttctgtatacctttatttgatcatctgcatgccaaaatgtggaaaatgttttttatttaattattgaaaaatatagagtgaataatatatagtatgaggttaaggtgattagaggaaaaagtttaaaaagggatgaggtggaggacatgaataaagattttgtcggtcaaaaaatggaagtataatagttaatattggctgatcttttttcattttagcaaaatataatgcaaactaaactacaacacaaataataagacacgtcacctatagattcatcacatttaattattaaaaagaaaaattacttcatatactattttttttaaccatttttttttaaatttacagtttggatttctaaagtggttgcagtgcta

SEQ ID NO: 405766 - DNA, 556 bp, Cannabis indica
ttatacctaataactccatccaacctgacagttttggccaaccaaccgactaaactaatcaatcattgaggtaacctggtgttttagtattcaacagattgagtataacccatgatctcaggaatgatttgaatgaaaggagaggcttggacgaacaatatgttcaaccagccgctcagcccggtatctgcatctaggatccaactttaagagattttgacgtgacacaggtcggccaagaggctgaactaattcacccatttgtgcaagcacagttagatgaattaaaaaatatgttctaaggcctagctggccaaaaactcactgatctcgagctggaccgagcacgcagatcaccctttactcccgagatcaacgtcttgaagctacctctcaagtgcaaaatgcagacctagaagatgtacacagggaaggaggctcccttgtcacatcttaaatattttgaaatacaaatggatttgcaaggggtatgaggtgatgtgcggtgtagagtattccctgctacactttcagaagccgcacagtagtggtattt

SEQ ID NO: 405767 - DNA, 673 bp, Cannabis indica
agagttttagagagagagagaagggggctgctggggctggaaaaaaaatacagaaaataaaaatcctcttttccttaaaattttccttttaatgaatcatagcccaaaatgcacaattaccacattgcccttatggccaaattcccattttcaagcatatcagggcaaaaatataattctcacatttcatacataaatattaaatttcagatttctcatataaaaaataaaatgccaaacaaacatcccaaaattgcatttcgaccccaaaatcttgttcggcccgaaatacccggttgtgactataccgcgccaacttgtcagaacacacctgaaaaaggacaagacatgcatactatataataatataatccataagcacataattaaattaaattcatagttttacccttcttgggtcaaaattactaaaatacccctagcttactaacgagatcttaacatgtcataaatcataataattcacatataataaattatataataatataattccataattatacatagttaactagttagggtttgctaatccattctcttaatcttaggatattgcattcaatatcctggttggccacttcctcagcaagtggaccggccagcccctcatcatggttccctgatgatgacccctctcaataggcattag

SEQ ID NO: 405768 - DNA, 740 bp, Cannabis indica
cttgaaatggaaaatttgagattctatgcttcaatgtgcacaactcataaaaagaatccccaaattataccatcacaattttatgttaacgttttcattgttttccaaattacccttccatagttaacttagggcttaacatttaggtagatttttttggcacaggttttttaggtttgggttttgagtttcaggtgtcacaagattagttattaaacttgtctattttaggtatgggtttgccgagtacgggtctgggttttctcgagttaaagtgtgtcgagtatggataagtacgggctaagtttgggatatgggttgggttgtttgtgcttcattttttttttgttgtttttttttatttgttgagggaagacaaaagaggtgattgtccactacttgacgaacacgacaaagggaggaggctgctagacctagagctggattggtggtggaaggaggaggagatcacatcgaatctgagagaaagagaagaagaaattttagagacactataaaagaataatcataaataatactaactcatggagtatgtagaatttaactacaaaaccacgtatttttttgtcttatttatatttggttataattaatattttaattttatttataatacttcattattgttaacgaatttttattctaacaatttggtgctttcattgagagcatttatttaaaattaaaaactcaaaacacaactccccgacaaacccaga

SEQ ID NO: 405769 - DNA, 601 bp, Cannabis indica
tgtttgctaacgaaataatttacatatgtattcttcatgttgatcataacatattgtaagaatatttatattctagaaaagattaattatgtatgtattgttaaaatatttaacaatttatgtattattggatttcagtgatagagaaattgtggtgattcaaacaccattcaagaacaccaaaacagatcaaacaagatagctgaacaattaacacaaacccgaaaaatcaattggcaataaaccagaaacaagaattaataatgcagcagtaaaacagtaagaacaccaggtttacaaggttcaatcacaagtgaataacacttggatctaatccttgggaggaactgccttgaggctttgcctttcttattatgaatgtagcttagtaatcagtaacaacatacagcaaacacactaaatggagtcttgctcctacaccagaaactttgacactcgagagacatgaattgaaataatcatgctctgttacaactcaatgtgaatctctctgctcaccacagaactctctctctgtttgttacacatcaattacaaaacacaagcctttatatataggcagagagtacaaacaaacaaa

SEQ ID NO: 405770 - DNA, 418 bp, Cannabis indica
ccaggcccactgaccttccttaggtttaggtgaaacttggtcggggttgtattttctactacaattcagtttttgctattgcgattagttgtctttgtgacacgttttcaatgttttagtcttgtcactatcacacaattttaagcatttttgtcttgtctctatgacatggttttgttttgttttgcttcgttgttgatttttctttgttctttgatggctcgccatcaaatggttgttaatagttgggaataacaagttttttgcgattgaagggttgctagtagtgtagttacataccttactcaattgttgagtgctcaagctacgaggttgaatgaacctattgcaactgtttctactgttgtgtcttttgagcggtggatgaaatagaatataggtgttcttaaagttaatt

SEQ ID NO: 405771 - DNA, 537 bp, Cannabis indica
  modified_base (461)..(461): a, c, t, g, unknown or other
tttatgtcttaattatttttattgtttaagtgtctttaggtaacatgtgtttaatagttttttttgttgatgtgtttaatagttggttagttgttttatgtaactgagttttaattgttttttattattttaggaaactggtttcacagggttcataagttcgaaattagtttctcatgtaggttctgtgatggggttaccccattttatgatgttattctatactttttattttaagtttctttttattattttgtttctaggttaaaaattagttttcacacttatattttgtttttagattattgttgtgcattgtgtagtttttttttattatatttgtgagcatttcttttctatttagttaagggtcattttacaatttttgtatacattattttaattaattacaaaatatgtgcaaaaaaaccttattaccattttctcatacattttatatntaattaaaaactttttttcaatttttttaataatatatatatagtataattattgattattatatatatggtaata

SEQ ID NO: 405772 - DNA, 862 bp, Cannabis indica
ttccacaattgatggagggggagaccctctaccaattaatggatatgtttttcttttttggaatgcgaggagaatcaacaaaacctcgaagtaaaaagaggttatgaaaatgttctctaacaaaaatatacgtttttttagcctcctgaaaactaagtaaaggcgcctaggatgggagccttgtacctacaaatgtttcaaagttggtgttttaccactatctttcccatcactcgaatggtagaattattattgctatgtcccgattaaagtcctaggtcgtgacagatatgtaatatccataacttgggtagtcaaaggtcacactatgacccttgtaggaagagaatgcttataaatgaccctttaatatccccacagttatgtaattaccaatagatggatttaataaatcattaaaataccaaaataatacttaacatccaccaattctcatttttaactagtacatagctaatttatgtcatcctgactatccattcaagctaaaatacaaaaattaatttttgatggaaagtttgataaataaaataagactaaactaataacgatttttatcctcaattgtaccaacctcatccactagcatcaaactgagttcctggaataatgagagaaaataaggggtgagcttataaagcccagtaggaaaacaattaatatcaaaggtaccattagtttaataaattttttgcatagttagcttttaaaaataaaacatcgtatcaccattatcaaaatgtataaacaaagtagagagaccacaaataatcacaaaattaagcgtcaaatacatatcacaccgttcactagacccctagctctcaataccaatcataga

SEQ ID NO: 405773 - DNA, 661 bp, Cannabis indica
gacacattttattaaaatagaatgatatgatttttcgtcttttaattgatacaatgtgcattagtatatatttgactacattaattatatattacttcattatattatataccctattttgaaaatcattaagattttattatttttgttattaatgtaattatttatttaacttttaaaaaacaaattatcattttaactgtcactaaactcaaaaaagaaaaaaaagaaaaaaaaaaaaacaaagtatgaagttgtgttgaccctcaaagattactaagtgtaatatttggagtcattcccgcgccgcctgtgcccacgcgacagcctgctcccacgtgcctactgcacgctcacgcctagccgcgcgcctgcgcctgcacccatgacgcgttccgcgcccccactacaacagatttcgttattaccggcggaagaatccgccggtaataagtaactagaccgccggtaataattaataccggcagaatccgccggtaattatccgccggcattaattggtcgctaaaaatgattattaccgacgaaagggggattccgccggtaataatattaataccggcggattaatagcggtggggtccgccggtattaatatttttaaatattaaaaaaatatattataatgataaataccggc

SEQ ID NO: 405774 - DNA, 685 bp, Cannabis indica
tgaggttctatctcaaaatcaatcggtgttaagtggagtagtacatgttcttatatataattcaatactctactatttatttcatataagataatgtccataatattcattgttatggtttttaaagtataaatttataaaaatataattttttttagcataaaatatctagttaatccctcatagtaattttggttatccatttgattgtcttaggatatctagttacctttacttaattttttcatatctgttaactttttcttcagttttttataaaataatcttttttaaaaaaatcatattttacaaaaaatttataaaaatcaataaaatttataattttttctttatttatttgtttgggtgtaattttaattgttgaatattttttcttttcatcaaaccactcaaaccgcctgcatcgcaaaaaaaaaattacagtttgaaattctttacggtgcgtcgcagtttaaatttttcttaaactgggcggtacggtgtagtttgtgattttgaattgttaatatgcggttcaaactacaccacaccgcacattataaaaataccaatttttatatttatttaggtctaatatgtgaatgtttagcccaaaatccactaattattgtattgttgaaacttaattttttttctatatttatttttaagtcttatggtattt

SEQ ID NO: 405775 - DNA, 652 bp, Cannabis indica
agaagcccaacaggtatattcctttttatgcgaaatatatcgagctcaatgaaactcaggaaaaaatattacccgtacatgtacaagaagccatttttggcgagccaaaacctatgaaacatgtgaggtgcaagagggatccaaataagcagtgtgaataccatggtgatattggtcataccacgtaatagtgtcgtcagttgaaagatgagattgaagatctcatatcgcaaggacacctttaacgatatataaaggggcaggaaaatgcctatgagcaattcgatctgtccaataactcgagttactgaatattataaccctcttccgcgagaagaagggacactttggttatctcgagagggagcgggtcataagaatacaaagggcagttactccggtaaagcaattgtggaaaagaattgcgacgttagtagatatcggcccactgtggttgccatataaagcaagcacatggaaagctggaagtcaaccagtagcagtcgacgaaaaacaactaaaatcgggattactttacctggaaccccagtatatgtcgaggattgaccctgaatattgaaaatgtgagagtatgttggggattgaccctggacatcaaaacccgttttatcaaaaccagatgctcctggaa

SEQ ID NO: 405776 - DNA, 959 bp, Cannabis indica
atatgttaagtagtaaaaactgcatatttattagtgtaaaaatacaaaagaaaattaattctataataatattttcatgaaattaatgtaatatatttttatttgaaaatattgtagtattgagtttaattttgtacgaaaaatacattttacgacacaaataaaaaaaagaaattaagaaaacgtattattttatttaaagaaatacaaattaattagattttaaataaatatttttatttaaattattgaaatatattttgtgttgaaaattttttatttggatttaatttttttgtgtttgattgagaaaataacaattatggatagaaagaaaagaaataaaaaaatagtaaaactatggtccaaagtcatagaaattggtattttgaaacccaaaaaatagcacaaaaagacaaaggcccaaccaacccattctcttctccagccaacatgcacgccacgtggcggtctcctactcggacgcagtagccacaccaggggcttgtccccttctcttcctccacgcgcgcgtggcacgcactagaaattctgggccacgcgtcgctcatcacgccccagcccgagagtgggcatccctccgtttcgagccccttcagcccaaagtggtttcagccactttccacgtggcattctctcatcttgccacgtctccacatgcaaccaatgagagggtgacacgtggcagctccgagttaagttattttatttgtatttttacccacatgcaatttgtaataagtttaattacacattagttctttttcccttctataaataaaagcttaggattttagaattcaattagagtttcaaagtttcaaacagaaaaatccaaagaaaacgctcagttagtttagcgcttttcttagttaattttcttatgggtttctaagctcccttgttattaaggcggatgatgaaacctagtgtattta

SEQ ID NO: 405777 - DNA, 727 bp, Cannabis indica
atatcaatatttgattaatggttgaagagaagaaagaagaggaagaaataattgattactggtggaatatcgtagtggaactagtgatcaagattgttattattattattattaggaaacttctgcaattcagagaacaaagcaagtttctctttgtgaagaagggtggttgtctttctcagcttcttgttctcttcaatgaaaattgttgccttcgatgattgagcacgtattctatgtttttggaaatcttgtgtaatttttcttggtatgtcttttttctgtgcccattttatgaacatgtgctctacctcactaacatatttagcttaaataactttgcttatgccctcaaactttatattcttcaaagttagttagatatgaatgttttggtgtcctatttagtggcatgcttgtgagttagaatgtcagggatatgataaggtttcgcatgcttggtggagggaagtaaatgaagaaaaatgcaaataatgtttgtttataaataagatagctttcttctaagaagggactctttgtaagttctgttttgaattgcaatatgagcaagtcatatggagtttgagtgggttaacatatcaaatagatttcatgggaaaagttaaaaaaacaaaaaaagaacacgtgtttgtttaggctctgttccttttaggctttatacttcaaagtccttgcttatggcctctgcttttggtgaccttag

SEQ ID NO: 405778 - DNA, 676 bp, Cannabis indica
caaatgtccaaaacaaaaataccatgaatgagaatttcgctatatgatcttctcttagaccaaccattaagtaaattggaaactccattctcattactaactcacaagtgaagtccatttatttgtgaaatcttatatacttatttagatttaaattgaggatattatatattgtacagtgatgggaatacaaaaagaatattataattataattataataataaaatggtattgaaatgggagttataaaattgaaaaaacattcataattgatatgtaacttgtgtatgtgtatttttttcttagacaaaatatgaaaatctcaaaaaaataagaaaatagaaagaaaaaaattataaaatgccacataaactaatacaaattaatgctattagtgatgggaatacaaaaggagtgttatatataattataatcataataataaaatggtattgaaatgggaattacgaaaatgaaaagacactcataattaatatgtaacttgtgtatgtgtattttttcctggacaaagtatgaaagcctcaaaatataagaaaaataaaagaagaagttataaaatgccacataaatttatttgtgcttttctatatttatatttatatatattgatatagatagatatatagatattataattaatattaattaataatt

SEQ ID NO: 405779 - DNA, 493 bp, Cannabis indica
atgtctctgatctccaaacgagtggcgttaagaatacagtaccgttgggttttgtgccctaaataaaactcatttcaatataattagatttactaattaataaaagattagaaatcgttttatgttgcatggttcacatgatttatttcatgattatatacttaaatgtataaattctattaagtcgagaacatatatatatatatatttgttcatgattatagtgtcgtcagcacagtgcaatataatcatgattatatgtttaaaagtttaattcccataatttttcggttcactaaatttagactgacatgataatcagtgataaggtatacttacaccttggataagtgttatgtcctttcaagggtagtggcaaagtttaccagtatttaaggtctcatttcagtaattatattagtttactgaagtacaatttataggtagctaagtgttttcaggataaaatacattgaagggtagaacggtaatt

SEQ ID NO: 405780 - DNA, 1005 bp, Cannabis indica
tgagaacttgtcacccttcactatcggtgccttcccagaagaacatgaatgcatgttgaatcttttcaagatccgatcaatgtaagttttctgagacaaacgaagaataccattggccctatcttgaaggatttgaatcccaagcacataagaagcatcgccaaggtctttcatgtcaaaatggtcaaacaagagttgttttgtctcagccaacagatcagaattattagatgcaagcaggatgtcatcaatatgtagtaccaagataatggaactgctcccactgaccttcatgtatatacattgatccaccacattctccctgaaaacattttgagtgacaatcatatcaaccttgagataccactgccttgatgcttgtttaagcccatatatcgacttcttgagtttgcaaaccatgtgttcttcgccaggcttctcaaaacctacaggttgagtcatgtacacatcctcagataggtcaccattcaagaaggcagtccttacatccgtttgtatgagttctagatcaaaatgggcaactatagtcacaatgatttgcagcgaatctttggtggaattaggcgaaaaagtttcttggaaatcaatgccctttctctgactataacctttagccacaagtcgagccttgcacctctctatttgcccatttgagtcacgtttgatcttatacacccatttgcacccgatgggtctacaacctttgggtagttcaaccaactcccaaacttcattttgtgacatagaactcaattcttctttcattgcatccacccataatgcagatttaggactattcactgcttcttggtaactggctggctcagaatcatctcccacattaaactcatgttcctgcatatagacaagatagtcatcaggaatagcaggcctacaggctctttgtgatcttctcaccacaacctcatcgtcccccaaatcaagattttcatcttgtactggatcttaaggttcaccatgagc

SEQ ID NO: 405781 - DNA, 584 bp, Cannabis indica
catggcactactacaaaaatagacttagtgactcccacttttgtgtgggtcactaaaaagttagtggtgagttttagtgacccgcacaaaaagactctaaaaattcaatgttagtgccctacaatatgtgtcactaaaaatatgaagggtcactatagagtaattcccataatttactttttttttctaaataaaaattgctaatttgtagttatgcgcggggtgtgattgggtaaatgtgtcgtgacatgcatggcgcgtcactatataacaaccttaaattattattttttttaaacaaaatgctaggttataataaaaaaatatattgctgagctttaattattgtctatttctcatttttttctctcattatttctcttttcttatataaaaaaaaaaaaaccttaaattttctaaacccgtaatactcaaccgcacccttcttccttctcagccgcacgcctctttctcaaccgtaccttctctcttcccagcaccggtaaggctttgaccaccgtcgaccaccttctccttgttgggttttgtgccctaaataaaactcattttaatataatcaaatt

SEQ ID NO: 405782 - DNA, 455 bp, Cannabis indica
aattttatttacagaaaatacactctttttattatgttgtactcttgttaatttgttgttgtttttaagttgttttgatattattttcttgttatttttatgtagttttcttattactttcgtgttatttttatagaaaaccgtaaaattataaaataaattctttaaatgtaaaaatgtaattttacttaaaaaaaaatagtaccttatgtaaataataaaaaaaaaaaatgggataagttataataagtttgctacaaattattttgtgtgaatttttttttttaaaaaaaaaatcaataaacatgcataataaataaacaaggaataatcacttattaccatgaggtctcggaaattctcaaagaccaaaaattatctttttctaaagaaatatttgtaataatacaagataatctgcaatttaatttatttattcattttataaaaaaaaa

SEQ ID NO: 405783 - DNA, 700 bp, Cannabis indica
caattttcgattcaaaaaggaagactcaacgtggtcagagtggtggtcgtcagggtggattttgcgtacccagaatgtcctcgttgtaagaaacatcacttgggagaatgtaacaggaattcctggttccagtgtggtaagatgggacactttaagagggactgccctcacttgataaggggagacccagagaaggagttcatatccactccatcttgggtattttccattacacatgcagatgttgtggctagtccatcagttgttacaggttagcttttcataaataactcttattttactgtattgtttgactctggggctacacactcttacatggcatcaagagtaattgataaactgggtagttagttatgaattaggttttggaacccttttacctagtggggagttagttatctccaagaggtggattagggttgtaccgatcacactagatgatagggagttaagtactgatcttatcgagttatctttagcagactttgatatcattttggggatggacttcttagccaagtatgcagctagtattgactgcatgaggaagatggtaagttttcaacaggtgggtgagaaaccatttgtattggtgggaagagttcaaggttctcaaattccaatcatatcagtattgagagctagagacttattagaagatgggtgtataggttatctg

SEQ ID NO: 405784 - DNA, 943 bp, Cannabis indica
aataacaggccacacactgtaagcgttactcatgttaccaaaggggttaaacccgtcagtggccaatcccaatctcacatttctaggctcaagtgcgaaggatggatgacgtctgtcaaactgcttccactcttctacatctgcagggtgtctaagcacgctatcctctttaggtctcttagagtagtgccaccgcatgtcttctgccgagtgtcttgaactgtataacctctccagtctcggaattaaaggaaagtactgcaaaacttttctagcaacttttttttctgtctccctttctctttttccaacgactctcgccacaaatcggacatacttcttttttttttcattctctttccaaaataaggaacaattatacttgcatacatcaatggtttcataacccaaaccaaggttacacaattttatcttcgactcgtaatgggacttgggtaattttgtacccactggaaataactcaatcaatatggcgagtaacatatcaaaagaatggttactccacttattgagaactttgcagtgcatcagcttcaccaaagcgttgagcgctgattttttgcaacccatgtacaattcagtttccatatccttgaacaaatcgtcgtactttccaccaccattcacagggagctcattaaaggaagcagtggtagaacttggatcgtcaaaactaggatcttctcttaaaatatctgccattacatctgccatttcttcttcttctttgtctaatatttctacagccgattgcgtgaacgactcaccatgaaaataccaggtcgtgtacgatcgttggatgtcgtgcacaaacagatgtaccctaatattatcgggagtttcaaagttcacattcagacatctcatgcaagggcatctgtaactccggcagaatttaattccattcgagcaactccaacaa

SEQ ID NO: 405785 - DNA, 554 bp, Cannabis indica
aaaggcaaagacttttttggactattagtatgggaatttaggtggaaattgttgggtaaatctccatactaactgtcacatggaaaaataccttaaacaagttacaaggaaaataaagtaaaaacttttatacaagcctcaacggaccatatagctgtcggagtagtcatttctgtttcataggcttaaatcttatcaactctctacaataacaactcaaggagtaaataacaaaatgtgcaagattccaacaaactttcagcaactcaaagaaaaataataacagttttaataactattttttctcagctaataacacaacatcacagttaacaccaacaatatataaggggttcaacttgccctttaaatggggtgtgtttttcagctcaaaaagaggatatagcaacagccatttttccatgaagatataacctcagtcaagagaaaaaaacagagagagagttttgaaatatatattgtaatacaaaccaaaaaaataaaaaaagaagaaaagagagaaagagccatagagattaccagctgactttgta

SEQ ID NO: 405786 - DNA, 955 bp, Cannabis indica
atatattttaggtgtaccataaaaagttaataccacatatagttttacataaaaaatattgcataaaaatacaattcaatataatacaatacaatacaatacaatacgacctaatacggtgttccaaacgagcccttagtgccctaaattgactggtaacaactatttgggtgtgtaatttcaaatatttagtcccaccactatataaacctacgagttcactttatgatactaagtttctatcaagagacactacaagaaaatagagtattaggggcgactttaaacttttatcgcctcaaaatatttctagatttatcaagcctaaaatatttttttagagcacattgctagaaatattttaggcttaataaatctagaaagttttttctatttctctttcctaagtagtggtagtatgggtaaataagtttttagactaaagatgtaagacattgtttaaatttaataattctcctacttatcacttgtggtttttagtgttgagattgctctcacattactttctttttggtgctttttttaccgtgtggttatttacatgttggttatatagttttgagttatgatttgatctctttatcttttatttttcattttatgtgtatttttataataaatttgtaatattatttaatctttattacaatagttcaatatatatagttgtaattttgttgaatatgttcactttttttttttgtgttacccatgttatttttacgtggatatcacttagataaaattattatttttatctcttcactactttattaaatatgttaaacaaagggattttatggagagagataggttggtgttgataaaaaataagtcatataagtggggtgcccaaaagggtatataattgggtaaatatcattttggaccctgtgttttgcaaaagttattaattggaccctttgttttatta

SEQ ID NO: 405787 - DNA, 1167 bp, Cannabis indica
ggttgagtcctcctagagtgggtggttcgtctggactgtggatcgaaagacctcctggtgcccatgggatctttccctgaacggtgatgagtttcctcatgtggtgtattaacatcttctaggttctcagccatgaaggagatggtttttcttcaaaaaaaggagggttttccctgagcttttttcacgaaggctctcaatgaaagcaccaaactattaacgcaaattttcgttaaccaaatttgagcctaaaagtgacaatctcacacagaaaaaataaaagctataaaataaaaagtatgaatgcaaaggattttttacgtggttttgcagttaaaattctgcatagtccacgagtcaatcttattagatttttgataatttttcagggccttttttgtatgatctttttgtcccttttttgatcttacttgccactatttttaatcacatagtaggtagttaattacaagattgactataatctttacagcatttttccctaaaatcatggggtttgattacatatcacgtagtataaatgcggttattatttaaaaatcacacagctgtgattttcccgcttttactgggtcaaaatgatggtgtgtttaaacacgtctttaattgtatcgttctgggatgtctcgacaggagcttggttccagtgaccgtgatagcgagctagagccttttttcttatcattccaaggtcgacaatatatgccttgttgcttctttgtttgaaagcttaacgcttcatttgtgacaatcgcagttcttattaacagagagtttctcgaggatcatttgaatgttaggctctaactcgtcaagattgtaagtcttactgacagatgtctgaagttaactagtgaaagttacaggaatgggccttcttatagcaagataggcacctcgtttattatgcctcgagtccactcgactgttgtacttagtttgtgcattttacactgttatccaaaatttggcactctgacgtggcatcacgagaatggagacacgtggactctacttaaagcatctgttcggatcaacacgccgagcagatgcctcgctggcatgtccagaatggaatactcaacgatccgtgcagaatgagcaacactagcgaatcaaccaacgcatcgtgagtcaccagctcaa

SEQ ID NO: 405788 - DNA, 656 bp, Cannabis indica
gagacagatagtggaagtgggtatagtcataattcgaacatggtatgtttttaaatttgttttattattaagtgtatttattttctgtgatgacattactctcattcattgggtattttttttttctttttaatattagaaaaaaaaatgtgtttgctgcctcgtgggatgattaaattacataggagcaagttgtctttcaccttttggcactattttatatcaataacaatgaattcgttataaattaccataagcttattataattagttaaatataagctgtccattttaattaatattatctttgggatatgacaacctctagtagttaatatttgcagtacaataagatattgcaaataagtaaaatgagcttttgtacgtagtatattcaattatatatataatttatcatataagcttagccccaagatgatggcaaagtcagattgattttccttttaagggatctctcaattggggtgggtgggttgggggaggttaatatagtgagtgaataattgttgagttgcttaaaaaggacaaaagccaaaaaaaaaaaaaacgaatgaattctttgagataaaaagagactcaaatcactggaaatcttcaagcaaaaggaaggaaatttaatacacaaattatggtgt

SEQ ID NO: 405789 - DNA, 881 bp, Cannabis indica
gagggcatctacatctactttcagtctctaagtctcattataacacgaaaagttacacaaaattaatcaaccaaaaatacactaaaagtttttgaaattttttacaatacaccttttaaaaataccttttaaaatagaagcactgatcatgtactcctatttgtttggtatcttaaattatttttttggtcaaattttttcttatttgtcatgtacgttatagttttttaaaatatcttgaaaaaatttagaaatttaaaaaaatttaacacgtcaaaaaatagggttcaaacaatgtgttctattcgtgactattttattttatactcgtgtgaaatagattatttttcactgcttttaatattgttaattattcaaaatttcttaaagttatataagatatatatcttaaataattataacgcacatgaatataatttttttttttttttagttattgaataactaaactaaaaaagatattataattaaatctatcattttttttagattaggaaataatgtgattaatgctaattgtaacgagttgtcgctagaagtgacttaatttgttgcttgttactaaagattaactttaaagacaacattgttattttatttttattttttttgaaaacaatgaatatatcattgaactaaaaattaatatgttcaacaacctaatatataactaatgaaactaaacatctcaaagacaatatgaaaaaatatccaacttaacaaattatttattaatccgaaaaaaatgtacaactaatctatatgcaaccactaattgacattgttattgctagatgatcaatagactttttttcttatatcttgtaatgcactcattgacaaataataataataataat

SEQ ID NO: 405790 - DNA, 247 bp, Cannabis indica
ttttttttctttttttcttttcttctttttatttcttttccttcgtctgtatcacactatctctctcgatctcctctctctgtctctacacttcttcttctctctctctctctcatggatgcaggttcatctcccgtcgccatagccgaggaccaccaagccagctccgtcaccgttgccgaggaccaccaagccagcgccgtcgtcgtcgccgttgcagaccgacccagtgttggaaattatttta

SEQ ID NO: 405791 - DNA, 704 bp, Cannabis indica
cttacatttaaatttcgatgaaactctttgcaaaataaaatagctaattacaatttttgtcctctcaactttgatgtgtactaaatcatatttactggtgaacttttcaagccgttaaaaattattattgaactatttaaattgttagatttaaagacttctgaccatttttattcaattttactaatgtggcatttgttcatgtactaaattatgcatcctgaactttaatatctactaaatgttgtttaaattttaacatgtactaaattgtcctcctaaattttcatccaagttagactttcttcaataaaattaaacaaaagtccttaaattcaaaaatttaaatagtttgggagaatttttaatgatctaaagagtttaaaaaacgtaatttagtatatatcaaaattcaagagtagaaattcaaattagccaaataaaatacaaagggaaaataagagtgccacgctctattagcatattgcttaaaaaaataatttatttattattaagagtaatttaggtccaaagaaagattaagtgaaaatttattaagagtagttgtttttgacaaataataatttttttaagaaaaagcaacagcgtaataaatattaaaaaatagtcgaccaaacaactactcatcaatttattacaagcagagaattaaatgcaaacatggagagcttcctagacacaac

SEQ ID NO: 405792 - DNA, 835 bp, Cannabis indica
gggcatgatttggtacatgttaaagtttaggggacaaaattcctaattagccttatatttttttactttttgaagaaaaatgctattttttatattaagaatgtgaaaattgttatgaaatattatatataaatattcaattcacttaaattttttttattttatcattaattgtaattactattcttctttttaattttccattattttagtcttatcaaatcattaatcaatatataaaggagaactatgagacggtaatatattattctaaaatcactctaaattttttttttctctcattaattttctcaattttaatatttttattaaggcataaatttacaaattgatattttactattattttaataatttttctataaaaaaagcataaatctacaaattaatattttactattatttaaatcatttttctatgaaaatattaaatattttaaaaaaagttagaaaataaaaaacaaatttcaaaaaaaaatattaaaatttaaatcaaataaaaataaattccaaaaaaaaatattaaaacttaaatcaaatataattaaccataaatttcatttatataaatacataaaatttcaatcaatatataatcttaacgttttttactttttttaaaaaaaaatatgataagaacaacaacaataataatataaaaaatgataactctaaattattatttgaaaacacgtatgattgtctatataatatacattcataaattatacgttgtgatagactctagaaattttttttgattatattataaatgattgaagaacaaatttttatttctttttgtatattgaga

SEQ ID NO: 405793 - DNA, 729 bp, Cannabis indica
aattaatggggaagaagatcaaggttctgctgctgttgaacaattttggaagaaattttgggctttaaaattacctccgaaaatgaaaaacttggcttggagagcttgtcaaggttgtcttccaaccatgattcagttgagaactaagcgtgtggaggtgtcttcggtctgccctatttgtaacagccaggaagaatcgattttccatgctcttgttggctgtccagctgctacactttgttggaacagagtgggaatcggcacagcagcaccacaacaaaacagtttttttcgactggtgtgctttgaagtttctggtgtgtgatgcagataaaaaaaaaatcatggttgctctttgttggtcaatttggaatgcacggaatgacaaggttttgaacaacaaaacatcaagtgtggaaagtatagtattttcggctcaatcttaccttaatcaatggctaactgctcatagttctaatgtcattttcccgagtcctggtcttattccaggtgacggagctgagcagtgaccacacttgatgctcaattgagttagccattaatcaatgtcgatagcattaaggttaatgtcgatgctgctttattttccaacacaactcaatttggaattggctttgtgattcgtaatgcacaaggagttctcattgaaggagttaccaagctttttaatggctcggccacaccagaattagtggaagcaatgggtgt

SEQ ID NO: 405794 - DNA, 622 bp, Cannabis indica
gggaaaatttaagaaaatactaccaatagaagtacctagtcagatgaccatatcaagtacaaaggaacatttactcttaagtgaatggccatttgggcggaccacgcccaaaggttcagataaaatcttcaagtactcaggtcggatcaccaccattgaaaatacgatttttaatttatgaaatttgttttatttcatgttaagccaaagatcagattagatcagtataataactttgatgtaagttactacggtatcagacacaattccgatcaataaatgaatatttatttcaaaattcaaattgagttgaatctattaccatgttatcaatttaccatcaagtgcatacaaaaggtttggtcgagccccaaaccccgaacaaacaagaacgtatacttgtaaaaaagtataagaagtgacaaagagtcattagtctgctcggtcacttggggggcacctatacctgtacaaagcatttggtaaaaaataaaacaaacactattgcacgatgattattaacagagaatgaaattcattaaagataacaaaagaatgcaaacctgggattaaaagctgcccggtcagctagttgtgtgtaaaatgaaaaataaattccaag

SEQ ID NO: 405795 - DNA, 840 bp, Cannabis indica
taaaccgttttttttttttttttagttttttctttttactctaacaacaattttttataaaactttaaaaaacaagaatcaaacttcaaataataaaaaaaagaaattgtatatatgatcaagttgactcaatttcacgagagcgtgatgttttacatcattgatcggatcacataacatgcatggaaactcactatacatatgtaagctctactaattattaataaacataatattaaatatttatgatttttagtactattttttatttttattattgttttgtattaaaaggtcagctaataagcttcctcaaaccattgttattttattattttcttcaaataatgaaataaagtcaagtgttggtggtatgcatgaaacatggttaatattgtcattgaattttcttttatatttagggttataatacatattggatcgaataaaaccacgcatgttcaattgttcatttcatttcataaaataaataaataaataaagaaaatccacgcatgaaatagaagatgctgctaatattgtgatccaatctaatctcccaattaatttaaatttatttatacattaggttaatagaggaagtcaaatctaataaaatgtatcaaaatttgttcttttttttttttttgtgagtgaaaatacttgttattataaattaaacaaagagttcatctacaataacagagtaaataaaatgagggatatcctcaaaccaataacatgtctcatccacccctaatgcaaactttaccaaaccaatgagccgcctgattggcagtgcgtttgacatgcgatactgttacatttgggaaaaaggac

SEQ ID NO: 405796 - DNA, 512 bp, Cannabis indica
tgaataaaggtattgtgaaaataaaaacttatcaaaagtagttaaaatttcttaattgttgcagagcaccccaatattaataaaaaatgacaacataataacatgcataaactaaaaatattcttataaaatgttttcataaaatttggatggaaaaacaatgttgaattaataatttagtttcgtatcttatactcatactattatttttcaatctaacttttaaactcttacatgtaaaggtagcatatcatgtctttataaaaaaattataaatttgtagaacttctttaatgaatataataattttttttttttgagaaaatttatgagtttcatcactgcttgtattaaaactattttttcttcttttttttttcaccgtgtaaacttacttgtttggccaagtaaattagttactggaatgatggctttctttcttttgtgcaatgaaatttcatatttttctaaaaaataaataaataaaagagttattgttaaattcctttacc

SEQ ID NO: 405797 - DNA, 779 bp, Cannabis indica
tggaagaaacatttcaattaaaataaaagagtcttggatctacaggatgagatccctcccccaccaaagatcacaataccatagcgagacttcctagcctcaatagctagattgttcacagaatgaagagtatcatgcttaattaaacaaacataacagttagaaaatgacttacaagacagaatagaaaagaggtgaagctattccagttcaactcttttgcccacggcaagccatccaaatggcctccaactccgcctcaagcacagacatgagaagttgtcaaaggagaatattcaatggtctcctccacctttggggcatctcaaacttaatatagatgcagctatgtcttcttcaattggtaaaatgagttttagtgcagttatttgaaatcatgaggaggcgatgattgcaggccttttggttccagttcagtgtctctgttctgctgtgttgatggaggcaagagctttggcgcatgctcttcagtggtgtgtcattttgtttctttgcctaattttattattgaaatggattgtaaatccttttattgataactttaggttaggaacgattatacaaatttctcttctttaagcttagcctcctctcattgtttctcaagttgttagataatctaatactttagctcaatttctagctggagtggcattattgtgaatggaatggtcatatttctcagggctcatttgtaacgttgtattgtattgtattatattgaattagattatatatcatatttttatataatacta

SEQ ID NO: 405798 - DNA, 624 bp, Cannabis indica
aacaagggtaagaatgtcattttcatcacatacacattactcaaataaatttagattattcatatatcaataacatgccaatatcaaatcccgaaaatgtatttcgaccccgaaccaagttcgacccgaaatacccgattgtgactataccgtgccgacttgtcaaaaaatactaaaaaggacaaaacaagtatactatataataatatagtcccataggcacgcaagtaagttaaatttacaattttacccttctcgggtcaaaactacaaaaatacctctggctcaccaatggggtcttaacatgttataaataagattaattcacatataataatttatataataatataaatccataataaatacacaccaaaaatccaatagaaagcaaatattcaagtgaagaaaattttgagaaagagagaggggaaaggagggtcagttaaggctatgttaatttctttcatctttcttcatgtgttgttcttgacttcctatttggaacaagcacctcctaggagttctcatttttggatagtttgtctagttgggacctctccaagcagtttatggcaaaggacccccaactccctttctatgctaggtagttagggtggctaa

SEQ ID NO: 405799 - DNA, 643 bp, Cannabis indica
aaaaaaaatttaattatttctaagaaaaaatggtacctaagagaactaggcatgttgagcaaggttcgtcatcaaacccaccaactacgggtttcgatagaacccggtttgtcaatgaggaggcacagaatcattttatgaggctgaaaattaggccttacattgaagaccggggtattgcattccctaaaaatcctttgagacgtcaaccaaggtttgagacaatttcagcccaaattgagaggattaagttggggagctttgtggatgctcggggccgggctaatgtgactatggcatgtgaatttcttgccaattggcccgagcgccggaatggagaggtaaaggtgcgagtaaagaaggttcacgccactgctgatgctttcaatgttatgttttctgtcccggattattctagggaagagcaacgcctccgaattattgaggaggaagagcagtttgatttggtggatgtggctaagacggtgggattcccggggttgaggttccacgacaatgatggtcaagaggggtcgccaaacatcctatatcggtgtgaattaaactcagtggcgaagacacggctgtacttcatgagtgctcggttagtgccaaataaacacttctccgatgtccaaatgga

SEQ ID NO: 405800 - DNA, 547 bp, Cannabis indica
atctaggacttaacttgcccctatttccgaagcgttttacacttttctattggtgaaatccgtaggaaaacatgttctcctacctgaaactctatgtctcggtgcttaggatcagcataactcttttgcctagtttgggaagtaagcatccgtgccttgaacttttcgatggcatcacaggtctgttgaactaactcaggacccaaatactttctttctccagtttcatcccagtgaataggtgatcgacacttcctaccatacaacaactcatagggagccatccctattgtactctgatagttgttattataagaaaattctattaatggtaggtacttgctccatgaatcttcaaaatctaatacacaggctcgtaacatgtcttgtagaatttgaatcgtccttttagactgaccatctgtctaggggtgaaaagctatactaaacttcagctttgttcccatggacttctagagactttgcaaaaaattggaagtaaattttggatctctatcagaaactatggatttcggagctccatgga

SEQ ID NO: 405801 - DNA, 800 bp, Cannabis indica
gctgcggctgctaaggcagtgtcgatggtgaagccgttgatgtcacttccactatcagtttggctctcattccggctgccaaggccgacacaaattcgttacttccaagctcttgtgtcttccatgactcgactcgtctcttgtgatcattacactgtacatacacaacgaaattgttcaatttttattagataagtaccaacaaaatcaagagagaattctacattctaagtctaggctgtgtaaacatgacatatcactactgcaatttaataatataatgagatccaagattcattaaccatatagggtgttgcattggagagtaaatcatctagaatatactatagctaatctaataattatcaacatctacctagatatatatgacatctcaatgtttattatgtttcaataaaagataagaattcaatcaaatccttaatcttctcactcattagaagaatctaaaaccatgtaacaataatctgttgtttcatagtttcatttcatccacctcaaacagggaaaaaaaaaaaaatctttaaccttttttagatcctaatgtattgtctaaaaaaaaaactgcacaatccaattttcatttatctcaataattctacaaatacgaaaccccacctaataacatataatttaatcaattacaacattgatttatcagacaccataataggaaaatcaaataatttagaataaccaaaggaacaaaattccttataatataacactgaccaatttaagggtatcaagataagcccttgtagctgatgttgcagacc

SEQ ID NO: 405802 - DNA, 514 bp, Cannabis indica
aaaaaaaaaaagttaagaaaaacagtatataaggtaaataataataaataagtactttattaataatctaatgtaaatttattttccaaaaagtactggacgtcactattatatatattatatataaagtgtggctatataacagaatttttagcttaacgatgctttttttttggatttttacgttaaatttaacagaatattctttataaattttataatattattatatatatttaaaaataaaaattatatagatattttatataaagaaattttaatttaaattaaaaatacttataatattatagatatttttaatcatattttaaaatttattggtttaactttaaatgaaaataaaaacaattatgtaaatattttatataaagaaatttaaatttaaaatattgtaaatatttttaaccatatttttaacttctttatttatattttatattttaaattgaaatggttggactataaggaattgattgcttttcattttagttat

SEQ ID NO: 405803 - DNA, 1134 bp, Cannabis indica
atacttataaaaaactataacatgttaaacttataataatcaatataagcactcttaaaacaatcaaaacgtcatgagttcaatcctttaaaagtaatatttttttctttatttatatttaatttaaaatttcaattaatttaataatttcaaaattttatcatgttatattaattaatttacttttcaaaattataatgttcaatgtatttaaaaattttagatataaaattaattatttattttaattacattatttatataatcatatgcataaaataataaataatacatatttataatatattttttcttcaacttagttcaatgtatttaaaattttttaaatattaaattaatttttttttaataacactatatctatataaattatgcatgtactagttagctagtagtatacatatatagttgaaaaaaaattaatgcacataatcctatctctttttaagtgacatgagttcaagccttgacaccttcatttaataataaatttatacaatttattttttacatattacatttatttcgtttttttgaagagttttttatctcctctttatcattctcactaacggtaatcatacaattcatttcgcactattttgagtacattcgatttgtactaagtgagaatttcatattttggatccaatccacattataactcaaatctaatctgcaaaactgcagattagattggttagtttttaatattgaattacttaatgtttcttagttttctcacataactaacaacaaaataaaaataaattattattattttatgtcgccaacaacatattaaaataaataaaacaaaaaataacaaacataagggaaaaattatatgtataaagaatgtttagttttattttacagtgtgtacttgcatagtaaataaattaccactatgtgtacttacatagcaaataaattttacagcaataaagtattatatttggatgatattaatgtcttactgcacgttttataattatccaaagttgtcataaactatcaaatttagatgagatcgacggtaattgagatcgttcagatattttttagtgcaaaacttttcatctatttattatgtatttttattttgacaaa

SEQ ID NO: 405804 - DNA, 439 bp, Cannabis indica
aaagttttttttttctttttcagtttttttttttcgacttttcatgtaccaagcctacgtgtgaccactttatttctctttatagcctgattttgtggtagtgttgactttgcaacgacctgtagaaagaggttgtaaaatctcaacagcctagttttgtagcaccctgctattcttaatggctgcagagagatgttatgaacttactctatctcagtaatatgttagttatatataatataatataatataacttgtttattaaaataggtatactgcttttatgtcaggctagatggaagaagctactcctcgtgataaggctatattcaaagcctacatatcattatcataattcctgacatatttccttgtatctccttaacaccttcctgttttttttttatataaataagactaactgcttggttcatttatc

SEQ ID NO: 405805 - DNA, 513 bp, Cannabis indica
  modified_base (53)..(53): a, c, t, g, unknown or other
tcactacttgttacatttttttgggcatatacatgctatttcatttttttaanatacatgctattctattttaatgacacctttaatttttgatacaattctaccacaatttcccatctcaccattccaaaaatttatgtttcagttcctccatatcatttataccagcactgcaatggcaatagcataaactttctttttgaagctatcaattttttgctttctttatccacttacggatatcttcaaaggtcacaaccgtagttcttcattgaagtcattgcttgatttgtgctaagcaatttttcgaaaataggcactcgaaaaacaagtcttccattgtctcactgccatcattgcacagtaagcagttatcattgtcaattacatcaaacttcttcaatctttctcttgtcttaaaacgaaactatgctttgaaagattaaaacgactccaaacaaacttacttcatgccaccttagccggttacttgtgtaactcactataaccaac

SEQ ID NO: 405806 - DNA, 559 bp, Cannabis indica
aaaaattaaaaaaaaataaattaggtgatattttataagattttttatttttactaaattgtgaagtttttttattttgtgaagaaaatttaataataaatattttagaaacaattgtacattgtttagaaatcatatagtatataaatattatttttattagtcacaagttctttttatcgcatataatagttgaataaaatattttttattataaatattatttttattcaacacttaattttaatattaattaaagaaaaagatagacaacaaatatatttaatattaataggaatttttttacttaggtataataagatttattgaaaattaataaacaacaaataaaaataaaaataaaatttaaatatttttttattatatatgaatagatatatgtatatatatattcatttagtattttgtgttttcatatttgttaccttgtattttcaatattacttaattggtaccttatattttaaaattgtacacatttgataccctaaagtaaaatttatcaatttaatcaaacagatctcagttatatgtaatc

SEQ ID NO: 405807 - DNA, 513 bp, Cannabis indica
aaaaaaaaaaaactaatcaattgaaatattagaatgcaaaattcgatattcaaaatgagtaaattatacaataaagcagatcaaacgcaactcacaaaaaccaaaatatttaacacttatcagagcaaaaattttcaaataatgggtataatattaggagtatattttagcgatacctggtgtaatggcggagtagaagcagatctggatggatctggtatagtggagaggtgtggagatgaggagagaagaagagacgaaataaaaattggttttttagggtttttcggaaagaaatgtcacaaaactgagaaactcccttttgttctcttctctctctctctcaaacaaaaggtctttaacttgtttgtttccccaccaaaaatataagaaaaataaataaataatttgttcacaaataataataacaagatatatttttactttaaaaaaaaaatgattacaaagatattattttttttttacgaataatttgtggtataaatatttaag

SEQ ID NO: 405808 - DNA, 682 bp, Cannabis indica
atattatcagtgataagacgccccgggataaaagcactttggttttcagaaatcacagaaggaagaacactcttcaaccgattagcaagcactttagaacacaccttgtaaagaacattgcagagagcaatagggcgcaggtctcccatggtagtggcatttttcttcttagggatcaacaccagattagtatgattaagaccaattggcaaatgaccaactaagaaaaaagaacgaacctgtttaatcacatcagcgcccacaacagcccaaaacttttgatagaaccctggtgtcataccatcaggacccggagacttatcagggtgcatctgaaaaagagctgctttcacttcttcatcagtcaaggttgcattaaaaaatcattctgagccgaagaaatagagggtaaaataccatcaagaacatcatccatatgacaagtagagctagtaaataggtttcgaaaataagaacacataacctcagataaacccgaatcccagtcaacccaagttccatcgtcattctgaagcttctcaatagcattcgtccgccgccgagaggaagccgtagcatgaaagaatttgctatttttatctccctcttgcaaccatagttgcttcgagcgttggcgccaaaaaacctccttttgagtaagaacttcgaaaagctcagtctc

SEQ ID NO: 405809 - DNA, 506 bp, Cannabis indica
aaaaaatatacatataaacagaaatattaaaattattttttgaaagtattatattactattaatataattaagtatgtctcgtataatttaatataaaaaattttaaataatattattaacaaattgtaaaatactatctttaagtggtattagataccaatagtacccaataataatattaatctatagaccttggtaattattatttatgtaaatatccaatacgaacttctattctatctaccataaattttatactaaggaaagccaagtgttaggtagaattggttggttggtgacttggtattagatagtttcggtttacaatcaacgttaagagaatttttcaaagcaatttatattttttaatgtattgaaagctctcattgcatttataatttaggaaaattctataatgtactcccttaaaaggaatacaccaatatatttctatccgttttagtatctaaaataattttttagtaaaattttttctcatggtcat

SEQ ID NO: 405810 - DNA, 522 bp, Cannabis indica
tttgtttcctttgctgtgtgtagagattgtttaggaataaaaattcctaaagtggtatcagagccaaacaaggcacaatctgcagcaaagattaataaaaaaagcataaaaaacatcaagaaagcatcaagattcacattcataccagcaagaattcaaacacacaaaaccaagattgcaaagaacaacaccaggatttttctaaactcattatctatataatttctttgaaataactttatacatatacaattatgagttccatgaaggttgatatagataagtttgatggttcaggtgattatcgtatttggaggaagaagattcgggctctattggctcaacacaagctgttgaaggttcttaaagatctggtggaatggtcaagtgatacaaccaaagaccagcaagaagagttgctggaaacagcaaccggattgatcattttcaacctctctgatgctataatcagattggttgacaaggaggatacacctgttaagatttggaacaagttggaag

SEQ ID NO: 405811 - DNA, 522 bp, Cannabis indica
gctgctgcactttttaagaaaaaagtactcacttctgcagtgtgctctttatgttcacaagcttgggaatcgattggccatgctttgttccaatgcagtcatgccaaaactgtttagagacacttcaatttcccaattgatttcaacaaagcacgccgtatggttagtggagattctattttttatcttgcaacactactaagccaacatgaattagaattgttatttgtcatcatgtgggtaatttggactgaccggaacaaactaaatcatggtgaatcaaggcgtgatggtttttctctagctaattatgctacaaaatacatggagaattatcaaaaaagcaaaaaaccattccattgctgttagtgaaccgactgtaccaacatccactacaactataccaactgaaggaattcattggaaaccacctgatatgcatgttgggttttgtgccctaaaaaaaacccatttcaatataatcaagtttactaattaataaagatcagaaatcattttatg

SEQ ID NO: 405812 - DNA, 413 bp, Cannabis indica
acttttaccagatcaaatgtcaactgatgaggcctcacaaggacaaggtcggcttctattggttgtagcgatacaacacaagtgtcccttgcccaactagtcatatacaatacatgcaagacttccaggactatatcttctccactttcagcttcccattgaggcgggtctccacccttagtttggacttaagtcttgtaagtaagttttgattccaattttgacttacaaaactctattttccctacatactcattattcttattcactactattttatgggagagagagttaacttctacaaatccttcttaccctaggggttataggttgagagcctggtgaccatgacaaatctttgggaagtgggtctcattgccccacaccaggatatagctgttggaaattatttt

SEQ ID NO: 405813 - DNA, 845 bp, Cannabis indica
aggcattcatcgtcaagtcatcctctgttctcccagggatgatgcttggcgcttgttggcctacagtctgataggctcttcgtatcaccacagtagcttgcctactacgatcttcgatttctgcatggtgagccctcaatgcctccatctctttgtccctccatttggcgaacatacgcctctgttcgtcaaatgcgaggtttacggcggcacgtaattcctcctgatcatgatgcagagcattgttatgaccctgcatgagtccgagcgcagcgcggagatttcgcaattcggttgtgtctccgatggtcgtttgggtgttgatggctagtggaatagtcgtgttatgaccgccctagctgtgtgcggaaccgttgtttccagtctcttgcacaccaggcgcagtttcagtaacaggagttgtcccaccattcaccacgcttcccgtttgtccaagattgacagcgggtggaacccttgaactccctgggtcctgcaatgtcggatccagcgtctgtgagcttgctgggtcggacaggcctctacgagtttgtaccatcgtgtcgaatattgaaaagagcgatctgtgattctgctctcaatgaaagcaccaaaatattgacttcgcttttagccaaagacaatgagtctttttgataagcgataaacgatatgtcgtaatgtgaatatataataaagcaataacaagacacaaaaattttatagaggttcagtcccgagcagttcggtaatagcctaatcctcgttaattttattgactttagaataaggaagaagtttccttttcttatagctcttacaagaatatctctgaatatataatt

SEQ ID NO: 405814 - DNA, 544 bp, Cannabis indica
cttggacgaacaatatgtcccaccggccactcatcctgaaatttgtttccaagacctaactcaaagagatcctgacgtggcactcatcggccaagaggtcgaacaagttcacccatccgtgcaagcatagttggatgaattgaaagaatatgttccaaggccttgccggccggaaactcaatgatctagagttggattgagcacgcggatcaccattcactcttgaaatcaatgttctacaactacccctcaagttcaaaatgctgacctggaagatgtacactgggaaagaagatcccttatcacatctcaaggatttttgaaaagcaaatgaatttgtaaggggtacgaggagatgtgcgctgcagagtattccttgccacacttttagaagccgcacagtaatggtatttcaagttatcacgaacaaggttcaactcttggaaagccttctcttcagagtttcatgcacagttctcttcttctcgacaacttccactgcatttagaagacctggtcgaagtgaagcaaagaccaggagagc

SEQ ID NO: 405815 - DNA, 628 bp, Cannabis indica
catttaagggtgttagatcatactgattaaataggctgggccttggacgcgtgtcatttcaaggcttctcttatttgaattccccttatccctagccgttggattatttgggcaggtacacaaggacatgcatgctttgaacgatagtgtgttgtgggagacaatctctgacatcgtacatgaaaaagcctggtcactaggttcgtagcctgacacgcgtggataaagcccgtgcgagtcgatggcgtacctgggattgaggcattcttaaaatgtcttggactttttgggaaaatccctactctctgcggtagtacatggtgtggtttatggaggtgagggaaactttgtttcacggatcccttctgtgtaactagcaatcagggaactcctcttcgtagaacctcttcccgcgaagttggtgcctttactttcctggagcatcaaaggaggaagttggtctagctaatgactccttagccttttttgattgaagtccacgtgtcacaattatgaaaatgcggataacatttaccctaagcttttggggcgtgccacggtcctggagcttgtagtatctgttgggttttgtgccctaaataaaaccctttacaatcagattagttat

SEQ ID NO: 405816 - DNA, 591 bp, Cannabis indica
cttggataagtgttgtgtcttttccacgacattgcaaagtatgatagtatcagatgtatggagtatacatcacattggaccgatattgaacttgaataagatatcgtaaacttaccgttatgtctttctaagtcaatatcactggttgatcttagatctatagatcttaatcttgagatggttagattcgatcttaatgtattatttatgttcttcaatgtgttcgttaaagtcgaccaattgaatcttctcgtgacatacaaattaaggatatggtagttcaattgagtgggagcactaatcatagatatggaatctatagcatctataagtatttagaagtgaaacgataatttcttttgagcttggctttaatagagataaatgattgaggcctcattttagcaattatattagtttactaaaatatcatttataggtagtgttatacccaaaattcaactgtactccagaagctaacacatgtccaacagaagaaatatgaatcaattctaagaatataataatattacatcaataattgcatattaaataactcgctattcagtacatagaggtttgatagataaa

SEQ ID NO: 405817 - DNA, 700 bp, Cannabis indica
ttattattgttattaatttctttttggaatgaagaaatattaggtggtttcacaatctacctaactatgagaaaaatggagagtataaattcgaagccaacgtctttaaattattaataaattagtaaataaatcgctcctacttttatttataaattttttaattatacatataaatattaattagacaatcaaattatatcaaataatttttaaagtatttttttaatgtataattttaaaaaatatattatacattcaaaaataataaattaatataaaaaattctaagaattctaataaaaacacacaaaaaaaaatatatcttctaatatataatctcaaaataaatataaatttgataataaataaataaatgtaatagttcatggaatgataattttttttttttttgacatggtgaacaaaatcacacatgattaataatgcagcaaaccacaatcgacggtgggacctcctcgaaccaggatagttcatcgtctaactgaagagcacgttttgtcaaaccatgagctgcagaattcttatcgcgagccacatggaacaaaactgctcccagaaatttagacaataaaactataacgtcttcaaacagcaccccattagattgaaaaagcaccttcctatcattaatagttgttgctagagctagcgaaactgaaaaaatatcacaacacca

SEQ ID NO: 405818 - DNA, 996 bp, Cannabis indica
atctaagtgtagttcaagttgttagtaaggtccttgaacttgttcttggtaatttcttggaattttgaagaaaaatgatgatgaattgcatgcttaacttgaagtgttgttgctggtgtgtttgtgagataatttcagaggtttaatcttgtttaattgagtataatagagcaggttatgatgcatgttagctgtgttgttaaaagttttgaattttggctcaaaaactatgatttttaagataatttgatgaattttcgagccttatgtaaaggccgcttagctttaatttagaaattagcagataatcaggagttaattatgagaattatttatttatgcttaattattaaattatgatgatttatttgaattcagaatgcattcttatgtcacatatagaaatttcataattttgcttattttggtgcccggcaacattggaacgcggtgtatggctttttgaatcacatcttagtatttttagtatagcgggacaatagttagacttttggagtgtcgggaattaacggaattttaaagtttcccaaaatacccctaagtacccttttatgccttttagtgtggaaagggcaaaatggtctttttgcccattcttgttttgtcttatgtgagttttaattgatttaattaaatcagtttttttaaattattttggctgaaatggtttaataaaacaaagtttatttattcatttttctaaaaaaaatagaaaaattagaaaaagtgaaaaactctctctttcattctctctctctctcacgaaatccctaagcagctagggttctggaatttgtgtcttcaatcttgccattttacagcagattttagtgattacaagcaagggtaagcttctagacaacctccctatagttttcttgaaaattaagttatgaaatcatgcatgttttgagagtttgagtcctttatttgctgttgatatttgattttgagtttctgcaattaaattatgat

SEQ ID NO: 405819 - DNA, 889 bp, Cannabis indica
tattttgttggtttgactgggcctggtacccaattgttttgttggttttattgggcttgattggtgtccatacactgcgctctcttgtcattggtacttagtccatatcccttagtgtataagcttttgcagatcttttgtcattacaatttgttatgagcaagagcaaacaccacatatattaggaaatctctacaagggtagcgatccaggtttgtggatcatacatatcgtgttgagaactatatatataataggtatatgttcgatccgaacacaatctgtttataaacgggttgactcgacacgacttgtgtaactcgtttataagcttattttatttaaacatgtaaaccaataacacgtttatgacatattcaatacgcttatcactcatttatgatctaattaaaatactaaaataactttaaatagatcatttacagattatttcatattaattttgttaactcgaacacgactcgtttattaaacaggttagacgagtcaactcgaacatgacttgaacccatttaaggaaaactcaaactcgctaactctcatgcgagtttcgagtcatattatcgtgtctaatctgttttgtcagccctactcctggatcattcatgtaaactccttatctgtttcagcattcaaaaaaaccttttactctagttttttcttttaatttttaaaattttttgaatagtttacagtatcaaaaattaagtttattacataccacgaaaaaataatcgtgcgaaacaataaaatatataaaattctatatttttgacattgtaaactatttaaattattttaaaattttacaaatagtcctaaataactataacgtacacaattatgaaaaataaaattaattaaaaaa

SEQ ID NO: 405820 - DNA, 418 bp, Cannabis indica
aagtagtaggtactgtacaacctcatagaggcttgcgccaaggtgattgttatctccatatttttttgtgatttgctctgaaggcctttcaagattattacaatatgaagaagcggttggtagacttgaggtgcttcgtttgacatgccactcttcttcagtctcacaccttcttttttccaatgacaaccttttattttgttgggctacaaatagttctgctttggccattaaaagtacatttgacatttaccataaatcatcgggccaattcctcaataataataaatcagtaatgtcttttcccccaacacaaatgtggttgctcaaaattttacactcaaactctaggaatgtcgatcaatgagtgtcatgaatggtacttaggactggcttcttattctggccgagataaaaa

SEQ ID NO: 405821 - DNA, 676 bp, Cannabis indica
tagaatttttttatattttactgataagaataatattttaaataattataaaatacttaagaaataaattagtataatttatctaaaattaagttagaaaaattaaaattaaaagccattttaataaaacttataatagaattattatttttgcaattgaaagaattatcattgaaatttcaattaagatatatataatacactagtatattgttacgtgcgatgcacgtatgctatgttttatattaagtattatattatgagttcggaaggaaataaatgaataaatgaataaaaaataaataatatttaatttagagagatttgaataataaatttaaattaaacttttatgtccagtaaaaatatattggaaacaataataataaggttataatatatgttattaattcccgttcttaaaataatagcagcaagaacatatttaacctggaaaaataaatattacaaaattaagaataagcaaagcgtgtgtaaattagacaaagaaggaaccctcaattctcaaagtttcgattataaagtaacaaagaagtattaaaatttcatctgctcattataaagccaccttcactcaaaatagcacaacaaaagtaacaaagaagtattaaaggtgtaaattttaccaaaagtaatgagaattaacaactgatga

SEQ ID NO: 405822 - DNA, 315 bp, Cannabis indica
tttttttttttttttggcaaatttagtattttatgttctccataatatattaaaggataaagatcacatttcttccataaccattttttttgcactaaatttgcatctccaatttcatgtatgaactttttcaatattgtttctctcactgcaaatacagcaagaaaaattagttggaatttccttttaaaaaatggtttatttgtacatatttagtatgagatttttacaccacatactgaaatttttaattttttttacttttttactgtgggggagaatttttttaaaaatattgtgtaagttttatattgt

SEQ ID NO: 405823 - DNA, 836 bp, Cannabis indica
ctcttttcaaaataaagagtaaaataaacactttaaataaaatactttaataaaaagggctgaaacaaataagacaaaagagttaatcacataatctcttttaattaatttaatttctttttcctttaaataaaaatcaaagattttaaaataaaataggataataattaacaagggcattttagttaagaactaacccgacaaaaaccaacactattaaatctaacgatcatgccccgaaaaataataaaatgctttaatacccaaagtacgactctctaacggcccaacgtcgctttccacagcttccgaacacaaacacagaaattgaataatttacataagatagcataataaacatatatgatataaaatatatttccaaaatatgcatttcacaaatattaattaaatctcatgcataaaccctaattattcaataatccaaaacattaaacttaggcggtctttacaattatccccccgttaaaaagatttcgtccccgaaatctacctgaacagctctggatgttgagttctcatttccgactccagttcccaagtggcttcttccactttactattcctccagagtactttaaccaaccctatggtcttggttcgaaggaccttttccttccgatctagaatttgtactgattgttcatcatatgatagatcaggttgcaattctaatgtctcataactcagaacgtgcattgggtcaaacacgtacttcctcagcatggaaacatgaaatacattatgcacagctgacaatgatggaggcaaagccaaccgataagcaacttgcccaactttctccagaatttcaa

SEQ ID NO: 405824 - DNA, 622 bp, Cannabis indica
gggacttatgctgctattaccctaataagaatgaaaatatgttgtggttgatcatactaaattcttcactcacctacgagaactaaacatttaaacaaccctaaaaacataactaaaactagcctaacaaacactacaatttgcactgtgtttgtgatataatgcactaggcctctctcaacatcatagctccaattactcattaatattggccaaataaaatataccatatagatgtttttgagtgccttattttaaatgagtaagtttattgaacaaaatatatacatattttgtatctgagtaggttcaaaaatatgaaaaagatcattaggctcaaaaattaagttatccaaagtctttttattttttttaaaaaaatctctttatcaatttctatgtctgaaatcatatgttagaatatttttttttctaacttttgttcagtatttataattataataagacagagttcttgatattccaatttaatagtagtgttaagaaaaaattaaattcattttcggcattgttatatgtaaaaatttacagtgataattttataactataaccattaagccacagagcaactaacacaacaacctaaatctcaactcaatt

SEQ ID NO: 405825 - DNA, 821 bp, Cannabis indica
tagcctaagagttcatatttataatgctttgaaaatatatatgaatcttattagaattaggattctaattatagtggatagataaatccccttagaattcggattccatttataatagtattaggaaatatctactctaaaagaaaagataactcatcttttaaacaaaagataaaaaaattgcaaccgttgttgaaaatttatcttggtttttttttcgctatctttttttcataaatttcctactacgatgattgatagtattttggccataccactcttgatgttactcagaattggacgattcaagatgtaatggaaagctaagaacgagatctaaaattttatgttgagctccaagtcgatttctacctctaagatcgttcgatttcgcaattaaattccaccttgtaaaatcgagctccccagcttccactatttttcaccaaaatatgctaaaatctttccaaaagactccaaatgcatgtatagtctttaaaatagcataaaaaattaaaataacactaatcaataatttaaagaatcaatttaagaatattaatatgcaaattaatcatatttataagataaatatagactcatcaagtgggtatcaactttctgcgtcgattagccttttgctgatgtagtatacagagtgttgtacaccgtcttcttctcttgtgaggatagcactcacagtatgttctgtgagtgttaggtacatgcttagctcttcattgtctaggggttgagacaacaccagtggttgggccaattgtttcattacctccttgaatgtgtatccactcgaattttat

SEQ ID NO: 405826 - DNA, 644 bp, Cannabis indica
gtatatgaaattattaattacacattgatcaagtatattcgatgtgtttggatgaaattaattattcataatattggcaaaatataagcaacaaaaaatgatgtgttttccattgctactatatatatgtacttcaaagctttctcaattaactgctcaattgtgttcttaaactaaaaattcagtacttgcattataatatatatattctctaattattctcagatttctttgtaacttgatgatatttttatcgatgtttatgtttgttcattatgaaatttattgactacaaaatattcatattttgattaatatttgcttcaacaatttgattttgtagattaaaagcagaaaatgttctaattaataattaataagtacatgtcgtgtaattctgatagctcatttgtgtatttgtttatttacctagctgtattttgattaacattttgtgctagtttaataagctttgatgttaaattttttgtgatttattttcttcagttttttacattattattcttctatagttctagagtaatggaagaggtttcaatggttacatttttattgtaacaatcatggttacattttttttaagccattggattattatttaatggttgtgattaatttggaaa

SEQ ID NO: 405827 - DNA, 696 bp, Cannabis indica
agcgggttggagcttcgattcgacggataccctctgattcgaaacattcggatacttattggatctcgaatcagatctgctctgtcccgcctaaattttttatggattggatctaattcgacccaatttcaaattatttttaaaaaaaatttaattcaagactcagaccccagacacgaataccttgggacctggacccggattgggaccttgacttgggacccagacccgggatccagacccgaactcggacccagacttggacttggaccgggtcctgaacctggtccggacaccgatcccagactgggacccaggacctgggaccggacccggacccagagtcaagaccctgactctgacccaaactcggacccagacccaaccttggacccggacccgacccgttgttggtgttagagtagagttaattaaaagtatattatctttacacaatctattaatacatgtcaatactaaacatattattatatttaataatactaatacaaaattaaaatggatataaaattataagttagtatagaaattctttaaaaaaaaagagtcgggttagatcagattcgatccgaataagtcgggtcatattattcagatcgaatctgatccgatccgagtatctgatctagcggggcggagcagatccttacatgatttggatcagttcggatcata

SEQ ID NO: 405828 - DNA, 1030 bp, Cannabis indica
cccattattttattagtaatagggtagaagattagacgatattttcccttaaaaggcatatagagaggatatatttcatatcattgttttattattatttatttatttgtaatagataatattataaggacacgattttgtcccgtgatgtactttcacggaatatatttcgtgatgtacgacagccgttagatggaggagttatttgatctgagggttggaattaatctaaaggtaattaaggttaaaaaatggtaatgtatcctgagacccatctaatgtactttgagacccatttaatgtaccacaggatacattctgtaaaagtacatcacgagataaaatcgtgtccataatattatatcaccatagtttaattttagagctttgataatttcaatactacactaattttagtttacaacataataatttggactttctttaagaagaaatacaacatatatacagtggctttgacttttaggaaagacatttaagtgtaaaactgcaagtttgcacgtcatgattaatttcgtcaagccacttatttattattatttttttattttaagatttttttttttcgtaaagttaggttttattaacttacattgggatgtataatatagtgtataaactttttacaaagtaattaatataatttcattatattttaattagtggacggtgttatattaaatcaatgtaaattatatattataaatggcaacacatgttattttactctaaagttgttgttgttctattattttatgcaatgagaaatactttttagacatttttaatgttaaaaagaaaaaactaattatttaagcttaacttttatatataatacatcattataatttccaaatcaattataattattttattattattatttgttagacattatgatattcttatttctaattcgtttaaaaagaatttattacacatatatatatgtagggatatgattttgtcccgtgatgtactttcacggaatgtattccgtggtacatta

SEQ ID NO: 405829 - DNA, 1175 bp, Cannabis indica
ttttgggtttagcttcatgttttggcggcatccccgacaaagcctaaggaagtataggccctgacaggaagaatggcggcacttaacagatgcatttcaaagtaaactgataaatgtgtgtcgttcttcatcatattgcgaggcaacaaaaagttcgagtggacaaaagagtgcgaagaagcctttcagatcataaaaggcctctcgcgacgcctttagtttcggcgaaaccaataactggagagacattatttctttatttagccatcttggaagatgcaattagtgcaactatagtacgagaagagggcatgcaccagcaacctatttactacgtaaagaaaaaggtactaggggcagaatcccggtatccccctctaaaaaaactcgcattatgcctagtccatgcgtctcgcaaactacgaccatacttccaggctcacccgtttaaagtgttaacctattaggccttgagacaagttttatcaaaaccagatgcttctggaatattgataaaatggtcgattgaactggggcagttcgacataacataccatccttgaacatccatcaagggccaagctttagctgacttcttgatagaaggcataactctagtagaaatcccacctgattagcgagacgaggaaacctggaagttatatgtggatggggcatccaacaaataggtttcgggtgcaggggtgatattaatatcgccggaaggctttaagtttcactatgcattgagattccaatttgacgcatcaaataacgaggtcgaatatgaagccttgatacagtgcttcgctacacaatgatcgaaggcaaactatatagaagagggtatccaatgcccctacttcggtgtgttcctcccgcagaagcaaacaaaatcattagagaaattcataaaggcttctgtggggatcatgcaaaaaaagatcattaggcaaggatattactagccaacgatcaataaggacacacttgagtttgttaagaaatgtgataagtgtcaaaggttttcacatatacctcgcgtactgccaatagaacttagaatgataacctcaccctacccatttgctatatgggggatcaacctaattggggcattacccagtgggcgaggaggagctaagtatgcggtggtagcagttgacttcttcact

SEQ ID NO: 405830 - DNA, 773 bp, Cannabis indica
attggtgtcagtccaagctagaaggaaagctcgcctcaagtttcagaacaaatttttgaatttagacaatattttgtttattctaaattttagtagaaaattgatttttgtttcatgtttacaattgcaacattttcaattcaattttttgagttctaattcaactatttctcgtaatggtgatcaattatgtgtatactgaacaagggctttatgttttaagacctgatataccgattgcgcttatgaacgaactttttaatattgctaaactaagaaactataaaagacaaaagattaatgatgaaggcgaaacatatctatggcacttacgtcttggtcatataggctatgataagctttataggttaaccaaaggtgatccattgaaaaaattcaccttaagtgaattactagtttgtaaatcttgcctagaaggaaaactgactaaatgttcaatctctacaaaaggagagtgttccaatgaaacctaaggttagtacattcatgtgtctgcggaccattaaatgtcaaagctaaaagaagttataagtattttgtcactttcattgacaataactctagatatagttttctttacctaatgcaaaagaaatctaaagtattttagaagtttcaaaaattttatgctttggctcaaaaccaattaggtaaaacattaaagatcttgcaaactaataggagtgaagaatatatgggtatgtagttcaaagatcatttaattgaacttggaattgaatcgaagtatactg

SEQ ID NO: 405831 - DNA, 605 bp, Cannabis indica
actcgtatttatttcctcatattatagaatagaatagaatagccgagcaagcaagcattattaaaagcatgctactttttttttacttcttttcagtcgttttagactgaagactatatttaatacttattgtactcccaaattattgtactcccatatgtttccatcttattttttataagactaattagaatttttatcccctaaactttaacatatatcaaatcataaatgcctcatgaaccattgaaattgttaaatttaaagatttttatctaattttagtaaaaatatctaacatggttagattcagcttggttgtattatttatgttcttagaggtgttcgtgaatgctaaccaatgattctggcagatatttacatcttgagaacatagtagtgaaatgatgatttccttcgagcttggctaaatagagatatatgattgagatctcacttcagtaattatattagtttactgaaatatcatttataggtagctaagtattttaaggataaaatacattgaaaggtataacggtaaatttgtctcttttcgatgtagatcatcgaggatctttgactattaggattgtaacaatgga

SEQ ID NO: 405832 - DNA, 968 bp, Cannabis indica
atacatggtcatcttcttgaaccgacagaaactttggattgctatggaggcaaatcttgagttgtggaagctattcgtcttcgattcgagtcttgaatctctaacgaaagacgaactgaagacgctgatggatgcgtggtgccttttactatccaaattggtggaccagtgtggtgtatgtgacacccattacatggtgatggtccctcaaatgacagcctccgaaagtcaggtcagaaaattcgactggaaatgatggacaataaagttgtacctcagacaaaatcgaggtaatttaaatgcatttttgataatatgtttactaattaacataaaatttttattattattctctatggtttattaaattttgcgtttacctactattgcagtggcgattgcggaatgtacgtcatagagcatattgagcataagttattggatcgaccattcgatggagtacatgatgaccatatgtcgctctttcgccagagatgggcagtagatttattctaccagaacttgacatgaactttggatgtttaatttattatatttgttgaacaatgtttacttttagacttttcaatttgaacaaactacttttcagtaaaattattttattttatcagtagaacttgtttttgcctcagatgtttaacaaagttcaaaaataattttctaagaaatacataacagtacaacacagatgttcatgccacaaattaaaaatattttacaccacaaatataaataacaatacataatagtccaagacatcacaatacgaataaactaaaattcatttttcaccccggtaggtgcaagttcttctgttgtgccccttggcaatgcacttgctacaatttcatgatttgataatcctttcaccattacaagcagttcggttgttcttaattcttccaaccttttgcttcttgggtcgctctactggttgcttctcaaca

SEQ ID NO: 405833 - DNA, 572 bp, Cannabis indica
ataattacagaaaagaaagacactaaccttcaattaattatttttgagatttctctcagatgatgaagccttcaaaatcgtcttcaatcagcaggaatttgaaactttagagagattctcaaagttaaaaattttgggtaaagaagagaacaaaggaataccaaaaatctatttagcaaaaaaaataaatattaactaaataaaattataagtataatactatgtctatatattagatatatgtaatatatacatttatatatacacatatatatacatatatatacacacaaatatatatttttacatatacatatatatatatacacatatatttacatatacacatatgtatacacacttatgtacttttacatacaattacatatacacatatatacttttacatatatatatacacatatatatatatacatttacatatatatatacaaatacacatatataaactattatatatatttatatacacatatacacacaaatttataaaaatacacataaaactatataaaattacacacatctataaactaaaaaactaaacacaa

SEQ ID NO: 405834 - DNA, 991 bp, Cannabis indica
aaaatcatatgagatagctaaaattacactcttaaccaaatgggataactttcatttccaaacacaaaaaaattaaaaaaaaaaagttacactaaaatggaatcaacttcatttatttcaaatgtctatctcggattcatattcatattcatatactaaagctatgatttttacaatgaacaatgtttagatgatccaaattcaagcttatgagcaaataaaatacctcattgatagcaagaacctgtccattgctcttcttaactttcttcaacttcctcaaaaaatacctaatcaaaaattaaaaacaaatcactaacccaaatcaaataactccaaaaaccctaaagatcataatcaaaaaaaaaaacattggcttaccaaaacttggacttggcacggacttcattggtggcccaaagcttcatcctgtaaatcttaggatggtcatctgactcagtagggagagcccttcccacaacctggtactgatgaaactgaaccacaaaaaccgaaacacagagagaaaattaacattttttttcttcgagaaacaaacagaaaagagttggagatctgggtaacgattttgttcagctacttaccctgaaacgtcaccatttctgagaaatcgaagaacagctgaagatttagcgaaggtctctactctcctccctctctctctctctttctctctctgttagaagaagatttgattagggttttctttcgcttttatacgagctctgagtctgagaccaggaaaaaccctagttgggaaatgacttatttcgcctaatccaatcgtataattacacgtgtacgtttatgacagcgtggaaattctttagattgggctgaatgccccaattccatctccaccggcccaataagatattttgggctttcaaattaaaaaaaaaaaaggaaattacacactataccctttttatattatcctctttcatttttaccctcttttttaaagtct

SEQ ID NO: 405835 - DNA, 532 bp, Cannabis indica
agcatagacacaccttttactcttcgggaggctggaactgtaacaaggcatctccgggaagggaagagactgttgaacagttcactttcctattttttacggtgatttacgcaataatttgacgagtctagtgatgcctacattatgaggaatgacatcaatcaagggaggataaaagattatatcccctaacccctaagatacctacggtataggtcttgtatttcctattttgtatctgttaggaatttgtgcccctaagaggctaacacagaaagacaagtgatccctttctagggatctccctgaaaaacactataaataccccatagacataatggaaaaaggggtcgatcgattaattaagaaatcgaagagagtaaaggagagagagagattcaccaagaacattctctgtaaaaacactctcataaataacaaagactcgtggactaaggctcattaatgccccaaccacgtaaaaatcatttgcattaaactttctacaactcttctcattctactatttaat

SEQ ID NO: 405836 - DNA, 757 bp, Cannabis indica
aaataaaataaaaaaataaatattaaaatataaaataaaataaaaaaaaaaaaaaaaaacaaatcctggaaggctgatatgatttgtcttattagtatgtgtagctgggcaatctggaaggctagaaacaaggttgtttggaaaaagaaacaatcctctgttaatgacgtgtttatttctgcacaagtagctcttgagcactggaataaagttcaggataaaatttcgttgtcatcaatctgtctggaaaacatcggtgatggcgctgagtcatagactaaacccgcagaaaacactatcaagattaatgttgatgcagcactctttgatagcgacgataagtatggcttcgaaattgttgcccgaaaccatcttggtcaccttgttgcagcacgggccggttgccatggtggaagatatgcagttgaagtcgtcgaagccatggggattaaagaagacctcagttgggtaaagaccaataattggcaacatgttcagatcgagacggacagtcttgtttcagtacaagctattcgaagcaaccaagcaatgaagtccactttcggccttttaataaaagactgtcaacttttgttatctaccctcccaaatattaatttattttttattagacgatcatatattgctagacattctcggtatcaatctgatcgtagtatttctgatatttttatttctggtaaactcttgcctcttttgtattcaaaatactaatttattcaatgaagttgatatt

SEQ ID NO: 405837 - DNA, 799 bp, Cannabis indica
ttcgatggtagatggattaatttaattatacattgtgtgggcattatctcgtacacgatctctcatgggaaaaggagttgggccctaattttgcacaaagggggttgcgccagggtgatcctttatcaccatatttttttattctctatgctgaggatttctctagtttattgcgtagttatgagcagagtggattaattacagggtgtaaagttgctagaagagctcctgttattttgcatatgttgtttgctgacgatagttacatctattgtaaagcaacataaaaggaagctcataatgttaaagagctactgtatacgtatgagatggcttctggcctaaagatcaatttttcaaagtcgtcagtgttctatagtcagaatactagtacctctcaaaggaatatcatttgtgagctgttagatatttatgaggctgatgagaatgggtcgtatttgggacttccatattcgatgggatagaataaaaatgttattcttggttttcttaaagacaaaataaaaaagaaaattcaaggatgagaaggaaggatattgtctcgtgcgaggaaagaggtgttgctgaaattcgttgcgcaatcaattcctagctatgcaatgagtgtttttctattaccttggatacttgcaaggagttggagcgtctcatggctaagttctggtggcaaacgaactccgttcatagaacgggtgttagttggatgagttgggatcgattgagtagtcacaaacatgtttgaggtttgggtttttgaagtctgcgggactttaatatg

SEQ ID NO: 405838 - DNA, 522 bp, Cannabis indica
ccctctgttggttcggctccgtctccgccagcaacgtggtcgaccttggcaccaccagcggttcttctccctccgccactcgcactaacagcgtcttcgtcttctcttcctcgtccgacaccacctcccacatagccttcttctccggcgatggcaccagggacgcgatctccgtcgacgcaaccacttgaacctttgtcttgtagttcttctcggatgtcgttcgttgccgaggtgcgagcgaattccatggaacaacttccagatccgacgccgttcccaacaagtccttctgctcaaacgactccaccagcagccgcacctcttccttcctcctttcaggcggcaaatctcgctgctgatttttctctagccatttatcttcttctccatcggagatgatcttcgcaacatcgaaaatctcaggtgatgccacagaaggcagagagtcttcatttaggaactccgattgtatagatgcctgttgtttgtgttgctgaaactgtcgagtctagcaaaggc

SEQ ID NO: 405839 - DNA, 529 bp, Cannabis indica
cacaccccatttaaaaagaaaacctcacttgaatcacctctgccgttaactaaatcagggttaaaagccaccattgttacaacctcttactacgcacaaaacttttctaaaacaatcgagaaaagcagagcctttttaggcacacaagtcgaagtccttacaatcaaaatcccttgtagcgatgttggattacctgaagggatcgagtgttcacatggtctcttcacccgaaaatagactcaaattcttcccttgggccccaaacgttgctgtcgaatctgggatcccaactcttatattccattccacaggctattctttgaagagacaaggataagcaagagttgatttccatggagaaaaaggatagacgtaactttgaggaaacatctgctttggcgagcaaagtgggactctataggtaataatatgtttgttatcttttgaatttcatgtttttgtacaagagtagggattgaaaatctgattgatggttacacttggcagccatctatatgcaagagttctt

SEQ ID NO: 405840 - DNA, 634 bp, Cannabis indica
gctctcttctcccactctctctgtctaacttacccccccccccctctctctccgttattcccatccagccccaaactttcaagccccgactgttcacgaactccgatcgaccaagacgacccacgaccgagaagacccatgacgacttgcgacgacccatgacgacccaagagaagcacccaagacaatccacgactaccgcatttttttttttctggtttctgacccatctagcgctattttctgcattttttttatggtttttgacgatatcgcgaaacatcactagatgtcgcgaaacatcgcgaaatcttgaaacatctctaaatgtctctaattcacaacaatacttgttttctgcattttttttcttctgatttttgatgatgtcgcgaaacatcgctagatgtcgcgaaacatcgcgaaatcatgaaaacatatctaaatgtctctaaattcacaacatcgcgaaacacatcgtaaaatatcgctaaacatcataaaatatcgctaaatatcgcaaatcatcactaaatttcatccctgacctcatattgttctatcattgcaaatacatcgttaaatatcgcaaaaaaactggtaaaccataagaaaaaaaatgcaaaaaaacgag

SEQ ID NO: 405841 - DNA, 599 bp, Cannabis indica
aataaacaaaatctgataatttgatcataataatattaacaattataaatatttatttattaataaataataataatattaaaattctaattattattattatctattatatgattgtgtgtaagtactattgttgaaaaagaatttaaaagtaattaaaactataaatatacacatgtattttagtaattaactcatcaattttaataaaaatataaaggacggatatgagcctatataagaaaatagattggtctatttaaagcatgaaatgaattcgagcacaatatgcttgcagggcatgtcgagcctatacaccacaaaaagaccatctttagtgacaactttttagttacaacaaaaaatatttgttactaaatgtgacttttaatcacaacaaaaaagttacttgtgactaaacatagtatttcgttacaagttgtcactaatttagttttagtcacaacaagtaacttaaaacacatttagtcactacaaattgtgatttttgtgactaatacttttagccacatgatttttagtcacaacgtaatttataattagtcataattttttcttttaatcacaagttttgttgt

SEQ ID NO: 405842 - DNA, 624 bp, Cannabis indica
attttattctattttaaaaaatagatagtcctatttatcattaacaaaatgtaacaacttttacaaaaatattaaagtggtatttactcaaaaactttcctagtaaacaaatttgaagctaatggtcagacaaaagaaaaaaattgatgctaatagtcaaagatgattataagctctggaaatgaaatgtttgactatgacaagtatttgaagatggcacaatgaagaccatcatttcaacaggttgcatgcgtatttgaaggtgcacatggtgagtaaatcattgacaaactaatttacatagccaaataagaactaaataagtttgtgtaaagttagtttgggagtaagttttagtgcctctatgaagaaaaaaaactgtttggctatggttcttgacatttactgcaaaataaggttcgataaataatagaaaataaataaaacccgcattctcaggaaatatgataatttaaaaaatatatcacaatcggtgtatttttttgtttattatcattttaaaatcatttggatagaattattagagtggtggctacatcatagttatacacaaagtaaaatactatctatgaaaatggtatcaaatatgctcttttcaagaac

SEQ ID NO: 405843 - DNA, 610 bp, Cannabis indica
agggttggttctttgttccctgcatacttggttagtacgacgtctagaatttggtacctgagggttgtccgtgcgagtagtagggactcgaggggggcgtcgggcccggtcctgaatcgcactatattgatcagtggtgagctggatgattccctcggataccactgctggagtgacggggggaaaatgcatggttgctggtggtgtggacgtatccccgacttgagggtcagttgtttctgggaacaggttgagaggtctgatgttgctcctccctactccgccattaacgacgtccacaggcggcattccaactccggataatggtacgttcatcatcccaatgttgatggacccgttgttagctcttccgtttgtttgatttccagccatgatggtatttttcttgaaatgaataagatcttagttctcgatttcccacgacggcgccaaatgttgtcgagtgaatttcacaacaccagattgtatgatattattaataataagaagaaatttacatgaagaacaagtgcgagtattcaacctagaatggcgagtactcaactgggaatgagaaataatcaacaaaaaactggaaaataacaagaag

SEQ ID NO: 405844 - DNA, 833 bp, Cannabis indica
tttttgattaagttagacacagtacacaacaacagccaacacaattacataaatcgttggaacaatccccttaggcaccttagcaaatattgataaccattcttcgaagctctcaggccaattacatctactaaaccaatttcgcacctctagtaataacttcctcgtgaatgtacaatcaaaaaagagttgagaatgagtttctaaatcaaaatcataagtcggacagaggtaagaatctaaacttagaaacttaacaagcttatcacgagttaaaagaaagcttttatagcttgccaaacaataaaacgatgcgtaggaacagagtctatgtcaaactaatctgaaatttcctactttagtattaccaatttattaattaattaatcaattaattaaacgcagaataatgaatatgatattgaaataattattctatagctacaaaacatgactctataactccagaatagaaaaatcaacaaagaataaaagtgcataaaaaaaaaaacacaaggtttttacatttgctatcaccaatccttacatattgttactagtccacagggccatgtccagagataagattcattagatagatctcaaaaatacaaagtaattaacttatgcatgttattatatgtcgcaagctagatgtatttcaccttctcaaatgaatcttgctgaaacttcaagtgttcgaacttccttttatctacttaaagagtgtttgcttcctcttgaggcaacacttgaaaaacattccctggaaagcttgaactgttgggctttgtccctaaataaaactcaatttcaatgtaatattttctatt

SEQ ID NO: 405845 - DNA, 851 bp, Cannabis indica
catggagagtttaggcatgttttgcattaaatagggtttttatattgagaattttatgcatgagttgtgtattttggccctgtattatgtgttagcaactctacatgttaatttacaagtttgcttgagattttgtggatgaaagggttggattttcatgctaaaaatcgtgttaaagttgctggtttactgggttttcaacccaggtgccgcggcatgctctgaagcatgccacggcccgcccctgtttgtggaacctgggttttgtcccaggtgtcgcggcatgatttgggcatgccacggcccgccctcgtgattttgggcagttttgtgtcgaactttgaaaattcataacttttgattccgaactccgatttaggagttctttatatcgttggaaagctcgttccgagctttgtatgattatctgaattttaaatgccatgattgaattttatgagtatggaatcaggggttaaccctaagtttgaaaaatctcagatttgtgtgactatgattactggcacctgatcaggagcacccggggattcggaatctctatctattgctggacaacaggtaagacagtggttagcacgtagaatatgcgcagtggcgcttatattgagaatgatatgtatgtatgtttagtaaccgggattagggttattaccctaatagtaacgatctaatagcctagggttattaccctagtgatatatgtgcataaatgtcatgccatgttaattgaaatgagatttagggattatgcgctcaatgcataatcaggttggactcggtaaccataaccgagatgaaccaattctaaggccttaatgtatttagacgtg

SEQ ID NO: 405846 - DNA, 520 bp, Cannabis indica
gttgacgagtactacatggtggaaagcatgggcactacctacactcggttccagcagatccctacatatcactgccctcccttcacacttgccctttgggatagagcttagaagcttgccctgttgccgggtgctgcctgggatatcactctgttcacctccgaggacaactttttggaatacaggctttacccaaaggatttcattcctaagccagtgaaggagaaaaagaggaaatctggtgatggccgggttgagggagctcataagaagaatgaactcattcaacttaagcgtgaagctaagttgaagggaggtgcaagggccaaacagtatgctcatgagtctttgaatcctgaagatgaggctaaggaagatcaagtgactccgctcaaaaggaggaagaaacttctggcccagcccaggctcgtttaacatgccattcgaatcagggagcccaatttgttggaaatattttaccaggatctagatttactaccaagtatgtttcattaacatc

SEQ ID NO: 405847 - DNA, 482 bp, Cannabis indica
aacttgaaggacgagatcgaaaagtgaatctgattgggtcatttatattaatggattaagaaccggctaccccatctcaacccgattccagtaggaggcccgttacctcaagggaaaccaaagggtatacctagagcaccagcacccgttgtacatcctggaggagcaatccctcaacaggtccttgggctaccaccaagacctaatgggagagtggccatgatctccggtggccccatattaggggaaccaccaaaaaagagttaaagcgctacgttggagccataaaacacaatgaagtgtgggaagtcactaagcttttagcacaaagactccgactcatggaccagccaattactttcacggaagaggacgcaaaactggtgcgtttccctcaccatgaccctctggtcatcgagactcccatcgccgataaaacttgtgggaagaatattggtcgataatgggagttccatgattta

SEQ ID NO: 405848 - DNA, 703 bp, Cannabis indica
cctcatttatttactaccatcaaatcaattatctccctgaagtatacgtttcttctaatagaagaggcgacgaggaggagaaatggtgatgatgaagccttggggattgcgatggcctgcaaagctactcaagaggctactgccagggatcaaccaagagttttcttgtaaaggtctggttttttccatatataaatcgcgttttcgtttaaatttctttattgtttctgtttgtttttcttctctgtctgggtcaaaaaatttctccatgctgaacatgaattccttaagttctacgcttgttcccctttgatgctaactcctgacgagaacaaggtctataccatgactgaaattcaggatgactcctcccccccccccctgatataagtcttcttctcaaactctgcactgttaaacactttaatcgagcttccctgattaaaactttagccccaatctggacttcccaatgtcatttccctgttactatttctgaacactctgatggtcttttccttgtcacttttctttgtgaaggggataagcgtcggattcttgatgggcagccttggcattttgcccaaagtctcaccatctttgcagccccggatacttcctttcctattacccctgaccagctgcattatgtgcccttctgggtgcaggtgtatgggatcccctttagatgtaaatcctatga

SEQ ID NO: 405849 - DNA, 777 bp, Cannabis indica
acagactcgaagaggcatggttgattcggcgaatccacaggtggtggatcctacactgcagaaccaagggaacacaagggttccaccacccataaatccctaacaaccatcaactgtaggtcacggtctgacgactcatgtgagtggaatcgcgcctggtgtgcaagagactgggaatacaagttcaacagctaatcagggcattcccaacactgtcgtttcgcctgtaaccaatgttcgaacaactattggagatgacaccgaaatcaaaaacctcagtgctgctcttggagttatgcaaggtcataccaacaccctgcatcatgatgaggaagaactccgtgctgaggtaaatcttgcatttaaagaacagaggcgcatgttcggtgagtggagggacaaagagatggaaacgttgagggctccgtaggcatccattgcctaccagaccaaacaagccaccgtgttaatacgaaaagcctatcaggctaccggacaacaacccgtaaccgtcatccccctaggcgagacagacgaagatccagcgatgaacacctctcagactataaatggttagccgtccaatccccggtcacaggctccacctgtgggccaagtggtaggcggacaaaccttgtctagcaattcatcaggagaagtcatacctaataattccaacctaagtttaatggtaccgaccagctaattggccaaaccaaccaatcactgagacagccaggtgtttctatatttaatcgattgggaacggttcatgat

SEQ ID NO: 405850 - DNA, 676 bp, Cannabis indica
ttcaaagacactaataatttgtgtcagtcttgtgaaaggtgccaagaattaggtacactgtcccggcgacacatgatgccatcgaacccaatgctcataatagaaattttcgactgttgggtaattgattttatgggaccatttccaccttcttttggctacttttacattctccttgtcatagactatgtctccaagtgggttgaggtcgtgccctgccgaaatgtagataacacaactattgtgaaattcttaaaagaaaatgtgttgtctcgttttggcacaccacaagctattatcagtgatcacggcatacatttttgcaaccactcttttaagcatttgatgcaaaagtacggtgtacttaaaaaggttgcattgccttatcacccacaaataaatggccaagttgagttagctaatcgcgaaattaagcaaatcgtagaaaagactgttaaccctaaccacaaagattggtcttccagacttctaaatgctctctgggcataccgcactgcttataaaactcaactaagcatgtctccttatagaatagtctatggcaaggcctcccatttgcatgttgaactggaacataaagcatactgggttgtaaaaagcttaaattttgatctcaatgtggcaggccttattgtaagcttcaattgtcaaaaat

SEQ ID NO: 405851 - DNA, 764 bp, Cannabis indica
agtgtgggctgaccatagcctctgtaggctagtcggccacatagtcaaagccctggccgaccacctcctcagtaggtgggccagccatttcctcatcaaatggccccgaggatgatccttctggctggacggtggtctggtctgcttccaacctgctctcaaataatgctctcccttgggccaatgtgttatccaggaaagaagcatctcccatgtatgaaagatcagcgttggggttgtgcagcttgaactcatagatgagttccgaagataagtcgatgtactcttccctaattgtttgtttgccatcgagggctgccttcagcttctcctcacacctcgtgaggtcagtctctaacctagagatgtcagcatcttacaaggttttctcctgatttctagtgccgagcataacctccaaacttgaatttatgtttcgattctataagccaagagcctccatatcagctaaagccttgcccttcacaaggagatcagcctctaaggtccttatctactcctgaagagcactcaaagaccttctggagttgccatgcaaaaggctcagcttcataaaggcttaaaaataaaataaagtcaagattagtgctagaaacaacactagccatcccctgtacggtgcacccaaggccggccagcctatttaagacattactccagtcggccagctttctacagcagcacctatggctggccaacttgcaataacacagaaaaaagtgagcaaagctaaatgtgtaact

SEQ ID NO: 405852 - DNA, 553 bp, Cannabis indica
  modified_base (4)..(4): a, c, t, g, unknown or other
  modified_base (9)..(9): a, c, t, g, unknown or other
  modified_base (39)..(39): a, c, t, g, unknown or other
ggtncgtanacaacactataatcaattacaaattcatangttcttgaacttaaatagaaattttatacatacataatgtataatcatgaaaattaaatcatgtgaaccatgcaacataaaatgttatttctgatctttattagtaaatctgattatgggttttatttagggcacaaaacccaacaaaaatgtcatcacacgctcctccaccgccccgactcgtgggaaagtgtgcaaaaccttccttcaggtggcgtgtgagtcccacgcgcgaggattttggtgaccgaacttcagggtttggtatatcggcggctgggcaaccctcctgagtggacggtgagaatagattcgcactccaaatagggttttcaagaaagaaccctaaactcaaaccataacttttagttatgaaccctagtttcgaattttcaaatttcaaattttgaatcacaattctaagtatggctctgataccatgtaaaaaattgttgcaaaaattattaattactacgcacgtgcacgcaatcaagtagtatactcacgcaagtga

SEQ ID NO: 405853 - DNA, 570 bp, Cannabis indica
ttttttttttaatatttggatatttagtttaaaaatgtaaatttcacatgtattttgtaacaaaaatattaaaataaataatttttataaaaaataaattcaaattttatttttacaaaaattaattttatatattgattttcataaatatatattaaataataatcattcaattattttaaatcttaattaacaattgaattattattattattactttaatataaaaatagtatataaaataattctcttttttttaaatataatcataaatcttaattaatgataatgataataattatcatgattattttagtaattaattaattaatattattattataaatgaaaacaaaatgaaattatagtcttgttacttttttatttttaacaaaaaaaaacacaacctaattaaacttttaaaaacataatcatgaatcttaattaataataattattattatgttttagcaattaattaattaattaattattatcaccaacttacaaaacagcctaaatcgtgattaaaatttatataacaaccgacctaaaaattaaaaaaaaaaa

SEQ ID NO: 405854 - DNA, 593 bp, Cannabis indica
cgaacaaatgatcaaaataccacatgagcttaaattcctacacgagttttagatttgtaaaagaaaaggaaagtgtgggtaatttagctttcaagttctctctactctttttagatgaatttactgtgtttaacagaatgagtagtaagttcgggaaccgagaccttatatgtatataggtgaaacatttcatcaaggtctctgccacagttaactattagaatattttgacaattaattcaaaaaattaaatttggaaatcaaatatttggtaaatcgtaatctaaccatatatagaatatcatttattgtgactaaattcattgaatataaaatattcatttatcttaaattaattcattgattttattcttaaaatataaatattttaatattctctcacttggtcaacatttagatttatctttgaaacccaacattcatcattacataataaacatatgaaccataacgataagtactcattatatgtcgagtattatcttttatgtattacactatattaattatataacaatttactttatgtggcaatgtacttatgtgaataaaccctaaatcttatgtttatt

SEQ ID NO: 405855 - DNA, 630 bp, Cannabis indica
gatgggacacctggtgaagatcgagtcttgatagagatctgggcaacaccgccattctcggcacggtgaagaccgaatgaagattatcgattcgggggtagtttttgagttgattgaactcgagttgacgaaaccagaaaggcacacaactgagatgatcatcaacgttttggcccccttgtgctcttgcgccgatgggagagcgaagctcctctagcacgcctgcgacacaaaaatggtgtcgaaaaagattcttagggttttggaggcaacaaccgagcgattcacattctttgtttggattttttttaatttgctacaatttagatacacagagaaaatggaagaagaaaaagagattaaaagagggaggttggattgtggtgtaatagagttgatctgatgatgatcgtgagaaggaagaacaagatgatgaatagggaaaagagaaaaaaaaatataggaaagatgtaaacgtaggaatttaggttttgagttaaacattatctttaatgatttgattttaataattaataaaattatataatatgggtttactctttttttttaataattttgtaattttttttaattttcaaaatttttttatttaatttttaaatttttaaa

SEQ ID NO: 405856 - DNA, 1440 bp, Cannabis indica
ttttaagatctatcctagagatttcacgtagcaaagagtgccactctaggacatcctacgcgtcttagacttcgaaaggattgaacgtttggaaaaaaatgaggaaatcatatatatatgaagaacttataaatacgcatttgaaaataagattagtgctaatgttaatattataaagtgttcaacctcagattgttgtgagattactccttcgaattgttcaaatgactcatatcttactccccaatccaagtatgggcatggtactatgtcgatgcttggattttttgcatatctgaacattgcattttttgtcaaacacttatatattattccaagcaacaccctgcaatgttagagacgcgatcgacgacaaagccgtcgaccctctgatgcttaagtcagtattaagatcttattgtgaaattcaattgattaaaacttttttacctggcggtcaattaccaaggtctcatgatgtttgtagttggatcctcaaatgtcaaggggcgcggttgacggctttgccgtcgaccctccagttcttaagtcagtaaggtgaaaataatatgatagaaattaaagcttaaatttaaaataatttgaaagtttgtaggctgttgcttatatcacgtccatctgatgcttgcagtttgtaggcttcttgtccgactatccttgagatcttgtaaggtccttcccatgttggacctaattttccagctcctgcttctctcgtattttggaaaactttccttagaacccaatctcccacgttgtactgacgaactctaatattcttgtaaaatgttgcgctactatgttgagacgctgcgacccttatcaatgcttgttctctatgttcatctaatgtctcaagcttgtgagccatattctgctagttttcagcatctattgtgtgttcaaatcttgtggttgggagccctgcctccgcgagaatgagtgcttctgttccataagttaaggagaaaggtgttttcctagtggaagtctttgtcgtcgtcctataagcccataaaaccactgggagtttgtttgcccatcttcctttggccttgtctagtcttttctttaaagatgccaccactgtctcgtttgttgattctgcttgtccatttgattgcggaaatctaggtgttgagaatgagagttgtattccccattcattacaaaagtttttaaagtctaggcttgtgaattgtgagccgttgtgagtcactatttcttttggcacaccgaatctgcatatgacgttcttccaaataaagcttttgacttctcgatccctgacttgtgcgtatgcttctgcttctacccatttggtgatgtagtcggttaccgccaacatgaaaactttttgtcctggatctgtaggcatcttctcgacaatgtccattccccatttcatgaaaggccaag

SEQ ID NO: 405857 - DNA, 520 bp, Cannabis indica
taatttttcaaatttataggtttcattttaaattaataatttaattatttttcgaaattaaatatttttatttaagaatttcgatatttatttaatttatttatttaatttaaattaaataaatcatataactaactatccaatgttgttgcatgtgtgttttatttattatttatattcaaacttcttttataaaacctattattgtttgatctaaattgttatggttaacttgttgacaaatccaatgatctaattttaaccatagttcaattgtcaataggtcaaataaataatttgtaacaggtaaattttgtaatcttctttcatttgtgtataaacctagtaccatgataggatccatccaaatcagtgtatgcctgtgcctatatgtttgctttgggcctagatgcatatagggagccaatttaattttgataattataatggactaggttgctaaaataaaaagttcacctatgatagtttttatttaggtccaattagtattgggattatt

SEQ ID NO: 405858 - DNA, 738 bp, Cannabis indica
taaaaaacgaccttccactactttcctcaacagtacccttatataagagtataatcggtaatgaatttaataaaaagggtacatttcaatgtaatttaaaataagactattttttattaactgataaaaaaaggagtatatttcaacttaccccattattaaatgggatttaacacaattatacaacattatgaacataattacaaacaaatcttaataaaacatattatggcataatgataaaaaaaaaatgattaacataccggatatgaaagattgtaactgacataaaatatttaaatataaaataattattaatactaattaccattatatataataaaaaaaaatagcatgtatctgaaaatgaaaattggtgtatattgaccgagatttttggcaacaattaattttgattgtgtggaacaattaatgtgaattgaagaaaaaaaaaaatttgcgtggttaggacattaatgggttttaatccacgagtcacttttaggtgccatttgattggaggtaataaaatggaatagaatataaaagaaataatttttattccattcctttatttggttgtattttaaagtattggaatgtcattccaatggaattttctttccatcattttggtagaatgactattctattttgaaatggaaggaaagaccattccattgtaacatcagaaaaaatttaatgattttttatcaatttttatgcatttaaatttta

SEQ ID NO: 405859 - DNA, 429 bp, Cannabis indica
ggaaccgcttggtgaaagatcttagttcgttaggcctattgcagtgaaggcctctttgaataataaattcacagaactcccgttgtcgatcaggactctggccacaatcttattggcaatgggagtctctatgaccaaggggtcatgatgagaaaatcgcactgtcttagcttcctcttctgtgaatgtaatgggctggtccattagcccgggcctttgagctgggagttgagtaacctcccaaacctcatcgtgcttcatggcccctgcgtatcgtttgagctctttaggggtagttcccccgatgtgaggtcctcccgagatcatggccactctccggttgggtcttggtggtaggccaggaatatgctgggcatctcccggggggagcaacttagccaatgctcctgctacacccccggtgctcct

SEQ ID NO: 405860 - DNA, 441 bp, Cannabis indica
gagaaatctgtaaaaatgtccatgtaagaaactgtttaattaagcatatatctattctaaatatcccgcgtttcgcggcggatatataaaataatttaaattatatataaaaaataaattatgtattttaattaataataattacttagtaaaattatattaaaattttaactttactattaaaaaatttatgacataaatacttaaaatattaaatttgttgctaataaatactgaaattcaaaaaatagtagcataaatcttcatttatggtttaatttttattctgatgtgtgtattatgttttgggttcgaattttattgcgtgtgtttttaatgtttgagttttagtgttttactggggttctaatatttgagtttgtgtttatgagatctgttttttatattaatttttatagattttgagaacttgaaatttga

SEQ ID NO: 405861 - DNA, 1197 bp, Cannabis indica
caactgacggactagcatctgcgtcagccagagtcatggtaaaaagtcatcctaggttctaagtagtactcttcttaggctcctctttgttggcttgtcgacaatctctgattaagtggcccaccatgccacactggaaacaagtcttggcccgatattcaccctgatggtatttcttgcatttcggacactcaggataagatcagaatgaagattcgcgaccctgacggccaccgccatttcctcgaaactttcggttaccccctgatgttccggaagcatcaacctttcatttgtgatcagggttaccaccgtcggtccccttactgacattaccactagcaggaggatttgatgccatggcgacatcctttgcagtctgctcttttgttacatgctgctcagcctcttcagcaattaaggctatctctaccactttcttgtacaaagtgtcatgtgcagtggtaattttaaagtcccgactgattgtggcattcagtcctctcacatatttctgtttcctggtgaaatttgtgggcaccagatcaccagtaaacttggacagccgatcaaactctagagtgtactcagccatagacattttcccctgagttagcttcacaaaatcttccatatgtgaagtcctcacagcaatattataaaatttttcttcaaacagattctgaaattcatcccaagtcattacattgatgtcacgagtctgtctcacaatatcccaccagacaagggcatgatcttgtaacatgaaagctgcacaattcattctctctgttcccgtcactaccatattatccaggatacggtaattgtactcatccactgctaagctttaattatgtcagtacctcccataaaaatcgcaggttgcagcttcataaactgttcaaacacagaatctctatgcggcatcataaacccctggttacccaccactggcacaagcgttggtggtaacacttgctcaacaggggcagccaatgccggcttccttaatcgacgcaactcttcctcttgacgaagtatgatacctcgcatttcatggaacatctgctgccagtaagtaggaggattagcattgccaacccccgcattatccctcagattctgcggaggtgcaggcggtgccggtggattggtttggtctacacaatgctctacttgctcgccctgtggtct

SEQ ID NO: 405862 - DNA, 509 bp, Cannabis indica
gatgatttttttaatttaaaaagagattattaatatttaaaagattgtttatttaaaagattgtttaattttttgggtttaattattgggtttattttttaacgggagatcaaacctaatcgttaaatttaacagaatattcttttatttttaagtatattctgttaaaccaagaatgttaaaccaagaaataccgttagataggcacttttaatatataaagatataatttaacttttttttttttaatgaaaatttttctccacttaaataaatataattttttatgattatttaataataaataattcttttataaaaatatcaaaatttaataatatagtttcttatacacaaccagacaagataatcttgcattcctatactttaatatttcaattttcagttttcaagaaatgataaacctattcccatcaagtaaaccttgtaccaacgatcctaagtatatatattagagtaataaatgaaaagaaattgttttttttttt

SEQ ID NO: 405863 - DNA, 916 bp, Cannabis indica
gcacgttaacccaagataatttaacgaaaccctaatacccctaaatccaggactactaataaaataagcgacggaaatacaaaacttttaatacgaaaggaatgaaaataaacttgtaataatcttagctttacaaaccaacaaaagttacatgtctcgggatcccaaaaatatcttacaaaatattattacaagtcttttttcactagacgacctaagcggcaaaacagagttacagaaatcatcactgatagaccccaacccacttggtctagtgtggcccaaacatgtacatacatcgtccagctcccgcactcatggctgattagagacatatttacccttttctttacagtagagcacccgtgagccaagcccaacaagacagtataaaatatcgataatcataattatcacattatataaacatttatgccattcacaattgcctgtatgacacagacttgcatgttacactcacatgcctatttatgtctatgtgacataccttagaacggttcatctcggttctagttaccgagtccaacccggttatgccttgaatgcataatccttaatctcaacatacatatacatcatggcataataattatgcatttacaattcactagggtaataattgtagaccaataaatctctcactttagggtaataaccctaagccaaaaaaaccgctcattttagggtaataaccctaatcccgatttttaattgctatcatatatcacatccaacataagtgccactgcgcataactctacgtgctaactactgtcttacctgatgtcctacaagtgaggagattccaagtccccccaggttctcctgaccaagtgccagtaatcctagtcataaattctgagatttaaaagtatagggttaatccctaaatcca

SEQ ID NO: 405864 - DNA, 621 bp, Cannabis indica
ataaactccacaacaatcactttgattcctaagatttcttgtcctgattctgtaaataatttcaaacctatttcttgttgtaatataatatacaaagttgcaacaaaattggtttttgcacgactagggaagatatatatttccaatctaataatccaaaatcaaggtggatcattaaggaagattcattacctataatataatagtatgtcattatttagtgaagcattatgagatgaagaatgctaaggctaactatatgctcaaacttgacttacaaaaggcctatgagagatttcttagagaaaatgatgcttgctcttcagttctaaaaaatgatttgtattcgtatcgcaaaatttagttttctttttaatgagtccttgcatgaatttttgggcaaagtatgagaagtgaagaactttagagaaggaaggagaaaatgcagagaaaaatgcagagtgaatcctctgttctctgttttgtattattgcaattaaggaatgaatgatacaacaagttatttatagttagggttagtcttgaataagaagactaaatatcaagaagcctagtggacaagttgtaacaacctacaacttgtcttaacagaattataac

SEQ ID NO: 405865 - DNA, 716 bp, Cannabis indica
gttcaaggggcatgatttagtaatgtgaaagttcgagggtcatgatttggtagatatcaaagtctgggaagcatggttaagtacataaacaatcactgaaatagtaaaattgaatgaaattagataaaagtccttaaatccaacaatcccaatgattcaggggcatttttaacgatcttaaaagttcatggggcatgatttggtacatgtcaaagttcagagagcaaaaatcctaatttgttattttatcatcaattttctcacttttggagagattgaaaataaagaatttggagggagaccaaatcaatctatcctttctttctaattttctgtcatgccaaacaagtaaaattgactctcatttcactcctctccctcttaccatttcctttctttcacattttcatcccatcaaacatactcttaaggtttggaggaagaatgcctcccctatttctcttttccctcttctttcttttgccaaacaagtaatttactctctcctatcactctagctctactcctctctatccacctatctttctcttctgccacacatagtgttagttaataaaatatattaattcactatcagtaatgtacaattactattagtattgacttcgaggtttactgttacttatacacaggtatatatagtggtcatccagttgatatttaacggtaatatttaactggcatgtcaaatttgc

SEQ ID NO: 405866 - DNA, 599 bp, Cannabis indica
catcaagaaactagttcttggtgatttttccagagacaatgctaattctgacgactttttcggcgccggcaacaactccggcgacttttccggcaccgacagctactccgacgacttttccggtgccgacagtaaactccggtgacttttccggcacgagtgacaacttcggcgatcactatgttttatttgttttattttttaaaaaataaatatgaagggaattttaatattttttatggtaatttaattaagtttttattttttatgaattttaaattcaaatttctttttaatgttttatatggtttttttctaagaaaaaaccatattttagtttgattggttagataatgccatatttagtggcatttactttttatactatatttatcgtacccttaataatttttcccatatttttaaatagccctttatttttggattcattgtctttggtacattcatagcgttttccacgtccctggtccatcactaggcccatcatcatcagaactaataatagagcattgggcccattagctttaggtcgatcactaggcccatcaccagaattttttttttttttgaggtaatgc

SEQ ID NO: 405867 - DNA, 522 bp, Cannabis indica
atacggtcattttataaaataattaaataatataaattataaaatatctgaccttaaatttaaaaataagataaaataatcaaatttaaaaaaagtaaccaattaagcaaaatatcaggttttatccattttcaggttcaaagactaataatatctaaaattaattaaaataaaattaattaattttattctaataatttgatttgagatttgaaaaataaaaatctagatacaaaattatacaaaaaattcaaaattaattccatgaaaaacatgaaaaaattaaaaaaatgaaaaaaaatttgcattgggtatggatggtatgcactgcataccatccgcgcgcgcgtaatggggaggctggccgagatttgccgctcatgcatcctgcattgtaggatttctatggggggtgtggccttcccttcaaacacgcccatgtgcgtgttccttcagacagcagtgtctaaacacgcgtgacactcgtgtgtcacgtggtgtccgcacgcgcatggggtgtca

SEQ ID NO: 405868 - DNA, 641 bp, Cannabis indica
attttaaaatatctaagttatttttgaattttgttatcaaactaaattaaatatctaataagataaatgatttgaaaataaccaaatagatattttcaatatcattttctaatctcataatttaataaaattaaaataacaaaacaaaccaattttaaaataggtatgattaggaaattatcattttaagaataaaatattgaaaaaataataattatcaaaattatatgtcaaaatatctcaatttaagcattttttaaatttctacaaaaatatctaggttatttaaatatttaaaatactattcataaatttctgataaataaaatgatataaaatgttatgtttttaactaatagtttataaacaattaaatatttaacaaaataacctatttttgaatttgaaaatattatgattagagtatctataaaaatatctaggttaatttcaaatttactaattatttaattcatcttataagacaattttaataaaatattcaaattaaaatgataatgctatcttttaatttaaaatatatctaatattaaaatatctaatcttataattaaataatgtataaatattaacaaattaaaaaaaaaaaatctgacaataatttaaaataaaataatcaa

SEQ ID NO: 405869 - DNA, 859 bp, Cannabis indica
ttagattggattaaaaaatttaagatccgcacaaattgacatataaaaataactgatctaatctaatctacacatatttatatatattttaaaaaattatatgtacaattaaatttttatataaaaaaaaaaatagttaaaaatctaatacatatcatgaaacaaatatgtttcaaaacttaatcaaaatatcaaatatatattacattcttatttaaaaaaaacaaaatacaatcaaatataaaattaagtatttctttatgcgtacaactttttttcttcttgttttgaatttattagtttttggtttatttatcttaatttgttgttggagacataaaccaacaataatttattttattttgttgttagttatctgaaaaaaaaaatattttaataaatattaaatattcaatattaaaaaataatcaatccaaaataactgatccaatccgtatttttgcaaattggactggattgaattttagttattatgagaattgaattggatctaaaatatgaaatcgcacttagcacggatgagatgtattattagtgaaagagttgaaatgcaaaataatcctaaatttgaaaactaaattagtaaatgtctactttttttaaaaaaaaaaaattaagaaaatgggtaaatattataaattagatagcaaaaataatatctaaaaaaaataatatattatacaacaaatcagaaatatactcttcaacaaaatctatataccaacaacccagaacaactcataattttttttttttaaaaaaaatacgatataaactttcaaataaaaaagattttgtacaaaactaatatagatataccataatctttaagtaattt

SEQ ID NO: 405870 - DNA, 563 bp, Cannabis indica
ctactaaaaaatattttacttagttgtgggatcataaaactatagctcatagatcactcagaactaacaaactaaagtagtctgcttaattatttttagaaatcctaatttattttcatgtggcctataaggctttgcctcaactagacatccccaaatgtggaaatgctttagactaggctttcgacctatccaaagctcataaggtcgtctttgcaacttgctttaattggtactctattcaaaatgtaagttgttgtttttaatgcttttccccagtagggactcaggtaaggtataatgagcgatcatgctccataccatatccttaagagtcatattttgtcttctagcaacaaacattcatgctaggtgatcttggcatggtgtattgtgggacaataccgcatttctttaggaatttagcaaatagtcttggacattgttcacttgagctatcatatctaccgtattactctccaccacacgatcagatttaacattcgtaatcctcttgttgagttgattctcaacttcagctttgtaagctttgaacatgtcca

SEQ ID NO: 405871 - DNA, 504 bp, Cannabis indica
aacatacttgaatatttgtagtaaaatttaaagataatacacttaatttattttccactctaattaattattttcttttattatataaataacaacgctactattaatttataaataatatattatgatataaatattataaaaataaaacaatctaacaattaactatatcactttttacttttttttctttgacttttctgactaagaggaattatgaattaatgcatgatttttgttcattaagtagaatatatatatatatatatttgtttttagaaattctgagggggccaaggccaccccacctatgcacatatatccgctcctgcataccagtgcaattaagtatatcaagtctcatatataatttaatataataatttttagggaatatcgatcgctaaccaatcgcgcgtagggctatctctagaaggtgctagacactactagttaggggtgggcatccgatccaatccaaccttttttttcctcatccgatcc

SEQ ID NO: 405872 - DNA, 906 bp, Cannabis indica
accactatcaatatcaatttttctccctcactctctctcatttcattgtcacttgtttggcatggtattattattattattgattttgaaaaaatttactttaatacaaatatataagttttcaattttaaaaaattacaataataatctctaaggtcaccattttataggtctatcggtacccaatttaacaaatatgctaagtactaataaaaatatacgagttgaagatttatcggtccaattttataattttcattatttaaatcattaaataaataaataaataaaaactttattaatattttttttattttcatttgttctaactttccatctcattctttgttatttttctagaagaaataacaacaaaatagaaaaaggaagaaaataagtgaagagatagaaagacatagaaagttagaacaaagataattgctaaaatggatttgagaaattttcaaaaagataataataattctagaaaataattaacatatagtactctcaattaatgccaaacatactctttgttgataagtatgagaaatcttaaatattgatatatgaaaatgaagtgtatacatattttcatacatttatttagcaaattggaaaatgacaagtcaattatattaattaaatttattagataacttgtatatagttggagtttgatatgaacaagcaaaagataacaggttccaaataactcagtcttctaattttattctctaattaaactgtaaaatttatcattttatattagtcgttgaataatatataaaagggtaaatggcggcaaaatctttaaaattttattttggtttcacttaacttccaaaatttaaatttgggcggtaaaacccttaatactcgcattctgttagcaatttaacattt

SEQ ID NO: 405873 - DNA, 510 bp, Cannabis indica
ggtttaattttttaaaattaaaaaaattaaaatttaaattttttaaattgtacttactttaaattttaaaattttttaatttttttttattttacgttaagtactactaaatggtagtttttttttttttttttacgatctaaattagttttttaagatatacagttgaatctttcttatttttattttgagaggcaagatttgatagttgtcaaaatttaggaggtaaaatttataatttacaaatacacatttaaacagagtaatagaacaaaatctaactggactaaatttttgtaaaagttataataaaaataagtgaacattacatcaaatatagaattttatataaaaaaagttacaaaaatatgacatttataggtctgccactcttctatggtattttttcacatttaagatttttaatagtatttaatataacatacttttgtaaacctaatatccaaatccatattttatgttttgtttctagcttaattagttttattt

SEQ ID NO: 405874 - DNA, 670 bp, Cannabis indica
aaaaaaaaaaaagaaaaattattcttttaatgattttattttttattttaaattaattttacttttaaatagttatttgtggaccaataatattgtgtaatctgtacactatatccatgtggacaatgccctacgtacacatggacctatatacacatggatagtctaacgtgacacttaacacctaaaaatggatggaaagagctaagtgttaacagaacatgggtgttagattttaccatctgatctgatccaatcaatttcaataatccaatcgatccaacatccagtggatgttggattggatcggctctatccattagatgtatttcatatatatttattagtttaatttgggtttattcaatactttagacctagtattttttggatcggattggatccattcaatattttaggtccagtatgtattggattggactggatccatccaatccaagaaaaaaggagtaaaattttaatgttaattttcatatatacatatagatttgacatataacaatataaaatctaattaatcatccaaactaaatgaaaatataaattagttcgattggatgttggatgtattagatttttagacaccccatccaccatccgatctgatccaattagatatttaaaaataacatccaattcgatccgatca

SEQ ID NO: 405875 - DNA, 590 bp, Cannabis indica
tttgttattacaaatctttacagtcgcatttttctttacagttattaaagagacttattggcttatgcaaaaatacattttctcaaaacagatatcataatcttactgttaaattagatcactctgtaatacttattattacagttttacaagaagagaagaaaatacaaataaataccagaacaaatcctatgtggcttcgcctctagtggatcaagatctggtagttagttacaaccgaaattgtaactaactcccagatctttgatcaaccctaatctacacttatataaagggactagagccttaccaaatctctcagttaagagataccagaaaccagagccctagtttaccagatctggaagttgttcagctccaaatcgatgctccaagttcatgcaaagcaacaaaagagagttagtgagtgagaacagaaaaataatagagagataaacacagaaaaccaaaaagagagataatcagaaataccagtcaaagattgtgacttggatttctcacctgatgtaacttttcttcaatatagtgcaagatctgaggtcgatcttcaaggcgagctcatcagagga

SEQ ID NO: 405876 - DNA, 557 bp, Cannabis indica
gtgtattgtagaatttccctaaaacttataattagggctttcatcccattccgcgtttttttttaggttaaacaacattcaatccgtactaagtacagattttatattttagattcaatctgattcgcgtaacagtttaaatccaatctaatccaattcgcaatagtacggattagatcagttatttttttaacgataaattatttaatatttcatagaaaaaaattaaaaaaagactattatttttaatctccaataataatttattttcatctctatttatatacaaatcaaattaatatacatatatctactcatctttagatttacactaaattgtatatccattattaaaataaataaacaagtataaatacatatttaaatttagggttaatttcacaaatgctcaaaaacaacaaaaatacggtttcacggaattttaaatatttttacgatttttttaattttatttacataaaatacagtccttttatgtggaaattttattcatttgttgttaattttttgttattttgtatgttattttttattgt

SEQ ID NO: 405877 - DNA, 367 bp, Cannabis indica
attagtttctcaactttcttttatgaccacaaaatcacataaatatcaaaataattatgtaggtattagtattaaattctcttaattgaagcataatatttaaatgctaatcgttattaacaaaaaaaaaataatcattaaatttgaattaattaatgcgtataaataattaattaaaataatacatattattactctatgaaatttgagattcattaattaataatattatatctttgttttttattatcaaaaaaagttactgttctttaaattttttgttcgtgcatatatgaatttatgtttttattttaactatggatgtatatatatatatatatagttctatattgtttttatttttacc

SEQ ID NO: 405878 - DNA, 659 bp, Cannabis indica
tatacttcctgcataatcagagttaacatatccattcactttaattccttcttggaacttgttataatagacaagtccaacatccatagatcccttcaagtatctgagtatccatttcacagcagaccaatgttccttaccagggtctgcaatgaatccagtaaccatgctgagtgcataggctaagtcaggcctaatgcacaccatgcaatacatgagacttccaacacaagaggcatatggcatagaatccatgtacattttatcttcctcaattttaggtgactgattttgagttagcttaaaatcctgagccaatggagtgctaattgacttggcttcattcatacagcacttgtcaatcaatttctgaatgtaacctttttttgataatgaaaatctttcaggtctagctcttttgatgtcaatctcaagtattctcttagcttcaccaagatccttcatttcgaattcagcaattgattttgctttaacttgtcaatagcctgtctcttctcaccaattatcagtatgtcatccacatacagcaatagccagattggttcattgttgtaatttacacatggatcatagttgcttctgtcatgaaatctcaagtttcattgccttggagcttgtttgagaccataaagagattt

SEQ ID NO: 405879 - DNA, 811 bp, Cannabis indica
tctaatttggccctagcaaagtcccgaatcatagcactggcttcatcatccccgagaaagctgtccgagataatgaaccaactagaggataaatgggctgaatggtccaagggaatgggcgctggaggtccagaacccatccgggactgacctaaataatttcctaagtgggagaaataatactcattggcgtgattcccccaccgagtggaaggcatcctaaacctacggagacgttcatcgaaccctataggcctaaggcgggtatactcacggaggcaggaacatagtgtattattaaaggggacttaccagaacccgaagtgctggcatcgaaagccccagtatttggtactgggaccacgggcttgggtctgggggtcctctactccaacggagctccaatacggagggcccttccggcagtcgcctgggccttaatgtaagccagctcttgttccctcttgaagaggtacttctggtacttgtcctccgccatggcgataatgtcatcccggaacaccttctctacggccggagccctcacatttgggcagatgaccttggaaagattgtagtcatccaccgactgatgccccaggatcagcttggccttccgacagtgctccgtcgtgactaactcccggacatcaagggccttcttgtcgtatgtggtgaaggtcttggctcgttgaagaaatatttgagtagattcggtctgcatgtaaggggggatcctaacccactccgtgagaagctttggatgatccatggcctggaaaccggaggagaagaaaaagcggtgacgata

SEQ ID NO: 405880 - DNA, 636 bp, Cannabis indica
aattaagagtttctgagttttttagctctgaaaacatcctaaaaatactaataataatatgtttatataggctaacaaggttacctaaaagatactaaaaatatttaaagtttaaacttaaacaagataaaaatcgcaactctatcctttttttttcactatctttttatcttttttttttagaaatttcctactacgacgattgatagtattttggtcataactctctcgatattgcttggaactggacgattcaagatgttccaaaaacctgaaagagtgatctagaacttttatgctttgactctttccaaaatttgaacagatcatagtcgaatttcggtttgaagtttcagctttattttcttgtacaattttctctattttatatcatctttttctgtagatttcaccaatttatacattttaagtatcaaaacctgaaattaaagaaaacaagcataattatatttcaaaaagtgacaatgaagaagaaaattaactttaaaaataacatatataataggcagggccggccctgaaatgtagtgggctatagggtaaaaattattttttgggcccttatttagaaaaaaatggtattttccaaaatcagcaaaaaaattgtataatttt

SEQ ID NO: 405881 - DNA, 770 bp, Cannabis indica
gcaaacattattttcttacaattcaagaaaacatgaaaataggaggtaagaaccttacctagagcttggattcaacttagaaccttgatgaaaatcctacttgaattacaaagaaaaaccccaagtccttgctgctcaaagagggccgaaagagagagagagctagagagaaaaaaaattggtttttgcttctttctttaggtttttccaattttgtaaaaagagtgacaaactgatatttaattattttcttcagccaaataaacataacataaatcacataatcacaaaatattaagtccactaaaggacaaaggcttatgcggaaaaatgaccattttgtccctcccatactaaaaggatttaacagcactaaaaggtattttgggaacactctaaattcccaaccattcccaacattcctaatgtcaacaattacgctccgctagattaaaatactaatttgtgattctactgagctatacaccgtgttccatgttgccgggcaccgaaaatgcaaaattatgaaatttcactatatgacataaaaatgcattcagaattcaaataaatcaacataaataattatttaaatatcaataaataatttttataattaaactctaattatctgttaatttctaaatttaaactaagcggtctttacactatgtaagttatttttaaatttaggtatttttgtattttatgccgagtaacagtagaattgacgttttagccaatagtgtcacatagatacagtttagtat

SEQ ID NO: 405882 - DNA, 640 bp, Cannabis indica
tgctaaaatttaagcttggagggctaagtacaaaataacaatagttggagagtttagccgccaaaaacttaaatattaattaactaattaaataaatacttttttaataataaataaaaaataaattagtttaatatgtacaaaaaaaaaataataaattagtttaactgaatcagaaaactttattaaagtgttggtaaaaccatcactcttcctacttctggtttttggtagaaatagtggtgatttcaacagagattagaaaagaaaaactcatttgacactaggtggcttagatcaaagtaaagattttgtgggaaccaaggtggagctagtcatcaaacttatacatatcctgagtgtcttcattgtaaaaagcatcatttaggtgaatgcaacagaaaaacatgttttcagtgtggccttttaggacattttaagaaagattgcccatagttgaaaaaaagtagagttaagaaaagaagaaatagttattctagctcgggtgtttgctattactcaggccaacgctacagctagcccatctatagcatcatgtcagcttctcatcaataattcctctagctcggtattatttgactctgtggatatatatttataggtggtagttaaagtgtta

SEQ ID NO: 405883 - DNA, 530 bp, Cannabis indica
ggaaaaaatatttctttgatgtttctgtgttatttggagatggaaattcattaaattttcaagaggttgaagaaggaatacgaatctgcaatgtctgaggagaagtaaaaagtgaactgctaaaggaatttcaacttgatggaagcaaggagagcttgtcttcttggatctaagagtgcttagatctgttgtcttgactgtgttcaatacagggtcggcccaagcattttgggggccttgtgcaaaattttaaaatagggctctttagaaaaaaatatcgtgtacatgttaaaactacaattttattattagcactttttttaagattcgttcataaattttcaattataaattttttctttatgtatatataataagaaagaaagactgtcctctctcttcttcttactcttacctctcacaacacttcaaccttcttatttcttcattgttgtccgtgatcgcatccccagtacttacttctccatcgttctgatcctccaacaaactatcacggtaaatatctctct

SEQ ID NO: 405884 - DNA, 793 bp, Cannabis indica
tatgcccaatcaaataaatcttccaacccttctcatttgtctcttttttcctactagttggaacaacacgtacgtaactttttggaagtaaatatataatttttattaatttattaaatcagttaaaagataagattcttcctcaacagaaacatcgcttttgttgaacactcaaattagaaaagaacaatatgctccagcaaaattatgagcaaccatcattaataaaaaacaaggaaacattgtttaaagatagaagaagtttacgataatcttctataataacctcaaaagaaaaaaaaatatagataataaatttcgaatagcttgtactgctactaagtaatatgactccaactccactttctgccatggttgagtcttaattcagtatagcatgagtcatgtaatgtacttaatagtaaaataaacttcacttaatatattcaaaaaaatatataattatcatatggttattagcgtggcactcacatgataatgatcatacatcatccattaaagagttgcacaagtgtatctcggtgatgcatcaaatagattatgagtatagtttatcttgcaaaaaatttgcttcaacactatttaaaaagttgtgccaaaattgatacattaaaaaaattatactaaatttaaaatacaatatagcataatctaaaatttatatcactatacatacactattttttaatattttattaatatatatagctatcgaccataacgttatattaatattaaactatttacattcttttttattgttttagataat

SEQ ID NO: 405885 - DNA, 673 bp, Cannabis indica
tataggattgttctcgggtagtcttgggactagttctgatgttttttagttgaaattgaagtaattttggattagaaattgagtttagaacttttcatagcttaagtccagatattagtgacgtttgctaatcaagggctcgattttagtttctattccgtaaatatggtagtatttatagtatatatgtgccctatgaagtttggggtggtttagacaggttctagtagtatttcggtgagtgcgtaaacctagaaaaacacattttttacccctgaaaatcggtccaccgattttggaaccagtcagctggttatggccaaccagtttactatttcgggcagcctcgagaacttaggaatcgtatttttataataaattttcactcgggtgtccgttttggacgttctatatactatttcgaagcttgaaatgaaatctaccatgttttagagcccaaatatgagttttatgttagtgtatttgaactacgggatttggtaggaaacattaggttgtcctttgcaactgttaagcagtgttttaggataaacacttattggtttatcattgttatgatatagggcccaggatcatcgatcgtactccaagtaggttggccaacatacctgaaccagaacttgaggtaataaaagtatattgtactgcatag

SEQ ID NO: 405886 - DNA, 606 bp, Cannabis indica
gaatatagaaaatatatatatatatatatatatataattgtactttaaagtggtttcaaataaaattataagaaaatgtggatgcattcttaagaacaaaaaaaaaaaaaaaaccatgaaattcctagctcgagcaactaacatgtaaactattggcttatgatgggcttgctatcaataaagatgaaaagaatattaagggtgtcaaatttaagagaaaagtatatatattatatattacttaattttttataattgaatataatcttatttaataacaagattttttttcttttttgtaggttcatttgttacttacaaatcattatggtgtgtttggagattttaaaaaataattaaaaaaataaaaaagtactatgtcaaacattatttacgagtgatttttgttttttcctaatgattttatgacaatattatggaagaaaatatattttaattttgtggtttacttttggatatatttttcgtgctctactctttcttttttaggataatttcatatggtgttaggccatctccaatgaaacggcaaaaaacctatatatactgttatttttcctctaaatgctccaaccacactgcaaa

SEQ ID NO: 405887 - DNA, 648 bp, Cannabis indica
gagttatagtgagattcgaactctaccatactaaacaaaccaataaaagtttctctactactatataatgtcaatttcgggaacttaaaataaaaaaaaatatattaggattttattaaataaattaagtatattgtaaacaacaaatagtcatagtttagttacttgaggtgtatgacatattatacaatgtcatgagttcgaatttcataacactcatttaatttttttttatgtatatttctgagggccccaaaatttaatccgccttaagcccatatattctcagggttagccctgactataccacacaatacgttgtcaaacgtaatactattactagtgagtttggttaattattattgttattaattatttttatttttcaatatgaacttcactgtatggtaagtggtaagagtagctcccaggagactgcatatatgttaaatggtgtgtatatgtcgtccaaggatgctgtatttcttgtagcattttgttgttttatctaccatgcacgacatatatgatgtgcacatagtcacgacataattttttttttatatatatatatataatttagttaatatttatattattgtatttgtaaaaattaagaattatttttttgggaaattttacaatgta

SEQ ID NO: 405888 - DNA, 641 bp, Cannabis indica
acttctttggcctctgcccgaccaaaataactccaaagggcattaagtatttgtccactctcttcgtcctctgctttccaaggatgggatgctccttccccccacgaggtcgcctcgtccttttacctgaagtctacccccaagcaaggcaggtcgggggacttctacttctctcagccaggcttcaagtggttgagcggcacagatgacatggccatcagcaaaatagggcgttttgttgatgagtacttcatggtgaaggatccgagcatcacccggactcagtttcagcagattccgacatatcaccgtcctcccctcacccttgctcttagggattcagctcaaaaacttgcccggttgcaagaggaagacagaaatatcatccagctgacctccgatgataatctggtgaagtatgggctttatcctgaggacttttctcctaagtcagtggcggggaagaagaggaagtctgatgctggccggcctgaacgagctcataaggagaatgagttgattcaactaaagcgagaggctaagttgaaaggaggtgccagggccaaatagtatgcttaggagcctttgaatcctgaagatgaagccgaggacgagcaggtgaccccattgaagaggaagaa

SEQ ID NO: 405889 - DNA, 1094 bp, Cannabis indica
cttgaaaactactttttctcttaatataactaacaaaaaagtgatgcacaatggtcttggctttgtgcttgtgaaatttcatgattttttgagatgtgtagggtgagattttaagagaaaactaacgagtgcaagagtaagaaaaaactttaaaaagaaggatatattcaattttttaattagggggatattttaaccaaatttaatgcaaatccaatctttatattcatgacttagtagtacgaattcattgtgactagtggcaaaaaatatttcgagatgggtccgggccacatttcacaaacgggtaccactatcaaaaatgtgagattttcactattttgattaaaatgattgttagttcatgaaaactactttatctctcaacgtgtcccatagaaaagtgatgcacaacggtcttggcttcatccttgtgaaatttcatgatttttcgagatgtgtagggtgagattttaacagaacactagtgagtgtaagagtaaacaaaaaacttgtaaaaatttaccttgaaaggaagaatattttaaagttttaaattagggggccattttaaccaaatttaacgcgaattcaatcctcatattcacgtcttagtagaaagaattcattgtggctagtggagaaaaatatttcgagatggggccttgccacatttcacaaaggggtaccactatcaaaaatgtgagatttttactatttcgattaaaatgaatgttagtgcatgaaaactagtttatatctcaacgtgtccaatagaaaagtgatgtacaatagtctttgtttcgtccttgaaaagtttcacaatttttcgagatgtgtagggtgagattttagcagaacactaacgagtgtaagaggatggaaaaaacttgttaaaatataccttgaaaagaagaatattttccattttttaattagggggccattttaaaaaattttaacccaaaaccaatcttcatattcatgtcttagtattacaaattcgttgtgactagtggcgaaaaatattccaagattggtccgggccacatttcacaaaggggtaccactatgcatgaaaactactttatctc

SEQ ID NO: 405890 - DNA, 466 bp, Cannabis indica
ttttaaaataagttcggttatagggatggaggggaaaaatccaaactttttttacagtataggtttaggtattgaaaataaaagattttaaaacaaaaatgagataaaatgtgaataaatgcgggagattgatggttttatatgggtcattggcgagggttttggcgtgggctagggtgctgctatggctgctgttatcgtgtatgaggaacaaggccgaagtggggaggatgaatgtctgattgtgtatatatatcatatatggcgtcagttattaggaaataaccgacgccataagtgcacggtttgctaacacatgtgcacctatggcgtgtgttattttcctaataactgatgccatatgtgtaataatgtcagttgaaaaattcttaacccccaactgacagcatcacattgttaatttcttatacctacggtttttatcaagaaactgtctctaaatgtc

SEQ ID NO: 405891 - DNA, 748 bp, Cannabis indica
cttgtcagtaagatttttaaagcaaggtactaccgtaatggtacatttttaaatgctgagttggggagcaatccatgtttcgtgtggcgaagtatttatgaaactgaagagatcgttcgaaaaggaacgagatgcagagttggtgatggttctcgaattaatatagtgttggattcgtggctgccaaatgaagacaatccaagagtaacttcgaataatcctgctcttattgatcaaaatgttaaagcacttatgaaaactgatacgttggcttgggatgttgacttggtgcatgatatgtttaatgaaagggatgctaacttgattcttagtattttcttgtcctcaagtcgtttatgtgatgtttggtattggagttgggagagcttgggtcatttctcagtaaaatcaatttataagttcttacaattgagcaaagagttgggtgcacaggatgataatttggtcttttggaatactctttggaagctaagtgtttctccgaaagtgaaagacttgttatggcgtgctgccactaactgtctgcctatgaaatccagacttcgttctagacatggtcccggtgaaaccatcttccatgtgtgcaaagtaactgatgaaaccatctaccattgcttggtggattgctcttttaccaaagcgtgttggcaacagttggctgctggtattaatttgacggcagttggttcttttcccaactggtttgctacggttctacaacaggcgg

SEQ ID NO: 405892 - DNA, 583 bp, Cannabis indica
tttatattgtaatttatttattatatatggtgcattatggattttgaatttttgtaagttatactaagtatgtgctgttatttttttttattatttgtacaaataagaaataaatagcatcattttaaaaaatttatttaatatataaatataatattcactttatatctaagcacaaataatagttgttattacaaaactctcaatttattatcaaatttgtactatatttaatatatttaaacaattttattgaaacttatattaataataaaataataaataaaaaattataatttatttaatggtcatataaatattatagaaaaatattttttagccctaaattattattagaatattatataagtaataatatttaattatttaaatttatttatatgtataataatattaatacaatgtaaaggccttcaaaataatttttcaatattaaaggtagggtgcgtttggtaacacatttttaattaattttatgtttttttaattaaaaaagtgaaaatattttcccaaaatatattctataaaactgtttttactttcaattttttaatagagaatc

SEQ ID NO: 405893 - DNA, 646 bp, Cannabis indica
aattagaaatgaaacatgcgccgggcagagtaaaaataacaagcctgacagcaggcggtaagcttgggggataagttggtatggcgcaaggccgacaaatacaaggaaattaataaaataatcttgaaggggaagcatggcctcggccatcaagtgtgtctggctccaggctccgaagccctcgtagttatggttgggcgtctcctcgtcccggggtggccggtggaaggtcccggaggttgtaggcttgatgcctgccaccaccacaatgtgttccaactggtgagggcaggtcagggtggagcgaagctcagctgcttcccacccgttggcacgagacttgtgcccttcttgggccactggacccttcatgacttcctctagtgtggccaagcgtttctctcccttccttgaagatttagaaccggacgcagacattttggttctgaaaaagattgaaaaaatccagcagtcaggccccaaaccaaaccctaattcaaaaaaaaagggaatgggggtcccctaaccgctggaaagaggccccctccggacacttgccaaaaaagaaagcctcaaaaggttttccttgacaagggtcgggtgcaagaatcccacaggtagtgtaacaccctaactatcttaggcg

SEQ ID NO: 405894 - DNA, 684 bp, Cannabis indica
cgtgggaaccacacccagtttacctcagacagaaatctcctggattgggagcctccgccagtgggatctttcaagctcaatacggatgctgcaatctcctctcaccagaatagaacaggagggggagcattagttcgtgatcacacagggaaagttctagcagcaacatcttttaaccgaattggacaattgcatcctcaagcagcggaaggatgggctttgttggaagctcttaaatggtgtcatgataaaggaatcaacatccaccacgtagaagtggattgcaaaaacctcctcacggatttgcaatcaacaaatgaaaatcttacaagttttggcaacataatcaaagctattcgacggctgttatcttcgttccccactgtaacccttcaccacactagacggcaagggaatacagcagctcataacctggcacaaatgtccatagggctagataacacttggagttggaatagccaagaccccctacccttttcttctgtaacctttgggtcttattttcaaaaaaaaaaatgattatatataaattttttagtatatatacacattttaatagtggtatatataaattttgttagaatgatatagatatttcagtacaatttagtattgttataatttttttgtggtatgttaatttattgtgggctaaatttaaca

SEQ ID NO: 405895 - DNA, 572 bp, Cannabis indica
ttaattaaattgtttgctaatttcactttgtagtaattataaaaatagaatttcatgtttctcacatttttaatgtaatctatgttgtgttcagttttttcttttaagaattagaagcatatcactaaaatatcatggtatatatttattagttttgttaaaaataatttttcttttaaagttatgttgatttttttttaattttttatagctagggatgttgggacttaaatgaccctttattattattttttatggaaaataatatatatttatatataactaaatattattatagcaattagctaataaggttggtgggaacttttgtattgtgtgggaggaaatggtttaatcgcctttctaaacaattagtacattttttttcttaataaaaatgctatatatgttttcaaaattcatcttaagcccttccaaatcttggggatgacaaaaataatagagaaatttattttatattaattgtaaggatgtggttccaaattttattactctaattaccgctatgttgttgaattattttgtgaacggcataatcaattgaaacatta

SEQ ID NO: 405896 - DNA, 542 bp, Cannabis indica
ttttagtaaacacgacacgtggattagaatcaaagaaggtcaagggagtcattaggccaccaagtgcttcattgagagtctcgagaagataaaggcatttaacctcgtggaaaaggtctccgtgaaagaagtctccccgattgttggccatacagagggtatcgtgagctggagtctcattccattctagaagccaagactgtttgctcccgcgaggtgttacaaaaattgtaaatagtacgcaagtgcatgtaatcaagtagtaagctcacacagatgaggtcgaactacagggaattggattgagtaccactagactaaatctatgtgtctatttggcaaatcaatatttcttgagtttaataattgaataaaaattcaggaagattaaagagacaataaaaattaatcaagatgagaagatagggagagaatcatgttgatagattaacccaattattaatgcctaattactattctagttcttgttgtgaatgacagattattcaaattaacctagctcttttcagatcttctaggtt

SEQ ID NO: 405897 - DNA, 359 bp, Cannabis indica
ttaaataatgcaattttgaaattggtgagaaaaaatgattaatgaaataaaataaaatacgttttgaaaattattctaatttatgttgttctgaaattaaaatttccaacttaaatataattttctatctagttaaagattctgaaaataactaatatttaagtgtctagaataaactaaacttaaatatttaattttcaatttaattaaatgtattaaataaaagaatcaaataattaagcatcttgaataaaataaacttaattattaattctaatttaatactagaaaaaatattttaatttaaattggtccaaaattaattaaaataattaattttcaacttaaatatatttttc

SEQ ID NO: 405898 - DNA, 544 bp, Cannabis indica
ctaggatttcgcctcaagaattatgctaaccaattttagatgcttaaactttctcaaggtgttagctattctagacactcaaagtatggtgggataacacaagtacacctatttgaaaaaattcctcttaaactagcatttagacaaaatagcatttaaacttagcatttcaacacacaaaaatcagggcacatcacaaatgaaaggaaatggttattcttaatcatcgagcggcgctaaactaagctaaagcaaaatgacatatacttctcagttacacactaacacaacatagcacaaacatgaccatataacatgtaataccgggaattaagaaaaggattagcaaagtcctaactagataattatgagtaattgatggaattatattattatatagtttaatatatgtgaaattatatgaattttaatatgttaagaaaccgttggtgagccaggggcactttggtattgatgacccgagaagggtaaattgatgaaattaacttaatgacgtgcttaatagaactatattattatatag

SEQ ID NO: 405899 - DNA, 432 bp, Cannabis indica
ataaactatttatatttaactttaataatctatcaatgttcaataataactaaattttaaataaaaactattaaattattcaatattacactatttaatttaaaaaaagtaaaagtatccatcataatatttctttttttttaaaaaaaaatcttattataatattcataacaaaagaatcttattttaatatttaaattttaaaaacaatacaaaaaaaaggaaaaatacatatctttttttttttcataatatatgtaacgttcccgtcttaaatcttcattgggcacttacacccacggaataatgactcttatacacgagtaccttactctgggtgcttcatagactaacgactgaccctacaaaccaacacgagtatttccagcgtgctttgttctcactggcacgcttctgttgggttttatgccc

SEQ ID NO: 405900 - DNA, 838 bp, Cannabis indica
aattttttgatataaatacctattcttttggactatatgatatagtaaggtattttggtaaattctttatttagttttggaatttaaaggtaaatttttagtttattttttgatgatcttatatattctagctatttaagtaaaatttataaatataagatttacaaaatttattgcacgtgcttcttatttttttagacacataataattaattatttaaatttattttagtagtaaactattcatattttaaaaatttataagtaaaaattaaactaaatttcttatatataaatgcgttttttttttgcatggtgtggttttagtgttgttgcttttgatgtcatatagaattaatgaaataaagctgagagtatattcaatgaacatgaaagtcgtacatgcagactaccccacctactatgaatcacatttacttaaatcatgcatctcaatatctcattactaatgtcttttttttttgaatgatatttataaaaattattaattaaatcacttttttattaaatgataaagtaaatactgtaattttaaaaaatagtaaaaatagtattctcgataattttttttaatataactaattaaaaaataatttttagtacggacatatgcaaaaaatataactacttttatcatagtagctctatatcgatttattattaaattttattttgacaaaaaaatcagttcgaaattctaattttacaattttagaaaataaaaaatttattttatcatttaacaaaatagaaagtccagttaatatgtttggtattgttttctgttttttgttttcaaaaaattgtttttagaaat

SEQ ID NO: 405901 - DNA, 808 bp, Cannabis indica
gattttgttactaatattttccttttaatagaggagttaatccattacttttaagttagtattttgtgatataaattaaaggatcatttataagctttatcttacaacaagggtcaaagtgtgacctttgaccacccaagttatggatattacatatctgccacggcttagggctcgggtcgtgacaatatgacttttgaatcttcttcgtcttcatcaaaaactggaaaacaggtcctttcagcgaagaaataacactttcggggtgctagaaacaaggcccaatgcccaggttgacattttgtcaacttgggccaatttcggtgatgtttttgagaactctttcaagaatattctccgttttcaaaaaatattaaaattcaactattttcagggaccaaatggaatttttgaagggtcataattgggacccagtgccatttctgattaagttcaccaaaaagtgtttcgaacatttttgtatcatcagaaataatgaagattcaagcaaattcgaggagaaaactacaaacccaaacccctgaaaacataacatacttttattttttgttttttaagaacaaaattttaaaaattaaagttttacttttatttttgtgattaaaaagtttaaaaacaaaaataatcccaccttaatatatataataactctttctatatgcaaattaagatttattgaaatgaaaggatccagcgatatatggcctttaactaattagtattttttaaaaaataggaatttatataattaaacataccttgacaataataataaataatgaaggtc

SEQ ID NO: 405902 - DNA, 676 bp, Cannabis indica
tattaatatattagaatttctttgatttgttattgtaggattttgttcattacacttattggaattgtttctacaattaatttgtcacctattttgtttgctccagcgtttctatcacctaaggtaagtgttttttattattattattattcatgttcggttaattcgttcattgtaaaaaaaattagaaaaacatatatatattacacattatgtatttaattcattgtatatatacacatatacgtgtatatttacatatatttttaatagcttaagattacaataataaaacataggtaaaaaaaatataggtaaaagtcggtggcttttgagttctataaaagagaaggtctattgtataaatttggttcttactaattagagaaagacgatctcttccttccactttgaactcaaaattctctgtcactattgatatcccaaaaattgaattggaattggaatacagagaagttgagtcatcgctctttagttaatactagcaaaaagctacgtgcgaggcacgtatactaaatttatcacaaattaattaatcttataatcttaactttaatcaaacagggttctagatatatgaacaataaataatcacgtaaaaattaaaaataattattagaataaacaattcaatatacacagttatatatatgaa

SEQ ID NO: 405903 - DNA, 521 bp, Cannabis indica
ctctcaatcactgaatccatctttagtttaaactctctaagcaaagtaatgacttatgatattatgggatggaagcaagtgagtttgagttgatcagcagagctattggggagctatatagctttagttggcttggcttttggtatatttcacatacacatggcaaggcatgaatggttactaatactgaacatttatagcacttaacatcacttaattaaacctaattaaaaataaagataaattgcgccataaatacctattgtttcagattttatacacttaaataccttatttttatttttggaggcaaaaatacctacaattcccttacatccgttactatcacttccattaactcataaatataaatacatggagggcccagatgcattacatttatttatttattttaaaatttaatattcttaatatcaaaaactaaatgctacttgttttaaaaaaaaataagaaaaatataaaattaaattaccataactgagtgaaccggtgcagtatat

SEQ ID NO: 405904 - DNA, 613 bp, Cannabis indica
tctgattttagaaatggtattaattaaataaaaaactgggaaaaatggtctttttgcccatttatgttttgtccttttgtggttttaatttagttatttaatctgattttagaaatggtattaactaaataaaaatcctttttcttatttcgttttcaataaatattaaaatacaagaaaaatcacattttatctctccattctctctctttttcgaaacccttggagaaaccaacaacttgtggtgttcttcatctggtttttgctgattttaacttggttcttggtgaatcccttgaaggaaatagctttagtaaccttctctttagtttccttatgttttgggttgagaattttgcatgatttgtgaatttagttgctactattgtttgaagtatgtttctgaagtttagtcatgttgtataatgctgatttaagcatgttttgatggttgatagtagggttaagcaagtttaaagttttagaactcaaacttggtcctttaatggttattttagattctgagcttgggtagttgttttattgcttgaaaaatgtctattagggaataatatgcaggtctggaaggtttggtaaagtttggaatcgattt

SEQ ID NO: 405905 - DNA, 918 bp, Cannabis indica
atattattgtgaatgtatgagagatgataaatcgttaattatatggtataatagggtgtaggttttatttttattttgtagaaaataatgtaagccattgtggggcataggaacttttatgtaattttatttatgaaattatttttatgtaaaaattttataatggaatattcatcgcatgtgagctcggtttccaaacatgaaacattgccatgcacatcgaacatcacatgcatgtgagcttgggttcatggaggaaccccggtcatgcacgacgacattagtgcctcgagtaccatggccatgcatgcaaccgcacgttggacgtgcacgagcaagggattttggtcctgaagatcacgtcaatggtcgacattaatggaaattggatcgccgctccttctccttggtagtttgactaccttactgtctggaccaccatcccgtgactatcacgggaaaaggacgcctgccacaaggccttaccggcaacgacaggacgtccgcatgcaagccatgcatgcaatgggacgtaagtcccatacggctcatgcggagcctccgtaacttgggtctttgacctacttgttcgtgcggcctggttttctttgtggccttcatggccatcgtaggccatggtggctgtcaaagccgccgaccacgatggtgtatggtggtggctggcactatcccgttgacctgaacccgattgtatatttatttagatttgaatttcaaattaatatcatagttatttatttaaaattcaaattcaattataactatcttaattatttaataataatatgataaaataattttattatttttaataattaagacaataataaagtgttgtggaatatttatttttaaaatttaattttgaattgaataaatataattgattttaggttt

SEQ ID NO: 405906 - DNA, 870 bp, Cannabis indica
cttgaagcttgggcagagactcgtgcttgaagcttgggcaaagactcgtgctgataacgtgttataaaataatataacataatatagaatagatgagaagaaagaagaagatgaagagagaaagagaaagtgaatgagaatttctgagttatttattccgatgggtgaacccctatttatacaaatacaagagtgaaatattaagaaactaagaaaaagaggaatgttgattacaattaatggtaataaataaaagatttggacatccacataattattaatatttataacaaaaaccaatttttgcttttgttagaaatataataaaatcttttttttaataatacaaacattaatagacgttaaaacttaataaaatttacaattaaattaaaatacattaaaacttaaaaggaaacaattaaaaaaagaaactaaaatccccaaatatctcatcttttcatcttcctagcaaaccatgataacaaccaaaaaacttaaatccctaaatttctcatcatcgtgcaacttatctctggtcataccatcttaaaattgaagcatgtaatgaatcttcgcttaggattatcattggtccaagatgttctctgtaccactggttttggtggctacaaaaacaggtgcttccccctatatttctgcaactcaaagaataaaaacaacaatccccaaaaaatcaaatgttaagaaatcataatctgtagtgtgtaaagaatgaatatatatagagatatatatatagatacaaattaaaatgaacaaaataaaataaaatgtagaaatcaaaagaaaacatttcatcgtatgtatatacatattcccatacttatgagagtgatagagagagcg

SEQ ID NO: 405907 - DNA, 629 bp, Cannabis indica
gaaaaaaattggactaaaaacttctcttagatgcaaattcatatagggacgcatcagtgaaccccttttaagaagtatcctattatttattagaaaattataaataaaaaaaaacgacatatgtaaatgaaaaactctacaatgcaccccttaaaaggggtgtatcgatgtacccatatttgtttcggtatttgagaaacttttttagtctaatttttttttatggtcgtgtacattatatttatttaagatatcttgtaaaattttaagaaattctaaaaaacttaacacgtcaaaaatataattcaaattgtttgttgtacgtttgtcaaataaattatttgaatattattttttagattgtaaattatttatttttttaaaattttataaaatattttaaataattataacgtatattattataaaacaaaaaattaaacaaaaatatttttaaatagatatgagtgtatcactatgttacaagcatcaaaaattaaaaaaattcgtaaaaaggtggagcctgttggctgttttcagtttttaaaattatatttttaaaagtgagaatagaaaacagttttttgtcattttaaaaatttaatagtgtttggcacaaatttttaaaa

SEQ ID NO: 405908 - DNA, 775 bp, Cannabis indica
gtctttcaattggatttctttcactattgcctttttatctgattcggctctattactattatcatgtaataaattttatccaacttatcaattaataaaattggtaagatttattattgtaatgttataattaaattggtaagatttattatttttatgtagtaattataatacaattcccagcttgctcaaaaacactagctatatatgcatgcatacaataatatccattaaaaaatgattcatatatataatatatacctatgttcttgattatttatgaagataatgcaagtttgcacaataatttgtaagtaccctaatcaagacgttgcattatatttaccgtacatataacagtacaaatgactaattattagttggctacatacacacaagtactattaattattagtattcttctaccattatatatgatacactaaacattattatatattaatcaaaccaagcaatcttcagtgtacgtacttcatctctcccaattcacttattcagaaaaagacaatatataatatttgtgcttatataaaaagtattattagtgaaagatattataagatgccaagatggcataactatgattatgagaatcataattcagatattaatatatatatatatataattaatgatcaacacctaccaatcatatagtactacctttaccctaaaaataataatgtaaagctagcttatatttgctatttagctatatatagactaaattatatacaattattattattattat

SEQ ID NO: 405909 - DNA, 541 bp, Cannabis indica
ctctctccctctatgctaaaaggtattagtgtctagcaccctattatgcgtcaatatcactattggttaactaaatattggtctcatataatttaatataataatttttagagagtattactagccaatcgcaacgcaacatctcaactaggcattactagtgtctaatagtaatgctctatatataaatatattagtgatgacgtggcaattaatgcctgttgttttagattgctactttgtctaattaatagatcttttcatttaatgactaattgcagtatatatctaatttttataatgttaattgacaattgtgtataatattcccagggactttagctgtgggctaaagccctcactcaaatataaacatcaaattttttatatgcagatatatacatatattaattcactttgctcaatttattaaagtccaatttacaaaagctctcactcaatatcttaatcatgattcatgagcctactcttattctaatcaagcccattttaaaagtagtccaatacaaataataaaaaa

SEQ ID NO: 405910 - DNA, 683 bp, Cannabis indica
aagaaaagaaatatgatttgtgatttacatgtatagatgattatttaggcccttgttgagtgctattagactgtaaacactattagtttttgagccaatacatattctgattcaatacaaaaaaattatattataatataatttcatattaataacacaagtaactagttaggatttgactaatttattttcttaatcgttaaggtattacactattacaatacctcaataaaaaattactaaattaatgttttttttttgtttgtacacaatcatatatgactatgttttgttggccgagaacattcataaatcatttttacattttttctttatcaagattaataatatatatgtttcaataaataattctaatgagttttatatattttttttttttgatagaagatgaaggtagagtaattataattcagggtaaaaggtctaatttattatagtatttttatatataatttgttcaaatagatttttttttcttatattaattttgataatatttggtcgtcttcaatgttggtgatgacaataattttgaatgtaatttcgatcacaagtgagatacaataactacttaattaaaaaaatatcaaaaaatatatctttttaaactatatcaaaaatatgttcatacaaaaatatttaactcaaactcaactttttct

SEQ ID NO: 405911 - DNA, 607 bp, Cannabis indica
caaggcagaacgaacacattacagcaattggaacatgctttatggaaagattcaaccgagtagggagactattggtagaagctctccacagaaaattaagaactttggagggagctgcaactgccataagagccgccaaattccaaagttatctggaatatctctgctggttttcatctattgaagcagagaatatgcactcctaacagtgaaaactcctgatgcatcatgtaactagtaccgcaaatccgtactcatatgactactgagcggattcttccacaccaaagctcgatctctagcagtgagcatctcagctaatacttccccatcccattcaaccagctcgacttccattaaagactcaacccacttccccacaagacctggatggacagattcaatgaaagggttcatctcatcaggaagccaaggctcaaacaagatattgacggtagaaccatcacccaccaaccgccgacccccagcccgaactaactccttagcctcaaacacactccaccaaatataactaggattactccccaaggtcgatgtaagaaaagaccctgacgaaaagtatctagctttgtaaatttgccccatc

SEQ ID NO: 405912 - DNA, 629 bp, Cannabis indica
agcaaccaaccagggcattcctagcattgtcgttctgctcgtaaccatgttcgaacaaccatcgaagatgatacacgaaatctaaaacctccgtgctgctctcggagtcatgcaaaggtcataccaacaccatgcatcatgatcaggaggaactccgtgctgcagtaaatcttgcattcgaagagcaaaggcgcatgttcgttgaatggagagacaaggagatggaaacgtaaagggctcagcaaacattcattgatgactagacccgacaggccaccgtgttgatacgaaaagcctatcaggctgccggacaatagcctgcaaccgtcatccccctgggcaagacagacaaagatccagcggtaaacacctctcagattataaatggtcagccaaccaatccccggtcataagttccacctgtgggccaagcggtaggcgggcagaccttgtcaagcaattcatcaggagaggttatacctaatacttccactcaggttaacggtgctggccagctaatgggccaaaccaaccagtcccttagacagtcgagtgtttctgtatttaatcgtttggggacagttttcgtctctattagactctcccccacggtgactacttagagataa

SEQ ID NO: 405913 - DNA, 569 bp, Cannabis indica
aaatttaataaaaaaatataataaaaatttaaattaatttttataaaaatactatcacttaatttttttaaaaaaatatatattatttttataaaataattgtaaaataattaaaaaaataacagtaaaaaaattaaaatataaccgtaaaagtttaatagtacaatacacagtataaaataaaaaaatatattatatttttgaaaaaagaaattatgactcacaagtaaaaaaaatagaaagtaaagtatgtagtgtaaatttctcttaaaaaaaaatttgagtttgtgtgctgttctttattgtgttgtgacttgtgaatgactcattatagagcagtataagctaaattttttataaataaatttacataaattattattttttgataattttttttatattttaaaatattcataaaaataatactaaaataataaaaaaataaataaataaaaataaaaaaacaaaaaaaaaacatttttttgagtaaaaactgttattattaattgagagagtcttcaataacaacagaatgaattggggatggaatttcacccaaccatgaa

SEQ ID NO: 405914 - DNA, 264 bp, Cannabis indica
gtgtttacaattatgaaacaatggagaaaatcatagaggttgaagcacacaaagacttcattagatgtgttgttgtccattttggtatgtatattactttaatatttttttcattatgtaatgattttgttagaagatattaatggtcgtggctggtcgggcttttaaaaattatttttggattttttaagctccaaaagtatttttattggttggtaaatcaataaattttagtttttaactgtaacaaaattagttttagta

SEQ ID NO: 405915 - DNA, 722 bp, Cannabis indica
aaagtttataacctttgttctagaagataatttttccctagggataagcatattttacaaggtttctatgattcaacgtacattgtatcaagtgcacaataagttattgtactgtgaattaggcaatgaatacaaagaagtcacaaatttatgaactaatacgatattgtcaaatcgaagcatatttttgtctgaaaaatgatatttataaaagacttggtgacaagttagtacacaccacaaagcctcataatttgggccatctgtgataacacaattctaatcttaactgtccaaatctatcatcaactattaatcatatatttattaaaaatatgttttggaaagggaatttttcataattacctcaaaaagacaaaaattatagatctacagtattttaaaacttttttatggatattttctttaataaaaatacggacattatttatacgttgttttcaaaataatgtaattttgatgttgaattgacgctacattattgttttttgtaaacaaggaaaaagaagtttcattttaggtatgtttttgtaaaattcctttttgataaataacacaaattaggcccaagagtgttcattgttacttccccctctttattagtgtaccaaaaataaaagaggaaattacactctataccctttttatattgtcatcttttatttttactttttttttaaagtctatcatttttacttctt

SEQ ID NO: 405916 - DNA, 628 bp, Cannabis indica
gagctgattttttctatacaatttagttctactgcaatatccaactattggagctggcagttcgaacggttggggcactactcggttaagagtgcctacaagttctacaagaagaaaaaggaacttggcctgttactggagctactggcatttggaaggatttataaagtttaaaagttccccctaaagtcaacaatttcttatggaggacggcttcaagctcgttaccaacttgtgctcaattggaaaaaagacatgttccagttaacccaatatgccccttgtgtctcactacagctgaaactatattttatgcgttatttgggtgtgttcatgctcgtgcctgctggaataggacaagtgtggttgttggcggtaatatggatgaggatttcagcaattggctactggagctgcaataccgaggaaaagaaggcgagttggaggaggcgactatggtcagggccatttggcgcgccagaaatggctttgtttggcagcaaaaaaattggactgctgcaaatgtggttacatcagcaagaatgctacttgatcagttcaaatacactcaaaaaagaaagggtctttctttgtcttcgttgtttgacggaggccatttggttgagca

SEQ ID NO: 405917 - DNA, 510 bp, Cannabis indica
acaaacttttaaaagtaaactagatagatcgaactcttactgaactactatatttatgtgtgttcttttacttttttcttttgcatagttgttgtttatttaactttagttttttttttttaattttattccattcgagtattcattaatactaaatgaatagtcactgttattattttggtgttgtgttattttttttttttttttttgttaacaacaatgcacatatatgctcaatactataaagtaaataaatttatgtgtagtaatatcttagtttaaatagtatatatgtactaattatatacatataataaactcacatatatataaatttattaagctaatattacgtgtaatacacgtatacttaattatatttttagttgtataattagattttaatttattatgtgatttagtaaataacatcatcttttattaaaaaaaaatattaaatgtaagtgttatttataaaagaaaatataataatatttaaaatttgttgtt

SEQ ID NO: 405918 - DNA, 1033 bp, Cannabis indica
tttttaaaccattataaattgaatgtagtcataaactcgatgaaattctctataatattttgttcctttaattgaatgtagtcataaactattatattgtatagataataaaatgtacttctataacacatacaagcaaaaagtagaatctcgaaaaaaaataacaacttaaaactaatgtgaaattagtgatataaaattactaatatatatatatatagtctcaataatggttaagtttttgacctccaaagtgatggttctcaagaagatttttggacaaagattttcatctaaaatcataaaattaaaataaaaactttattaaaaaataaataattcagattaaagaaatatattttttccaaaaaaaataaattcaaaaaatttaaaacgaaagttacaatttagttgagataaaaatcataaaattatataaaatccaaaattattgatacaatttcaaattaaacatatatatcacacaaaaaaaatttaaaggaattaaaaaaaaaaattaaagatacaactattttgcaagatgaaaaaaaaaatgaaaaattaaaaactcttactttatatgaaatcaagataagtgacgtacaattcattcaattatttgtcgaatgtcttcctttccttgtgatagactatgtcaagacttggtagtagagaaaaattactacagatatgatatttgattgtggaattatttaatatacctgcaaactatataattatacgtaagtatgagaaaaaattattctatatatgctatattaggaaaaagacaatatgatgataatagtgaagagagaaaataaaaaaaaatgagcagccaaagagaaaagaaataataatattgagaatatgatgataatggtgaagagaaaaaaaaaataacagtgaaagaaaataacaataatattcttaattaaataatattttagaaatatctttatatatatatatgggtatgctcttaatgggtattacccatgtataggtattttattcttgaccattggatcaa

SEQ ID NO: 405919 - DNA, 961 bp, Cannabis indica
tgtttactttccaaagtgttgacaacacaataaacaggatcaagtatgtgaaaagggtttcagatgaattcatacattatgtacacataatcatgaaataaatcatgtgaaccatgcaacattaaatgttatttctgatctatattaataagtaaatctgattatattaaaatgagttttatttagggcataaaacccaacaataaggttggtcggcctaacatgacgttaaaggctaatggaacatctagtaccagaaattgtgtcatcgcatgtatgctcttcggagcttgtccaatagtgaggggtaggcaaatttgccctagaggtgcaacactctggtcggagaaaccatatactggctgaagacaagggattagatctttgagttggagccctatcttctcgtacgatgttttgaataggatatttgttgaggctccattctatcatagcctgggccactgttttgttagctatatgtacttccacgaccaatggatcattatgcgggaagcgaatattgacatcatcttcttcattgaaggttatagtgggttcctttatccgtggcatttttagcttcctttcctctacggccagaaccacttccttttattagtgttgtaaagttcgggcataccttcatgagctttgcccgaatctctagcaatatgtgggccctaatgataacttgtaaatgtccatggtggaggcagtaacaagtcttggttgttgtatgcttgggcgaccctttgatgttggtcggccttgacatactttggcacgtgcgggttgttttttcttaacaagaatttaatctcccgcttcaaattgttgtactcgttagtgtcatggccatagtctccataaaaacaacaaaatttagacatgtcacgcttacttatgtcctttttcatgggagtcaagtttcttatacgggactaccgaactgagtagc

SEQ ID NO: 405920 - DNA, 505 bp, Cannabis indica
tgaggtctctatcttctacactcacagacaaaactaccacagaaacaccagaataaccgaaaaacaataattaaatttgctgagatgaagcagaaacattaaaactattaatattagggctgtcatgatttttctaatgttgtttttgggttattccactattgtttcgcatgtttaacaaatattggttttaaattacacaggttaaaccaaccactgaatatttgtttgaggtaaccagaataaaataatcatggacagtaatagtcttacattccattaaagtggtgaaatctagaagacaaaaaaaaaggatggaagttggctggaaaaagaaacaacataacaaatgcagcaaatgtggggagctagagcacaacaagaaaacatacaagagaagacatcaaaaatgaaaagaaggagaacaactaaaaaacaacagtggaacaagagaggaaaactgaacatatattagagtatatgatactgaagaaaataatttaca

SEQ ID NO: 405921 - DNA, 804 bp, Cannabis indica
gaaagagatccaggttcagatcttggtgatgctctgctacagaatggaatcaagggctagaaatctgaacagaaggagtcattatattccgctgcacccaatgtaaggtttcctaaactttatatgtgtttatttcattgttttagaattcatattaggatgttaatgaaacatacttgttagtaaatctagatcctggtaaaatatttccaacaccttttgtgtaactcacaaaccaccttatttaatccattttacatctaattaaaagtctataatagccatgggtgcatggtatttaattttcaagttcgataattctatggcttgataattctatcaaaagagcactttcctaaaaaaaattctatggcttgataattctcatagctattttcatgagagttctcttagtgtttagagttaggagaaataagcttttggacaaatgtggtatatattgttcaagtcatgatgatccctgctaatctacactcaacgttgtgagtgagtatttttattcttcttcttcttattattatatatactagattaatattatatgcgatgcacgtataattagttatattcttaatttttattatgttcatgtatattttagctgtataatttgtttttgtatgttatattttttctatatgtgtgaataggataaaaaattagtaatagaaatatatatttagatatgtaaaaatggtttaaattaaattgcaatgttaacaaaaaaggcacattttatgttgcatagtcgtatttaataaaaaaggtggtaattcttatccg

SEQ ID NO: 405922 - DNA, 457 bp, Cannabis indica
tgagaaaaaatttgactaaaaaattatttcggatgctaaaacagataggagtgcatcaatatatccattttaagggggtgcattgtagaattttctaaaaatattaattttacattattatttttaggaaaatttgcgacataaatactatatattttcgattttatacacttaaataccacatatttcttttagcagattaaatatcaaatgttagttttcatccatttccgttactattattctgttaaatgttaagtgtgttcactaaagtaacacatgtgatatttttattggtctatcactcaaggggttcgaatcaataatgaagaagagggaaagagaggtggcggctaggttaggtagaaggcactcaggtttttctctgaaaggaataagatgaaccatcttttcctgaagccatcactacctatttatagtatgccacctagggtta

SEQ ID NO: 405923 - DNA, 619 bp, Cannabis indica
cctatctcatctccatctccatctccaccgccaccaccaccaccgctatcatttcctcctcctcctcctccgctgccacctagggcggcgaatgaggcggtaatttgaatttagggaaggaaggagtggaaaagattgatgaattggtggtgagagtgagacgatgaggaaaggagtgatgagagattggattaatggaggaggaagaagtgttgttgtggagagagagtgttgtgtggatgtagtgagagaaggtggctacaaccaccatagctatggcggttgatctttgcttttctctgttttctcttctgtctaaggttgagaagatgagtttgttttggttatttggtttttggtttattggaagttactttggtgggttaactatattaacggtttattcaaccttattttttttataataataataataatagggtaaataccattttggaccctgtgttttgcaaaagttacagagtagaccctgtgttttgttaaatgacaaaatggaccctgtattttctaaaatagtaaaaataagaccctgagcttaatttttgataactttttttttttaatacaatcaacttgaagacaatgcttaatacgaaca

SEQ ID NO: 405924 - DNA, 505 bp, Cannabis indica
gtgattagtttttctaatacatgtagggtaaataatttttaattctattttcgacactataaactctttaaaattttatagaaaaattatatgtgattataaataattacaacttatatgatcataaaaaaatagatgaataaaaaactctcctgaatattaaaataaataagatgtgtatccaaaaactatttttttttaagagtaagtactacattgtttacctagctttaatatttaacatatatagaaatgctaaaatatgaaagttaaaatattgagaaatgtaagtaaatgaccctatttctaactctatagatagttaatgtcacttttttaaaataataaagcaaatatccctttttactttttaatacctaaaataccctttattatataaaatgaattatatgttttatttatttaatagaaattatgaaaaataataaatcaaaacctctttactgaattttgtcaactactttttcattatataaaaagtatt

SEQ ID NO: 405925 - DNA, 503 bp, Cannabis indica
atttggcactctgttttttttttttttaattgtttacacgttgtgtgttcttcattggatgtgcgatacaaggttcggaagaagtcttattattataaagtctctcatcgagagaaagagagcattcgttgttggtttgaactaagagatttcaacactttaatgtctcaaataaaatttattagaagagtgaattacaaaggatattgtgacaatattaagaggaagttgtaaggaccatcagaacccatctattgctttattggtatgatattatccgctttgggcctaagccctcgaggattttttttttgcaccttcccaaaaggcctcattcatagagtccatccttatatacccaagatcttgcccatttctcgccaacatgggactttggttatacattcaacaatccgtccctcaaacaaaggaccattttgcctcccctcagacgattacagatctaaatttgaatcccttcacactactacaaacaaaggcct

SEQ ID NO: 405926 - DNA, 579 bp, Cannabis indica
ggtgtagggcattcttggaatttgaccaagaaaaatcctacacttacctttatatttattctaagtcaatattacttagttgatcttaaatcatcaattcgatctgaatcctaacataattaagctttaagctaattatttgagttctttgacttgttcgttataccagctcaccctacagactaacccatacttacattttgagaactcgtagtataattaagtgagagtgttaatcatagatataaacatctatatcttctatattaggaatgaaacaatagttcctttgagcttgattaaaggcgttaaatgaagagactacattttagtaattatattagtttattgaaatccatttataaggaataactaacgtggcatttggttgggagaaaataggaataggaatagaacaatatcaaatttaaaattcaataaaaaaattgaataaaaaaactattaatttttcttttctcatcttgcattgggatggtctttcttcctttgcaaaatagaatagtcattccacaaaatgatggaaagtaattcttttagaatcacattccaatactttaa

SEQ ID NO: 405927 - DNA, 513 bp, Cannabis indica
tggagctaagccaatttgatctatactacattcctcgcacttcaataaaatggcaggcactagcagacttcatcacagagtgccatgaagcagaggctaccgctagcatacccacaccgcaagtcccggcatggaaagtatttgtggatggcgcctccaatgagaatgggtccagtccaggcagccctacagttcaaattctcggcttctaacaatgaggccgaatatgaagccctgatagcaggactaagattggcaaagaccgtggggggcaaaagggtagaagtctacagcgattctcaactggtagtaaaccaggtgttgggagaatatcagacgcgcggagaaaaaatggctgcatatgtggcaatagttcgggaactacttcacgagttcacggactataaagtagagagaatccccagcgaaaagaacgctcacgtagactttttggataagttagctttagacagtgaaattgagaaactggggtggtacctgtggaatgcctgg

SEQ ID NO: 405928 - DNA, 751 bp, Cannabis indica
aaaataaaaagcactaactagtgtattatcaacttattatttaatatatgatagcatatgtttttttactgtattagataagttatccgaaatcaaaacaatcttttagtttattttatatttagttaataaaattatgtaacttttttacctattcgggttagctaactttcaaactatagtttcattttcaagttatataatgttgttgatcaagatacatttacgttacttttttatatatagcaacttttacattactttcaaatataattaataaagctacaataaaataataaaaaaaattaccaaatagtttagtataaaaatataagtattagttttattcttttttttttcttcgtagtataatcattgcatgatatttaagatatcacttggtatttacaaaaaaaaaaaaaagatatcacttggtttttttgtaagttatttttagaaatttattaaaaataactctataaaataaacttatataaaatacataccgtatagtaacttttaatatgaattaacaaataatttttagtaatttataaaaatagttgacttttatattttgtttaatttatattcgttatttccttttgggtaaataccattttggatcctctattttacaaaagttaccaattggaccccgtattttgttaaatgacaaaatggaccctgtattttctaaaatagtacaaataagaccctgaactgattttttgtcaaaataaagtttaat

SEQ ID NO: 405929 - DNA, 617 bp, Cannabis indica
ttaaaaaaaaaaaatacaaaaagcaatgtgcactatatatcttcatgtacaatctatgaatactaatgtggcaaaaattattatttttttaggcaaaaacccaactattaaacattaagagcaataaatactctacaaagtggcgaaaattattgtgtagttaaaactaagcaatcaatatttatagagtaaaaattagatagtaagtgtgattacgagagaaaataatataatataatagttaatatttaaattaaaaaaatttaaaattttttacatgaaaaatacaaaatttaacttttattacattttaactttcataataaagtatgataacttttatacttttttttttattattttatttactaaaatatcacttgcacacataattctcttaatgttagtatcattgttcatccgtcacactcaaccaacttatctttccaatttctgcatattattttaatttattcttctcctttcattttttttatttttttattttcagctacatatttaaactttcttaaatgatttaaagaagaagtatctccaaaaaaattgaaaccccgcgatcttcaactgctattgaagaatcaacctatatttttttc

SEQ ID NO: 405930 - DNA, 78 bp, Cannabis indica
  modified_base (70)..(70): a, c, t, g, unknown or other
ctattctgtttacattttaagatgtcgtctgtccagctcataattttgcccacgtggcaatgacaagtcnctaaaaaa

SEQ ID NO: 405931 - DNA, 688 bp, Cannabis indica
ctcaaatatgcaaagttcacttctaagttatcacgatttcatcattttatgcataatactgcgcactatagaaaacacatcaaatttatacaaagtttaagaaataaatgctaatttaactaataattgactcggaatgagtgtacaaatgtgcactcatcacatccccaaacttaaactattgcttgtccttaaggaatgaaaaagaatgaaactaaaaacttgaaaaaaactaacaagtcaattattggatgaaaaatcaagagacttagaccaaatgtaatttatctcaaaatacaaactctctttccattattcaatatgcacttcaaacaaaagactagaatttcaactcatttaaacataacttccaatattttatatttgataaaaatgtgtatatgtcaattttactaactctatatgcatgtaattcatgttcataaagactacccttaccacaaaatattcaagataaccataggcttgtataacaaatttatctccactaatataaaccaaagtcatgtagatcaaaaggactttataggcatgtaacgtttgacttaggtaaatggtagataagaatgtcatttaggctagttttacaccataaacttataaatctaatcaaaaatacaaaaccttcatcataaatttccttattctcccgataatattttttttt

SEQ ID NO: 405932 - DNA, 436 bp, Cannabis indica
caatacttgggatataaataaagcttttactcagttggttctttaacacctctgttctagcttgagattgatttcagatactctctgtttcatctccgttctccttgtgttacagtcggccctatggctggccagcctctggacaacaccatggccgccaagcctgatccctacatgtatctggctgcccaagaggaggcctggcaggattctctatgcaattctacacgtggactggatgattaggctgcaaattggaacctaaaagcctaataaaatagctaaataatatctatgttcaagggcattttgtgttggaatttattttaccaagatctagagttactaacaagtatgttcttaacattttaatatgaatttctaaaatgatgaaaataaacacataaaaggtgtgagaaacctgttgggttttatg

SEQ ID NO: 405933 - DNA, 827 bp, Cannabis indica
cttcaacattcaatttaaacatttcttctgtagcataccctttccccacaaaagtcccattcttagttaaagtaaataaatcagcccctatagtctgtgtgaaccctgctttgttgaggagatagcccgagaccagattctttctgatctctggagtatgcatgacttctttgagaatcgtggttttttcagaggtaaactttaattctacatcactagtactagcaacaatagtagtgtgagagtcgcctaacaacactttcttatcctcggttgcagctgtgtatgttttgaacatcgcacgatcaaagcagacatggcgagaagcaccagtgtctacccaccacccttttgatccaccaatcaggttaatctctgaaatcatagctgtataacgcaactcttcagttaggttagcctgtggagcataactagacctgtttcgacacttgcgtgccatatgacccggtttgttacaaagaaagcacaaaaatggtgctgggtcattctcattagggggttgctgttgtttgttttggttccttggaaaccaattttgattattaatccgagaattattgttacggtttggaacatgcttgcgattctgattcttgaagtttttcccagtgggtttcaacattgcactggatttcttagtgttgttgtttgacacaacaagcacctcttcttcttggtcctgtttacgagcctcctcctcaatgcgaaggcgagtgatcaaaactttccaaaagaaaaattctttttgtttgtgcctgagaatatttttaaaaatctttcaaccaggaggcaatttgtcaattata

SEQ ID NO: 405934 - DNA, 669 bp, Cannabis indica
acttcctgaagttttctggtcatttcacaaaacagagaaaacagtaattggacagactccatttgccatgacatatggatattaagctatgctgcccgtagaactcaaaccgctgtcccacagaagattaacatatagccaagaggtcaatcatgtactccttgcagaatcacttgatgaagttgaagaaaagagaaccgcagccaacttaaaactgatagcccatcagcaaaaagtagcttggtattttaacaaacaagtgaaaggacgaaatttatttatgggagatatggtcctaagaagagtatttttgaacacaaaagacagtacgacaggtgtgctcagaccaaattgggaaggactatatcaagtggtcaaagttttagaattaggggcatacgaattgggtaagtatgataaaaagatgcaactcgttctggtaccaaggtattggaacggggagcatttaagaaaatactacaaataaaagtactaggtcggatgaccatatcaagtacgaaataaaagaacatttgctcttaagtgaatggccttctgggtggaccacgcccaaagttacagataaaattttcaagtattcaagtcggatgaccatctttgaaagtacaatttttattttttgcaattttttttgttcatgttaagcta

SEQ ID NO: 405935 - DNA, 920 bp, Cannabis indica
gggaagggtaaatccccagtcaacaaggttgaatctgatgatgcgtttgaggatatcactagaaaaagggttattgaggtgtgtacttttttatttttgttttagtgtttattttatgcctgagtgtaggtacgggctcacctgattaggtaatgtaattatgtgatatgtgggtagcaggttatggcacgagcttacctgattaggtaatgcaatgcaggattatcagactaaagcatcgacttgcttgattaagcaatgtgatgtaacaaagatggttactatatgaggtaacatatatataatttatattattaaatgaatataatttctattattggtataatggtttgtattaacaaatatttgaatattgatgcttatttatggcagatgccagtagtgatttggatttcatcttatgaacaatgtgtgatagtttgattctgattgtgtataaatgataatattcgaatagtaaactaaatgattattattattgcttttcttgctgagtccttgtgactcacgggtgctatgtggtgcagataagggcaaggaaaagttagagttgtcatgaggtgactatcttctccaacaatgtacatattgacctcaccaacttgcgtgccgaattgtcaggaattattttgggctggttgtatctattgtgtattttgattttgtgtttaaatagttgtcgtatatatttttttcgtaaaactttttataacagggattcccggaacacattttttatgttgttataatgtccgtttttagtattttattataatcaagttttcaatagagaaatttgaatttttatgcatacattagggggtaatttttttccctaaacctaaaatagggggtactggtaaaatgggccaacatttacttaattcccacattacccc

SEQ ID NO: 405936 - DNA, 771 bp, Cannabis indica
atttaaaagataatctaaataattttaaattgctaaccataaatttagtttattaaaatttgttattttcaaaatatattttattttattaatttaaaatataagattagataaatgtcaattatttggcattttatcatattagaaatttattttattaaatttaaattttgttaaagtaacatgaaatttttgaatagttggttgtattgtttgaattgacattttaggattttcgtaatcctaaaattttcaaaaagaatgaatgtttttttttttttagaataaaatgataatatctaatcatcaatatcttattttcaaatttttaaattaagatattgtagtatattatcttattaattatttaaataaaccagatgttttaaaaactagttggatattggaatttgaattttgaattaagatattttaggaatttattagatttaatattataaatattttctaaccacctaatttaaattcaaattaagatatttttaaatatattattttaaatagaaatatgttcaccaattttccagagcttgttacttgtttatatatatttaattgttttaaattcaattttttttaacaaacttatcatttatttgaattaagttgctatgattaacttattgatatgtctaatgatctaaattaattatagtccaattgaaaatggatcaaataaataatttgtaacaggtaattttgtaatttctttcatctgtgataaacgtagtagcatgatagggcccatcc

SEQ ID NO: 405937 - DNA, 697 bp, Cannabis indica
tgcactatcgagtccccaagatgtaagtatgggcttatcctacgatatgctggtaaccaacaagtcaaaaactcgtgcaatacatttaagctagagcttaaccatctcaagattgagatcaaatgatctatgatcacctaagtgatattgacttagaaaagatataatagtaagtttataatatcttttccactattaatatcagtccaggctgatgtatagccaatacatctgatgctagttaactttacaaataccctagaaaagacattctacttatccaagtataagcaaaccccatccctgattatcacgttagtgtaaatattgttcattgataaattatgggactaaataatttgaagcatataatcacaattacttttccattgtgatggatcactttaattgtgaataactatatgatttaattgaacttatatattaaacatataatcatgtaacaaacatatgaacaaagcatatgacaagttcaagatatgatttctgatctttattgaaagtaaataaattagattttatttagcgcataaaatcccaactgtttaccgagatttttggaaactaaataaatagagcttcagaaataaataaatcattaaataatagacaagtgatttttatgtgtttggacattaataatccctagtccacgagtcaattgtattggcccttt

SEQ ID NO: 405938 - DNA, 795 bp, Cannabis indica
atcactttgtatatttttaatttcctcatatgaatagttcaagtgcttttatcaagacgttttaatgtctcgtttagcaccttcgtagctcaagcggactgttaacattcaattttatgcacgagttatgagttatatctcatttataacttttgattttccactcccgtcagataggtttttaatcaaaaattatacttgtttgatccctttttcatcaaaaaggtttaatcgagatgttataacaattcgacccctctcttgtcaaaaaggtttggtcaggaagttataacagttcgactcatctctcgtcaaagaggtttagtcgagaacctttacatttcaaaaaaatatatttttgaaatggtgggtttacatcataccatgtatttctagatgaattccggttaatcatacataaatgtcccttaagtaatttttaaaagtaaaaccttataattacttaatataaatgattctctttattcataactgaaatttaaattttacatcagtaatgcaagttacatcatttatgggtagtaaggtcgcaattgtttcacattccaatagttttttatttagcgagtcgttgagtcgagccagtttgtaaactccaattccaactactgcttcgatgacatatggaccctcccagttccgggttgaacactcctacagatccatctctcgtatttgtaaatactcgccttatcaccaagtctccaacattgaatagtcttttcttgactcttttgttgagtatcttgtaactcagtgttgatacgttgcgtt

SEQ ID NO: 405939 - DNA, 700 bp, Cannabis indica
gagagattgagagaaagagagagaacaaaagaacaaagttagatgatataggaatattttgaacagttaagaaagtattagtattatttgataataatgcaaaattaattgatattttgatcgttgaatccacgtttaaacaaaaaaagttaaatttctcattattcaatcatgtaatacgatacaagcaaaacaaaacacctttagtattagtaagaggtagtactgtaaatacggattgagtttttttgacatgacacgaaattagtacgagtttgaaaggcacgagcacaattagacatgaaaaaatacagatttagacacgaagcgacatgatgctacaaattagcatgatacgatacgaaaaatatgtccttaaacacgacacgatacgagaagcacgaaatgcatgacatataagtacaaatagactaattcgaaaaacacgacacacgaagtgatatattaaaaaccttataatttattaatagtaataataataagatatgaatttatcaattataaataagttaaaataagaataatttttaatttttggcagtaataatatttaagttatatttttggaactctgtaggtacctaactgttaaatattatgtcatccacgtgtcatttttttattgttatattagaaaaataaaaatttaacgatttgaaccaattaagaattgccacgt

SEQ ID NO: 405940 - DNA, 561 bp, Cannabis indica
atcatgtggccaacgttggattttgatggcccccttcccccttggctacgcgctcatggtaatgtgcgccacatgcacatcctatcattacccacatcttcatatcatcatcagctcatggattttatttaaactcccccttttgggcctctggtacagaaagctacccattcaaaatgtaatattttctttttattctttcaaaaaaaatgtaatatttttaacaagtagtccctctttagcttaccctatttctattgggaaatgagtaatttgcggcaaaactctctcaactatcaatttacttgcaaaaaaccatctaacctcatattttggtaagaaaacccttcaaagtactgttccgtttacatttgcaaggtgtcgtctgtccagcctcgttaagtcctaattttgtccacgtggcaatgacaggtcactaaaaaattatcctatgtggctatattttacaaaataaaaataaaaattttaagaataatttacggcaaaaccctccaactatcaatttacttgcaaaaaaccatctaaaaaactttaaggttg

SEQ ID NO: 405941 - DNA, 539 bp, Cannabis indica
ttttttttttttttcaatttttgattgattttggaaaaactaaggcttgatttggagtgtggtggtgcttgaagcttgaggtagttgcttcacctttttaattctgaatttagatgttgaatattgtgttgatcttttgtgatcatgatgtgcctaggtttttaaatgcatgttggcatgaattgatgtaaatataagtgatttatttgttgattgagcttgtaggtttatgagatatgcatttaaattattttgtgcggttttaaggttgaaattgtggtttgaaattttgaatttgaagcttataattttctgggttaatattctggaattttggttcacaattggggttttgatgcttgagttttcaagctttgagtttagtgtaattttggtatggttgatttggacttgtgatttctcgttcttatcttgatattgagctttgcttggcctagaattgttgttaatactagttatgagttgttatggatttgaattgagagtatgcatgctttgttgtggcttggtttggtttt

SEQ ID NO: 405942 - DNA, 757 bp, Cannabis indica
atatatatatatatatatatatatatattgccaaaaaaaaaaagaagaagaagaagatggtgccctaatttctcacgtacaagaaaatacagcttctataaattccaaatatataatgagtgagtgtatgttgtataatacaatgcctaaaaattatattattgtataattaatgagagattaataatgtaatctaaaacacatgattacattgattaattatttgttattaatcatagtactcctaaaaagtactatagaatgttaatgatcatagaacgtgttggagttaagtatgcgactttgtattagattttaggttttgggattagttgatgcatgagagactccaattattgtctctctctataaatatatatattttttgtaaaaaaggacattttataaaataaagagttagacatctcagtcattacaaatgatagaaacaggtatggattgtacatccaccttttcggaaatagagttaaccaaagtaccgccacatatatatatatatatattaatatacataatatatctatgtatatttatcatctcatctattagatatactaggtgattgttacgtgccaagccacgtagtgttaattttatttaatattttagttttttatttgaattaataattaaaatagtataattatttgaacgatttgttttataaaaataaaaataatgtgtcagtatatttagtaagtaaaacatagttgtgttataataatgtatgttatta

SEQ ID NO: 405943 - DNA, 505 bp, Cannabis indica
tttctaacaagaaaattctattttaaagatattaaaaatttactggagaaacatttatatttgtcactaacaatttcacacacatttcacatcaaaaataatttcacacaaataattatatttctcactctcatctttacacagtatgttttgtaaattattagtagcacaaaatattaaaataaaaagttctaagatcatctccaatagtaaaattcatatttagtgttaaatctacactaaaaatatattctttattattatattattttattatataataagaatattttaatattaaatatttatcaaatctaataaattatattaataaatattaaaatatattatttaatattaaaaaaaatatatatactgtggtctacagtgtccaccattattagtggaacactatagagctccatgaaaataggttggcttttgcagtgtggttggagcatttagaggaaaaaataacagtatatataggttttttgccgtttca

SEQ ID NO: 405944 - DNA, 899 bp, Cannabis indica
ctccttcctatcgaagatttaaactggttgtccctcatagtacaaatctgactgtaattctagggattcataactcaagatatgagttgggtcagacacatattttctcaacattaaaatatagaataaattatgtacaaccaataatgatggtggtaaggctagccgatacgctacctgtctgactttctcgagtatctcaaatggcccaataaatctggggcttgacttgccccgtttcccaaagcgctttgcacccttcattggtgagactcgtaggaaaacatgttctcccacctgaaactctatgtctatgcgcttgggatcagaataacttttatgcctgctctgtgaagaaagcatctgagccttgatcttgtttattgcctcattggtcctttggactaactcaggacccaaatatttcctttctccggtcttgtcccaattaattggggaatgacaattcctaccatacaacattttgtagggagctatccctattgtactctgatagttgttggtgtaggagaattctatcaaagaaaagtatttactccatgaaccctcaaagtccatgagacaagcttgcaataaatcttctagtatctgtattgctctcttggactatccaccagtccgaggatgaaaagttgccttgaaattcagctttatacctatagctctctgaagacttcccaaaaactccagtgtaaacttggatccctaccctaaataaatgaattttggattttccatggagcgaaattatcgcttttggcatgagaaaaagggtttctaatgttgtggttcagaaacagagagagattgagaaattaaaagcataaatcaaatcccttaaacataagaaaaatcatgttgaacaagagtagaatgag

SEQ ID NO: 405945 - DNA, 652 bp, Cannabis indica
gacttaacaaaagtaaaaaataattaaaaaataacgagatattaatattacaataattataaatcaactataaataaactatataacaacaaaaaatgatcaaaaaaataatttcatgataactataataagcaattataaataaactataaaataatcaaaaaaatatttattatttttactgtatttttgtaaataaattttttctttgttaatgtacttttgtaagtttaaacaaatttttagtctattatgtaattgtaattaggatgaaattgagtgtagttggtatataaatatttaaatataaagtgattgcggtataaagtttaattcttagttgtaaataaatatttacgtttaacttttagcggcaataatatataaattatatttttggaactgcgtaagtacttgccaattaaatgtcatatcattattcacaagttatttaattcttggtatatttaaactagttttttttaaaaaaaaaagtttaatagcatggaccaattaagaattactacgtgccaatttacttaacatttaatagacagttcactatagaagtttcagtaaaatataacttaagtattattactcacaaaattaagcttatgtatttatttataattaagagttaaatttaaat

SEQ ID NO: 405946 - DNA, 954 bp, Cannabis indica
agtttagttcatgttattaagttttataagttataattaactaaggtagtgtttagttgattggaatggatctgggaatggaatgatttttcttaaagtgcatccattcatttgttttgttttcatttataattgataagtttatataaatgtgtatataattatttgtgttatgtcacctaatttcttacaactagattgtaattaactagttatttgtgttatgtacttttccttcaatatttatgttttttagtaaaatttatcctaattctatcaaaattttggtagcataacggctgtaattggacgttcccaaaatttttaaaaatgcctaaagtaacaaacaaaaaaaatcaaacaatacagaacaaataaaataacattaacaatacaaaatttatccacccattcgtagtacatgtattcgcaggatctacttcactacggatgaatatttaagatattcaaactccactaagcatgtattgataattaattataataacaaaaagttagtgaatgtattatctatagcaagttaaaatctgataaatagcgaaatatgttgaacctcaaaattaattcacaacctacaatataataaaatacaacgaatttagaattttaattatttaattacttactagttattaaaaaatgtaacaagttactagttactaaattctatatattaatttttgaaaaaaaataacatatacatatataatcaattatatatcacactaacacaattttaaaaactttatttctaaactattaaatccctactacctcattctcattcacaataaatatatatatatatacaatacaattacacaatttacacaaataatatatacacaatatatatacacacaatatatataaacacatatttaataaaatacaaaatatatacatatatattatactagtaaaaaactacgt

SEQ ID NO: 405947 - DNA, 661 bp, Cannabis indica
gattttgttatctttcatttatgcgaatgtctttattaactttataatataatattctgatttattagtcgaatgtattactaatacattgtttgtttgtcacagttggtgtacttgactcacgtggagtggaactttggatatgtcgaccgaacagtgctccccgttgatttttggggtagtaaacaatgtaagtccgcttacaaatttgtgaaagacaatgggggtcccaacagcgacaaggtacatcgaattttggttataatgtggtaatgtgatttcagttgatattaattattttgggattgaaaaattaaatttgtttaatttgttatgtttaacagataacgctcacttcgaatcccgtaatactgcccaactactactccgactcggaaggaagaaagagcagtgaccactttgtcagctctatcaacgagttgaaggagtacttctccaatgagttaaagtctcagttgagatcattttctttgaaatttatggacaaaggagaaggtgtaggtggtattgaccgagagttggaggaggatgctgctggggaagtggggaagaaggcggagtgcagccaggccgtggaggagtccccgttgaagtcccctgtccgttcgaagactaatgttgttggtcaatccgaggaaaa

SEQ ID NO: 405948 - DNA, 894 bp, Cannabis indica
aagtgggaaaaataatactcccttggcatcatttccccaccgagtggaaggcatccaacctattgagacgttcatcgaaccctataggcctaaggctggtatactcacgaacggaaggaacataatgtatcgttaaaggggacttaccggaacccgaagtgctggcatcaggagcccccgtattcggtactgggaccacaggctttggtctgggggtccttcgctttagcggagccccaatacgaagggccctttcggcagtcacctgggccttaatgtaagccagctcttgttccctcttgaagaggtacttctggtacttatcttccgccgtggcgatgatgccgtcccggaataccttctctgcggccggagtcctcacattcgggcaaatgactttggaaagattatagtcatccaccgactgatgtcccaggatcagcttggccttccgacagtgctccgtcgtaaccaactccccgacatcaagggccttcttgtcgtaagtggcgaaggtcttagcccgttgaagaaaaatttgagtaggtttggtccgcatgtaaggggggatcctaacccactccgtgagaagctctggatgatccacgacctgaaaactggaggagaagaagaagcggtgacggtattccttcacgtgcttctgataattgaaagggaccgggccctcattcaaaggatgggcccggagaccgtaaaagtcgtccttaagtttatctccctttttagggatagaaacgagttcataaaaatataaaatctctgccggactgggcgagccccagctccgggcagagtaaaaaataaacaagtctgaaagttggcaataagcttgaggaataagtggtatggcgcaaggccgacaaatacaagaaa

SEQ ID NO: 405949 - DNA, 1082 bp, Cannabis indica
actttaaactttaccaacttcccgtattcatcataaaaatctgagatatccttccatggtcctcgtggagacaatctaaccccctgttttgtatttcaaaaattgtctgctttgccatatcgacttttaatgactttgtgccacagagagttcgattctagtgggtatctccatagccatttcataagcaaacctttattcctcatttctagtcttccgattgctaagccaccctccgctctaggtttacacacctcattccaagccaccaaatgatccccgcctgctgagtctcctccttcccaaaagaagtctctcatcattttttctagttcctttaagaccacctttggagctttgaataaggacagatagtaaattggaagtgaagagaggacagactgaatgagggtcagcctacctcctctagaaaggaaagagcatttccatccatccattcttttagcgcatttatccaaaacaggctcccaaaaggacttcttcctcggagagccgccaagtggcattcccaaataaatcataggccacttgcccacctcacacccaattaggtccgcactatgggccactgcttcctcgttcatacagattcctaacaattgacttttattcaagtttacttttagtcccgagataccacagaacgcttcaacaatcttgatcagctttcgaagagaaacctcatctttaacaaagaaaagagtgtcatccgcaaactgtaaatgactaagccgaatatggtctttgcctatctggaaccccgccaaagattctgtttctattgccctatccaccattctaccaaggacatccgctatcaatgtaaaaagaaacggtgatagggggtctccttgacgtagacccctagaaccattgaacttgcctcttaccctaccattaatgaatatagagaatgaagttgatgagacacatcctcggatccattttcgccaccgctccccaaaaccttttttcctcaagaccatgtctaagaaaccccattcaacacgatcatatgctttctcaaaatcgatcttgagcacgaacccttttttaccacg

SEQ ID NO: 405950 - DNA, 583 bp, Cannabis indica
ctcttttgatgttttcaatcaataactctaaataaaatgcaactttatcggattactgtatacacagttactactagagtgtgatttttgaaatttatgtactctgtcttaacatactagtggttgtgaatgggggtgtgtaaggtaaggtgttcttgaaaatatgatttggtttttgtaaacatcttactggtactggtactgcttcgattggaggttttcattttcatgtttaacttttgaatttgcgatattaaacattagagattatggtgcaaacattttaaaatctcatcagcccctctttctctatcgcattctctctcccacttcatccctctttgccgcccagcgatttgacgacgaaatagacgacagcatcttctcccctactcgctgacgacgacggccatctcttccctaagtcaccgacggcatcttcaccagcgacggaagctacacagctcctccctcctcaacgacgacacatcttctccctcacaaacgacaacaactcaggtttttaacttctcttatttttcatttttcatagttaaaacttaataataattctttctaagct

SEQ ID NO: 405951 - DNA, 509 bp, Cannabis indica
aaagtgattgcatacatgtctcactactcttgtttcattatacgcaatttttccaccatgtaaagcaacacacctgagagagtcatctatctttccaaccatatgaataaaaccattagcattagtactttcattaccatagatggaaactcttcgtacctttgtttttattggcacttcccctttagtattcctccaatcaataaaatgtataaagttttcatcttgagctttagacgcacacaaatctcgcatgagatcatgaatgcaaaatgattttattcttcttcctgttgaactcatttctttgacctgaatcatgctcctctccaccaactcacacaaccaatcatatgccacatcctccaaagtttccacataacctcttcttcgtgatacaaaaccttctgctatgagtagatgacataactcttttgctcttatcgggacatcttcagcgtaacgagccaagtacaaaaaacaaggcttcaagtgagatggtaactcac

SEQ ID NO: 405952 - DNA, 352 bp, Cannabis indica
atatatatctctctctctctctcttcctttttgtttattttactaaaggaacataataactttgaatttcataattttggtatatttatctataatttttgtcgtcaatatattttatattagatatatattcccgaagggaaaggaataattacgtacctgttagttttttaaatttgttaacgtttctgcttttataattagcgaactccttttctctaattttaaattaatttcattaaaatatagatgtatatgcaatttattaaacctctcacaagataattaggtcatttaattagctttcttgttagaattacattacatgcatgaatatatttataaatattta

SEQ ID NO: 405953 - DNA, 553 bp, Cannabis indica
atcaaagcaccagtacctatcattcctgctgaagccattcccaaacatcccccacaaactgatagcactccagcttccacatccgaaaccagaactactggttctcacaaacaaactgccatcacagtagctccaacacctccaacaactaccaaaaccggcagaattttgcataaacctaaacatctcaatgactatgtttgtcatgcttcatctacatcacatccaattgagcctttcctctcatatatcaagttacatcctcaattttgagcaactgtacttgcagcctactctgaaattgaacctaaaagctatgtggaagtaactcaatttagacattggcttcttgccatggataaagaaacaaccgccttgaaaaaaacaacacttgggtcattaccaagctaccacccggacataaagccgttgattgcaaatgggtatataaagttaaatataacgaaagtggggctgttgaaagatttaaagctcgtctagtggccaaaagctacactcaaagacatggaattgactattcccaaacctatgc

SEQ ID NO: 405954 - DNA, 1037 bp, Cannabis indica
taaataaaaaataaatagatttaaaaactaaataaaatttagaaaaaactttgaaaaaaaatagaaaaatttagaaatgaaaactcatatataattaccataggcatcaccatagttaacaaaagaattatatatatatttttacaaaaaaaaaaaaaattatatatatactaggagacgttaccgcgcttttgcgacggttttttataaccttttaaaaaattgtaattttagataattttttatattttaatagtaaaattaatatacttttttaagatatttctcaatttttttttaaaggaattcaaaaaaatacaagaaaataaattatggatataaaacttataccacaaagtatggtaactttatagatctaagaatgaatttcgccgaaaaaattatcagagcagtcatcgccacttaagaagttattagagttgccatcgtccctagaaaagtcacggagtactgtcgtcgctaaaaaagtcactggagttgtcatcgccgtcgaaaaatttgtcggaattgttcttgccattggaaaagttatcagagtaaatgtcgtcatcggagttagatgtcagagtcgtcatcagagttggatgttggtaatctgataccaaaaatatcagttacgtttataagctagttaaaaatctaacttaaagaaactgttattgtaaaacacccaaaataataactaattatacagaaaacacttctacaaaagttagaatttgcgacagtcctaaaaatgttttttttttggaccgtcgttaaaaaaaattaagtaactgtttaaaaccgtatgaaaatatcagtgctttagataaatataagcaaaaatgagtgaatattatgttatatgaaaatcaaaaggtttgttttgtaattgaatttcaatgtcattatcttcaatgttatttgatatataaaaaaaattgtatttgtaattgaattttaatgtcattatcctcaatgttatttgatatatatatatatatatatgtatgctcttaatgggtattacccat

SEQ ID NO: 405955 - DNA, 549 bp, Cannabis indica
cttctctttcatttcctactacattttcttttgttagcacatgagtataaagtaagattatagtaggacttattaattaactttttttgttttccactctgaggtaaaaaaaaattcaaaaatattgtgtaagtgttatagtatgtattgtgttaagtttctacggttgttccacgattgttttttaattattctactgttgttttaattggtctattttgttgtgtttacagttgtcgtataaaaagatagtatttttgtaaaaaaaaaattttacgtaacaataaaattgtaaatttttatctaaaattcagtatttttgtaaaaactctatatacatgatcaccttgtagtgtagattgacccaaaaagagattacaccctataccttttttatattgtcctcttttatttttatcctcttttttaaagtctatcatttttacctattttttaaaacattgtaccaattttacccttgtcacttcaagatactctctatgtgcctctcttatgtgagggttattttgggtacaatacatataaaaa

SEQ ID NO: 405956 - DNA, 579 bp, Cannabis indica
ataagtaaagtgaaatattattttggactttgtgttttacaaaagttaccaattggaccctctattttgttaaatgataaaatagatcttgtattttctaaaatagtactgataggaccctgaactgattttttgtcaaaaataaaacttaataataatccaatttatagatgttatgataaaactagtaatattttttgtatctgttcgtgttatgaaatatcttcaagctagttatgtttaaaacaaaaatcgtcgaaaattgaactcagagttcttatttttaccattttaaaaaaacagtgtcaattttatcaaaaaaatattgcaaagtataataaatgcataaactttctatatatatatacatccatttgccactgcaatcttacaccatcaaaataccctaatagccaaaaagaaattatggcattgaatatgattatctcaccaaaattgttgaatagtttttgttaaggcatcaccactacaagtaccattgccggccaccacaagaagatgttcaaaagagtctagtactacttctaaaacctgcaagtgagtgcattatacatatac

SEQ ID NO: 405957 - DNA, 502 bp, Cannabis indica
aaagttagttagagtattttcattctttctttattactaacgaactctgttatgtcattcctatttcaatataaataacagtaaagccaatcagttctgattaagcattctattcgttcatcctttttcttcttccctttttctctctctctctgctccattactctatttttcaaagttcttacatggtatcaaagctatctcaataatggtgaatgtcgagtggatccacctgagcaagaacgtgctcaacaacaaaaccaaaggaatgcaccacttgctctgccaaacaacaaccgtgctacccataaatctgagactagatcgaactaactacacgatttggagatctcttgctctggtagtcgttcgagcttacgatcttgatggatatgtttgttacgaaaattatgtttattacgcaagtgtacgcaatcaagtagtatctcacgcaagtgaggtcaaaccacagggaattggattaagtactactaaactatac

SEQ ID NO: 405958 - DNA, 643 bp, Cannabis indica
attagcttattatagaaaaaaatcttttctttttctctctattttatactattcataatagtttttttaaaaaaaaataaagaaagaaagaaaaagaggaaattacactcattatgggattttaaaagttgtttacttaaatatggcacttctaagtttgatcaatttatatggtattttttgtttttaggtatttttatggtatttgatatgtcatatatatgtaaattaggtattcaaatctcacatttaatgtttttatttgtttaggcagttttatttgtcattgatgtcggaaaagttaccggagtttactgttggcaccgaaaaaatcactggagtaactgctggtgccggaaaagtcatcgaagttgttgtcgatgtcggaaaagtcgtcggaattggcattatcgccggaaaaattactggaaaaatcacaaagaaattggtttcttgatgaagaaactacttttttggtaatttttctggtgacaatgccaattccgatgactttttcgaactgacagctactccggcaaatttttcggcatcgacagcaaacttcgaaaaaatcatcggaattgacatagttgctggaaaaatcactaagaaactggtttcttgatgaagaaactaatttctt

SEQ ID NO: 405959 - DNA, 582 bp, Cannabis indica
agagagagagagagaaagttggaggatgagctagataagttctatgggtttttgacggatctggtacatgaagtggctcgccattaaatccggcaaagttgaatacattatgtcttgttgttctttggcggtcgaagtgggatctgatggttcgccattaaatccgacaaagaagaaaaaatagaaagagggagaggaagagggaagcggggagctcgagacttgggtccattcggaccgccggagaaagggctgattggcctggtagtggctccacttgagagagaagcaagcttccgccaatctccactccagattataggagcttgtttggctatgttttcagtttttagtttttaaaattgtgtttttaaaagtgagaatagaaaacagttttttgtcattttaaaaatttaatggtgtttggcacaaatttttaaaaactgtttttagatttttttcttacgaaaaaaaaattaatattttagcaccataacatgacattaacccatctgggtctagattcgggtatggtttcggatctaggatccgagtatgtaagcaaaatataaaatataatat

SEQ ID NO: 405960 - DNA, 923 bp, Cannabis indica
gagttgtctttcaactttgattgccatgtccaccaaatcttccaattccacataatggtgtagttcaacggtatttgcaatctctcgattcaatccattcaaaaacctagccattgttgcctcccgatcctcttccacattggctctaatcatacccatctccatctccttgtaatactcatcaacactcttgtagccttgacgaagaccttgcaacttgaggtacaagtctcgataatagtgagataaggctatctcattaccctcttcatagcctcccaagagtcagtatctcgttcttcattcctcctcctgttgatgcacaactcatcccaccaaacaatggaatagtcagtaaaatcaatggcagcaagttttaccttttcgtttcagaatagttgtgacaatcaaacaccaattgcatcttcttctcccactccaggtatgcttcaggatcactcttcccttgaaaagaaggaatttttatatttatatttcccaaataattatctacctggttcctaacttctctatccgaccatacctactatggttaactactggtatcccttcaaactcttcatcaaaaattatcccttccccatctaattcattatcatcccttttgtgaaccctattcctccgttgcctccgctaggttgcctcttgtactctatctaaccttgcatgtatttgttcacactcctctcccctcatcctcctcatctctccaatcaaagcttgaagttgtaaatttggaactgtaggtggtgtagtttcattaccaatattttcttctcgagcttttgacatgattgaattctgcaaaaataagttagagcagataaagagggacctcaccacactccctcacgtgtttcactcaaaaaaaaaataatgtcactcaattcactcgtgttttc

SEQ ID NO: 405961 - DNA, 675 bp, Cannabis indica
tcgagcacttgtcgacgagattgctgtaggaaacgaagacctggatgaagtcgaagaggtcactgttgattcatatgaagcagataggctgaatgttgctgcagagatggctcgttctcaggaaacacaagaggcagagacccacagatctgggagtagtcgaaccaaaagttgggcggaggaggttgaagacgatcggaatgtgagtttggataaccagcaatcgccaggctctgttaaacaaatctgggagacattcacgcaggggaaaactcagagtcgagatcagcgactattgttcactgaaccattaattcgggatggcatcaaaattgcacaagtcgacttggacgaagtgcaagaagaggaaaaaaactggaatacagcagttatttgcaaagtactgggagcaaatccacctgtgacgatttttgaagggttcgtgaagaggatctgggcgcatttgggtgttcttctggtaagtaaactttccatgggactgattatggtaaagtttaatgatgaagcaacccgtgatcaggttgtggaggcaggggttgtgcaattcgatcgaaaaccagtgatagttcgaccctggtcagcggatttgaatgcaatgaacctggtgtgcactgttccattgtggattagacttcacgatttggggcttcaata

SEQ ID NO: 405962 - DNA, 1125 bp, Cannabis indica
ggtgcttgcttacggaaccttttatacaggggttccattcggttcactagagctacaggtcctgcctgtacagcaagggcatgagctattagtatttctggagcagggattgcaggagcaccctgctatctcaaacgccagatctcttcatcttgttcattaattctggcttgcatttctgcaaacctattctcccaatcttgggcagcttgggcagcctgtggaggcacaaatatttaggggaatctgaactcccttaccaccactggatccaaccaagttgctctggctcctagtgtttcgcctggcgtccatactataagaacagcatgcgtaaccaagagctagtctggtcagatcgtgatcaagtaaaacttactaattgccgcttatttggaaattaaaaacatgcacctattctactatcatgctactaacatgcttcctgacataaattatactattaattaaactactaaagcaataaaagcttactgagccatgaaacgagctgattgctgatgatgattgtacatgttgtgacgatcttcgaaagacaacctaggagctctcataccaaattgtaacaccctaactactttaggcatgttagcgtgattttgaacgtactgtgcagcttgttactaatcaacgagattatcaaaaagcgtgattaattaaaattttacttataaaattccaagatcccatttacagaatacatttaaaaaagtttaatattcatatacataaacttgttgcctagcgattacacaacaaaagccctgatgtcccaaagatcatacactccaggcctaaccacaggcctaaccaccccaacatgtacaatcttcatctgctcgctctcacggctgctcaaccttagccttgaccttacctacacatggaaatagcactttgagtcgacaaactcagtaagaaaagcataacataaaacataataatatcccgggttataatcaggcgccatacacccaaccctaaccctatccccatgtcccacacggtactaagtctagaacattcatatgacaatactatcgaccataatgttagcctataatcaatatgccagtcatactctagccatattgatgtgacaac

SEQ ID NO: 405963 - DNA, 790 bp, Cannabis indica
ctttaaggctttttcattacatagtagaagtgatgcacattaaaactaatgctctgtaggagctaactttcgtagaagttatagaacctgctgttctcatcaatctcattctttgaacctctaactacttcaactccatggatcccaagcaagttagtgatctcttccaggatgcggtccaaatcacattctccctcaacccaggtgaagtcgatgaaccacaagaaactaatcaagtcctcatagggaaaatactcaacagatataagctaggcaaggcagccatacaaggctctctgcgtttatcctggagtgccattaagggttggaagtggaaagaaattgaagatgggctcatcaaattcacgtttgctaatagaaatgacgctatgaatgtactggcacggaggccctggttcgtttgtgggtctctcatggtgttaatgccttggccatcttggctaactctctctgaaattagatttgacaaaacaccaatgtgggtaaggattgaaagcatcccaccattttattggaatctatccaaccttcaagagctagcttcaagggcatcaccagttcatgaactgccccaaggcattgaggatgccatcggaatgagcaacctaaaattcagagcgaccatcgaccttaacaaaccagttttctctggttttttccttcggcgacaaagactaaaggatctatggatccaatacaagtacgaaagactaccaaaaatgtgcttcaaatgtggcctcctcactcatgaccaaagcatttgcttcaa

SEQ ID NO: 405964 - DNA, 526 bp, Cannabis indica
tgaattgtgtggtttgtgatcttaaactagagagtcacagccacttgttcttcaagtgcagactttctttgctggctttgtacatgatttttcaatggctgggcatggttggttggtccgaggactatgatagttggagagtttggttgggctgccctaagccgactatggtggacaagattttggtcctcttacttgcggctgtgatctaccatctttggtggaattgaaacacttgtttagtctcttctttttctaattctttaaattgcattgtaaataaaattaaatgtgaagtgaagtatagactcttattgattaaagataggaattgctctaggaaggagaaggacttgattcataatttgatttgtaattaggtggagtggatgtggttgcttctcttgtagaagtgaatttgcttgtatttgttgagtagattaatgaagtattcttcttcttgatcaaaaaaaaattatcaatttttaaatttaaacctcaaaataccatgattaataataattac

SEQ ID NO: 405965 - DNA, 616 bp, Cannabis indica
gtattaatattattaccggcagatttccattttcgtcgctaacaaccatttatagcgaccaattattgccggcggataattaccggcggattccgccggtaataattaataccggcggtctgggcatttaataccggcggatgcttccgccggtaatatacatatctgttgtagtgtattaaatgaaaaatataatgcatttaaaaaaaaaataacaaacattaatgaggacattgttgtcagtaaaattctttgtcgtcattaatattttatataaataaaaaaaaattatcaataacgattttgtaatgtcgttattgatggtggacctattaatgacgacaatttgttgttattaatactggtgtcactgatatctatttttcttgtactctctctctccaatggtcgacgacactcttcccaccgctcctcctgtcagacacatatgtcttcagacatgcttcctttctacctttgaatgtttggttcaaagaaggcttccaccaccaccaccgctgatgacaacaatattgtttttcttggtgttgacatcggcaccgacagttctgttgtagatattggttttttctttctttctttctttttgctattg

SEQ ID NO: 405966 - DNA, 526 bp, Cannabis indica
aatatacataaatatatataagtggaagaagatgaataaacatatattcatgtaatataatacatatatataataagaaaagaatatatatgtaatacactaatttacaactttcaacgttgagtgtagattagtaggaaaagaatcactatgacttgaagaaggtattaaacatttgtccaaaaatttatttctcctatctctaagtactaagagaactctctaggaaataactttgagaattataagccttagggttttctaacaatgtgttttttatagaaaacttgggtcatctcaatatgaacaccttagacctcatggatgttatggactcaaatgtaactcattcacacaccataactcctatagtattaagaatttcaaattaagagtgtaaaatgtattaagatgtgtaacaccttttacactcttaattttggtgataatggtggaggttactcatagtatcaagtaactcccccaaatattacaaaatgatgacaattgtcatatgttacatatt

SEQ ID NO: 405967 - DNA, 522 bp, Cannabis indica
ccgacagtttaaaaccgtcagcaatagtggctactataggccacggtttaaaacctatagccggcggttttaaactgtggtctatagtataggcaaccgttttaaatcgtcagatgcaccacattaatctatctttgctgctctcttcgtgtaaaaattcttataactagattatctcaccacattttggttcaatataatatatatatatttgttacaaatacacaaatatatatattataaatacatgtaaacaaaatagaaagatgatccgagatcccgtgcgcaacaaaaaaatgattgaagctcctccacatgcgcaagaagacgaccggagctcctccacgtgcgcgacgaagaagacgactggatccggtagtggtgggtgaagacgaaggtggtggtgggtttcgtgggtagcgagatagacgagagagatgataatggtggtgggttttgtgagaggcgagattaatgagtgagatgggaggcgtgattaacgagagagatgagggtggcgat

SEQ ID NO: 405968 - DNA, 504 bp, Cannabis indica
cttgcacttccaaaacaaattctctaccaatcttctttgaaaccatcagccatagcaactcatggagaacaacaacagtccgtgtctcaggttgatcaatgttcagagatagctacgaaggatagcagtgaagctcatggagcttcctataggcagagatggctgcaagcttttagagaaaataaaaaagaatatcaggttagaacataaataaagatggtaaatagaaggggtataatgggaataaaaactgaaaaagaaggtataagcgagagaatttaaaactaaaggtaaaaataagagagcctaacttaaaaagggtataagatttaatttcctcaaaccaattctgtatgatagatgtagctttgatgtaaactctttgttgtcttatttagtttagttaaacttagtttctgttttaaactggttttgcaggttcgaaactggtttcacattagggttctgtaatgggtagttgctcaattttatgaaattattgta

SEQ ID NO: 405969 - DNA, 596 bp, Cannabis indica
taatttttaaaattaatttaatttaacataaaaatagacgatagtataaaaattaataaaaatattaaatacattaaaaaaatagagaaagcaaggaataggcaaaaaatactcttataaattgccactataatcttttcttaattcttttcatatgtacatactaggttgatgttatatagcaatgcacatataatttagttttctttttaattaagtttaattaggtgatgttaagtgcaatacatgtatgcttaatttttgttaattaggtaatgtaatttttattaatttttgaaatgaaatttgagatttgatctttgagaattttttttagccattgcggttatatttgtgtgctttttggatgtgatcatatatatacatattttatatgtacaaacaaatttaagtgagatattgtaaatcgttgtgtgtctaattgagcgaaattgtctcttattttaattcaaaacataaactaatgaaattaaaaatatgattaaaatatttatattttacatttaaattatttttttaattatatacatatatacatattttttttttgtattaattcaaagttaaaccaataa

SEQ ID NO: 405970 - DNA, 631 bp, Cannabis indica
ttttatagacttagaatagaaaaatataagtttaaataaaatggcaattttgaaacccacgagcttctactatatagaattcagccatggggtaataaaaagccattttatatctctttttttattccattcaattctaactccaaccctaagaaaatactataaatacctcaatagctctcactattctacacctctctcaatatgagattcacttctcttcacttgcctataagaattttcaaattcctctctctcttttctctctagtctactcgcatatatactcttatatataatgtatacagcttaggatgatcatagaattctagccagataaatgagattttgagagttattatattatagtatatacaaatatttttcatttgttattcttctctagttttttgtgagccacaatattcaaaacttgcccagacatgtcaaggcaacacacaagcagtgtggaagactatgtagcctttcacatcctaaaggagatcgaggttatgttcctgattacactccgcaacagaaacggattaagggtgatagaacataatgaaatgagacatttaattccgctgcaatcactatagggttttcttaaactttatgtgtttaaatt

SEQ ID NO: 405971 - DNA, 501 bp, Cannabis indica
tttatttatttcccaaaggttgtgagcctagcaagttgcagtggcaatttttttattattattattatcaaattcacctaatatggaatataatgtagcatactcggaaatgttgtcatctttcttatattgctttgctacttctaaatataatagtcaaataaatattatacgttcatcaatatttgctctcatcattttattttataaagtataaataataagctaaaaacaagcatacaaaatataattttaaatacatatctataatgaagtactaaaataataataaaatgttatattttaacacttttgaagaaattaattttttaatggtatgctaaatcatttgccaaacttttgatgtagtgttatatttttgtaatttttttttaaaaaaaaaataggtttttttgaggtaaaatggtgacattttattagcaaattgaatcaaccattacaatgtttaaaagatcaaccggagcagtactctcggtaaac

SEQ ID NO: 405972 - DNA, 758 bp, Cannabis indica
gcaagaaatttatgagggcaagtgtcgctttttgcgagacgtggccaggcctgaacccatgattttatcttctattccactcgcaagaccaatgtttttacccacgtcattgttacttttgaactaggtgaccttgagtttgaaatcatgtctcctaagccccgaaaatcaaagaccccttaggaccccaatgttaccttcgaggcagaacttattgagtctaaggttaggtctcttggggcctacattggtggcattctacagtcttgcggcattaagcagtggaaatggtgcgttataaggtctgtggcacctggggaattaagatggtttccttcagaaagaataatacgcgaggagtgtagtggtcccagcacgagtaactcttcgggtgttggagcttggagccttgagcataccaaggctggagcggtccttcccctcagagattactttaaggaatactgcaactacctcggggttgccctgttccagttgaaccccacctcatacaggatcctcgtgagccttaaggttctatatcacatcttaggctaggagtgcgctactccgttggagatagcttgcttttactctgtcaaggaaattcttgcgagaaataacgctgcggggggcttctattatcttggagcctatactggcgaccgtaagctcatagttagtttggccaacaagataattttaaagaggacttcttctagacgacgggtttatctccaataaacactactgccttc

SEQ ID NO: 405973 - DNA, 982 bp, Cannabis indica
ttccaaagttgaccgaggacttcaacgcccccaagtatcgtggataactttccatcctcgattacctacgaaactttggtcgcttccatcatgaatctgctgatgtatgcctgtagtggctcgcctagtcgttgctttacttcaaccaaatctcccaaatgcaatgggagctggtgcgaggaggagaattgcgcatggaattccgaagaaaaagttttccataaactaaactttccgggagccaccttgaaataccattgctgtgcgacttctgacagagggcggggaagattctgcagcacacatccccccgtactccttgagatgggaaagaggatcttctctcccagtatacatcttccatgttggaatattgaacttgtgaggcagtggtaggagattaatctccggtgagaagggagttccgcgagctcggtctaacttaagatcattattatgctgtccagccatgccatgaaacatatttttcaattcgtcaagctgggcctgcacggctgggctgacctgctcgacattctggtcgatttggattacgtcagcgtctttctgagcggggatttgggtacgggatccaggatgcccgatcgttgtagtattctgttcgtctgttccccttcttctgtttagatcgttccttaggtcatgggttgctcccaacctttccaacacagaagagcctggttgccttagcgattgattcgcttggttgacaggtggaatagcgccattagtctggttagaaccgtcaggtatgactcctcctgatgaattaccggacaaggtctgctcgcctaccacttggcccacgagcgaaactcgtaacaggggattgggcgactaaccaatagtagtctgggaagttttcatcgttgggtcctcttccgtttctcccagtggaatgacgttcggcgattgctgacctacagtttcgtaggctctttgtatcagcacggtggcttgc

SEQ ID NO: 405974 - DNA, 753 bp, Cannabis indica
tacaggcggtataattagcttatatcaaagaggacaattagtattataaagttaggatattagtaaaagttcgtacccttattgtcagattaataacgattggatgaaaagtaattatgaaaagaagtaagcatgtgctaatctgatagtagttaccataatttatatggcaataaaatattatgacattgaaatcaaaagaagcataagtttatttgctttatctttttctcacaaaattcactatatagtatatatatttaatatcactgttcaatttttacaatttataataaactagtgattaatcatttagtatatattcaaaggcaaataatattgataattaggtgagtacatgaatgttggtaattttaaggggctgggaataatatgtaaagtcttggtcgttaattgctgtaccccacagcacagagcatatgtgataacattttctgatatttgattctctcatatttcctatcattccattcccattttctatctaacctttttttctgaaacaaactagctagctacgtactgaagtgaagtgaaacatggctgaacttgtgatcggtgcttttctctctgcttcctttgatcttttgctgcaaaagattgcttctccttatgttgagaagctcctcttcaagggagaaaatgaaagttctgttgctgagagacttttcaagttgcagtcaacgttcaatactcttgctgcggttcgctttgaggtggagaacaagagaa

SEQ ID NO: 405975 - DNA, 1132 bp, Cannabis indica
taatgtatatatatgtatggatatatagatgtagtgtatatatatatttagtgtgtatatatatgttacctaaatatatataactatatgtatatatatgtaatttaaatatatatgtatatatatgtacgtatatataaatatatgtatgtatatgtacataaaataaatatatacgtatactagtgtagaattgtattttattatttttatatttttaagccttttttagtaaatatgttttgggtgttgctttacttgttgcttgaaaaaaattcacttcttgttatagttgttgaaggttaatatgtttttataatatgttaataaaaaatagttttaatattatattcaacaaatttatagttttggtgtacttgctcatacaccatagaataaagttgttctaaactttatttgccaagtataccaagttatggatttacgaaaaaatctattagtaaagtttaaatattttatatattcatccataatgaaataagttttgtaaaaataaacaacattcagatggcattcagatgggtggcaaatattattatatttgtaatttttttttttttagattattaaaaatttaagaatgatcaattttaagttgttatgctgttaaattttcggtagcataacattttaggttagaatttaattaaaaaaattaataacttagtaaattagtaacattttagtttagactttaactaaaaacattaaaaaaaattgttaaattggtaatattttagtttagactttaattaaaaaaatgctaattaggattttttttccctcgaactttgacatgtaccaaatcatgccccctgaacttttttggccgttaaaaattcttcctgaactattcagattgttagatttaattcagttaacgagacattaagcgtttgttccatgtacttctaggaagtggaaacttgtttaacccgccagatcgaaatagtgatgccctcccaaataagcctgaaagggaattctctatattcaagcatgttgggtgacccattggtaagaagaccatcatgtctttaccaatgcaagaaacgcttaaggcagagtggtacattctgaacaattctaatgaagtggagaagtatatcac

SEQ ID NO: 405976 - DNA, 738 bp, Cannabis indica
aattcttataacttctgtttaggaatgtaatatgtggatggccgggaacatgatctaaagttatgaaatcttgatttttctaacggatcaaatgttggttccttttatgtgttaattctgaaattaaaaagttgcacacaaatttagattagatctcaattatacatttactagttattcacaattacaaccatgtcgtcatagtggaaagtaattgtgattgtatgtttcgaagttttcagttccatgatttatcagtgcattggatttcaattgacgtgataatcatcaataaaatttacttacacttgtataagtggaatgtcatttctagggcattagcaaaatgtactagtatcggatatatggagtatatgtcaaatttgaccaatattgacagtggaaaagatatcataaacttatcgttatatctttctaagtcaatatcgcttagttgatcttagaatcatgagatggttaggttctaggttaactgtattatttgtgttctttgacttgttcgttaaagttgaccaaatggatctttctaatacttacatcttggaaaaatagtagtaaaattgagtgggagtgctaatcatagatatgaaatctatagcttctataattatatagaagtgaaatgataatttcctttgagcttgacttaatagagataaatggaagagctcttatttcagtaattctattagtttactgaaatatcatttataggaa

SEQ ID NO: 405977 - DNA, 1247 bp, Cannabis indica
tatatatatatatatcatccaataatatttacctaataatattggtaattatcttaattaacacactttgggctcgtttggaacgtagtattaggtcgtattgtattgtattgtattatattgaattggattatatatcatatttttgtataatactatgttaaactttaatttatactaaaatattatatatttaggtgtctataaaagttaataccacatatagttttacataaaaatattacataaaatacaattcaatataatacaatacaatacaatacggcctaatacagcgttccaaacaagccctttgctggaaaaacaattcaagaagagccgttatagaggtcccacatgaaaggatgataaagtcattaattcacaaactgtaatatatagttcatcacttttatttccacttaaaaatttataaatacactttattttaattatttttattttacatctatatatatctttaattatattaaaaatatacctattaaataaaaataaattatatttcaaatattataacaataaaaataaaataaaaattatgtgaaattttattaaaaaaaaaaattatacatgaattaaaaaaattaaaataagtattaaaattaacaaaaaataataatataagaaaaaaagtaaaaaatatattaagattttttaaaaattctttaaagcttaataattttaaaaattgaagtatacttatcattttttagggtagaaataaaattttcctatcttaaaataaatatgtggagttttatttgcacttaagacacgtatttaataatttattttatataaaatatatatcttagatttataataattttttatttttttctttctttttatattcttaaaaaatatatctatcaaataaaaatactttatattttaaatattatgacaaaaaaattaaataaagaattatatgaaatattattagaaaagaaaaataaaattaaaataaatatggaaactaacacataataatgtaaaaaaaaagaaatttaaaaaataaatattaaaaatgactttttaaaattattttaattattctgaaatattacttttgttcctaccaatagcaatgtttccatttttagcatttagagaaattatagttaaaaaaatttatataactgtgtacattatagtaataagggtaaatattattttggactttgttttgcaaaagttactaattggaccctgtgttttgt

SEQ ID NO: 405978 - DNA, 1603 bp, Cannabis indica
ttcttggtcataaggtactttatcgcagaatgatccgtacaaactatcactttattcccaaatagatatggccgaaacttgtcacacgcaaacgcaattgctagcatttctttttccgtagttgcatagttcagccgagcatcatttaggctactagcatagtagatggtatgaaacacctgtcaactctttcacccaagacaactccaatggcgtagtcacttacatcacacatcaattcgaatggcgactcccaattcgtatgtgtcgatattaatttctccttaagagcttggaaggccttcaaggatgcctttccaaactcaaaaggtacccggttaacaagcaaattggacaatggcttggagatctttgagaaatccttaataaatctttggtaaacttctgcatggcctaaaaaactccttactccttttacagaaactggaggggataaattttcaattttagatacctcggccctatccacctcgatgcttgcctttgagatcttgtgtcccaacacaattccctctgtcaccataaaatggcacttctcccaattaagtaccaagtttgactcctcacatctgattagtactttctccaagttcctcaaacaattgtcaaatgatgaaccaaaacctgagaaatcatccataaagatctctatacaagtgtcaatcaagtctgaaatgatcgccatcatgcacctctgaaattgttgctggagcgttacatagtccaaatggcattctcctgaaagcgaaagtgccacatgggcatgtaaaatttgtcttttcttggtctttcggtgctatggctatttgatggtaaccagaatagccatctagaaaatagtagtattcttgtccagccaaccggtctagcatctggtcaatgaatggaaaaggaaaatggtcttttctggttgccttattaagcttcctgtagtcaatgtagattcaccaaccagtaacagttcttgtagggatcaactcatttctttcattttttatcactgtcatcccacctttctttggcactacttgcactgggctaacccatctactgtctaaaattgggtaggccacccaagcatctaaccacttgaccacttcctttctcacaacctctttcattggtggactgagtctttgttgtgtattaaaagttggtttagctccctcctccattagaattcgatgcataactgttgagggactgattcccttgatatcaaccaatgtccacccaatagccttattgtgtcctcggagtactcttagcaacttatccatctccacatcaaaaagtgaagctgacactatgactggaagctttttatctttgcccaaaaactcataccgtaaatgatcaagaagcaccttcaactctagttttggtggtttttttgtagatggcacatgcttctttggaacgaccccaaactcttcaaagtattttttattcaatggcccataggagtcaagccatttggcgtaacctatcgcctcaattccatcttgctcattcacatcgtcttcagtcaaactcacttctaatgaatcttccatcaactttttcttctccactatagtgt

SEQ ID NO: 405979 - DNA, 775 bp, Cannabis indica
ttttatttatttgtttagttgtattttaaaatattagaatatcatcccaatgaaatgtcatttttaattattttagtagaatgactattctaattttaaaataaaaaaaaaatagaccattccaccgtaacatgagaaaaaatttaggtagcgtttggttggaggtaatgaaatacaatggaatggaaaagaaacaactttcatttcattcatttgtttcgttgcaaattaaaatattagaatgtcattctaattctaatggaatgacctttctattattttggtagaatgactattctattttaaaatggaaaaaaaaaagactatttcattgcaatgttgcatgatgagaaaaaatttaataatttttctatgcatattaaattttattccattccattctcatttctattctcatgttttcattcctctcaactagacaataccttaataatttttttatcaatttttttatacattttaaattttattccattctattttattttcactccttcaaatcaaacagttttgtttgggtctcaagtggattgatttcatacagcttattctttttctttttctcaagattacaaaaattatggaattctatcagaaattaattagacatactcaaatttttacactgcatgtggacactataattcaatatttatagcaactttttttttttattatatatttcgtattgttgaccgaggtttttggcaactaataaaatatgaatataataatgagctgtaagaaagcgaga

SEQ ID NO: 405980 - DNA, 510 bp, Cannabis indica
tatattataatttatctataaaatattaccattaacaataaaaaattattaaaatattcttttaattactctctatgaataatctataatctataactatacaaaaagtgtcaataatttttatgctttttatatcttaaattacttacttaacttttatctttttatttttttccactaaaatattttataatttaatataaattaaattattttgataactatatattatacttttacaagtgagaaattttgtgagtgatatttttaatttttaatcatatattagctaataatcacacaacaaataaatataaataatcattgttatgaaacagcaatatgcttacattatagtttatctataaacattataattaacaacaacaaattgttaaaatattattgttgcccccgaatttgcccaaaatacgtggaccagtcgaatagggacacgtggatcagataacttgtaaatatttgatgagtctttgtacgccacaaggaagc

SEQ ID NO: 405981 - DNA, 532 bp, Cannabis indica
aaaacaaataacacggaataacttaatcaagttataactaaaatagaaccagttctaactaaaatataacataatgaatataaacaagtaacacgcaataactcaaaccgattacaattaaaaaaacaaagaggaaatcagttcccaaaacactgaaacataaattaaaataaaattagttccacaacaaaatacatcataacacataatacctcataaaaccgattataagtttttttttaaaaaaatggggatcaattctaaaaaatattgaagcataaatatgaaaagaaatggttctatgacaaaataaataaacacaaagaataacacacaataactcatatacaatataaggaaacatgttatatttatcaaccagttacaaatttgagacaaaaatactggttccgtaaagcaactaagataaaaacttgttggaatatattttaccaggatctagatttactaacaagtatgtttttaacatcctaaacatgaacttctacaacgatataaaataaacacataa

SEQ ID NO: 405982 - DNA, 637 bp, Cannabis indica
caacaaggtgcatcttgtttttcggtagcccatctcgaaagaactccacagttaagcgagcttgacttgggagtaatttcaggatgggtgacctcctgggaagttttcccaggaagcgtgcgagtgaggacaaagcatgctggaaacactcgtgttggtctgtagggtcagtcatcaatccaggaagtagccagagtggcgtactcgtgtataagagtcattcattccgtgggtgtgaggacccaatggaggcttgaaacggggacgttacaatacaattcttatatacatacgtatattaagggcggactcataattttgttcagcgggatgaaaaaattagaaaggatgatcaacgtaaaaattatgatataaaaaaataattgacaaaaaaaatataaaagaagaaaaatgcaacaaaagaaaaagagtataaatataattttttaacaaaatgaaagtatgtgtaaaaaaatttttttaaaaaaaagactaaattgtaaattaaaaaaatatatatattaaaatttcaaaaaccacatgtcacccctattagaatattttatttatggaaattattttctaattaaggaaatgattttctatttaaggaaataaataaataattgattttctg

SEQ ID NO: 405983 - DNA, 491 bp, Cannabis indica
atgcttagagcatgagctatgtaggtctggtgctcactatcacatacatgaatcatcctaaaaccattgcatagggtacatccttcatttcctctttctctttaataatatttggacactgttccttcgacaatgagctgtctgcctaacataattgatatactctttgcatcttccatgtttaacatatgaataactttcttgatgtacctgaactgctttaagttaattgtcccttccttcatgttccttgaaacttcaatgccaagtatcttatgaactggtccaagctccttcatctctaactctctcttaagcttagctttgatacttttgatcatggatttatctttgctcataatgagcatatcgtccacataaagcaataaaaatacagttatagattgctccagactcttaaaatataagcagtcatcatatgcggatcgttttaacccgatttgctgtagattgttagaaattattttacc

SEQ ID NO: 405984 - DNA, 567 bp, Cannabis indica
aaaaaaaatgaaaagtttctattattatctctactgtctttctaaatgtgaataatggtctcttctttcttccatattcttctttatttttgtatattgtgtttgcagcatatatgtaaattattacgtaactttaaaaactttgctcctggaaactaatgcatatgccgagcacttacaatcatttgccagttgtaaattttgttaggtttttttcgccattgatgcttagttttgtgaattttggttttgtgaactttgataaaagtcacgcttctttattattattattattattattacttatatattttgttattaagttgtgaagaagaaaaaagagaagtgcggattgaaatattatgtgtgatcccacgggaatgtccaaattgtaataagaaaaggaatacaagaaataattaaagaaaactcaatcgtatttttttttgaatttaataagatttattttattatatataaataaaaagtgatccatgaatttctcataaactattttatttttaataataaactattttatttttaatataaataaaaagtcaccca

SEQ ID NO: 405985 - DNA, 1364 bp, Cannabis indica
aatttttttttatttaagtttttttttaaaaaagaaaaatatagataaaatatctagaaaagataatataaaagaagattgattgtgttggcttagagatttttgggcttgggcttaaaaaaataataataaaaaaaagatgaaatgggctgtaattagtatttaccttatatgtttgtgcttatttttagttttatttttaattttaccaccaagaggagaaggttgaaaaatattagaatatgaaaatattattggtgcttattagtaatttgcaaagaatgtgaaagtctataaatatatagttgtgtagctattattagatatgaaatgagataatagaacttttttcaattagaagattaatgtacattttactattaataacatacattattataacacaactatgttttacttactaaatatactgacacatattttatttttataaaacaaatcgttcaaataattatactattttaattattaattaaaataaaaaactaaaatattaaataaaactaacactacgtggcttggcacgtaacaatcacctagtatatatatatgtagtgaagagagtggggtatttgatttatatatatatatatgtaattatttagggttttgatataaatatataaatatatatatgtattgtatgtagtcgagaggggtagcatttgtggtttccacgcgaaagtggaatttatcttcttagtttaattaacccatgcgtgactacatcgtgccttccacacgaaattcatattctaatattccaaatttaattatattctaaatattattttcgactttatttttacaaaagttattaattggattttttattttattcaatgacaaaatagattatgtattttttaaaattatacaaataaaatcatgaactgattttttgtcaaaataaaacttaataataatccgatctagagaggttatgataaaattaagtatattttttgtatctgttcgtcttagaaattatcttaatgttagttatattaaaaaaaataaaaataattaaaaattgagctcaggatatcctcttttcactattttgaaaaatataaatccattttgtcatttaataaaatagagctgtatccaattagtaacttttacaaaatataaaatcgtcataatcactacaagaaatgtgacttctactagttcgctactgcgctggtaaaaataattttaatagcgcattttgcaaactgcgctggcaaagaggtcaaagttttaccagcgtatatttgcagtggctaaaatctaacttttaccagcacatttaagcgctggaaaaagtcatttttgttcagtcgcttttcattttt

SEQ ID NO: 405986 - DNA, 600 bp, Cannabis indica
ttcttagataagaaggcttgatcctactattaagggtaaatagcggcataagtattcaaaattttaagtttataagcgccataagctcaatatttatttttagcggtataagtactcaatatttgtaaaactgtaatttttctctaatttcgttaatacaaactctgttattttcttgaacagatcacatataaggtccagattcttgatcattgggtctagacagaaacatgtagtatcatttacttccaaatgtttatttaataaattcaaaacggagtctgtactcacaaaactagagaaaaattacagtttttcaaacattgggtttatgccgcttacaaacttaaaactttgactacttatgccattatttatcctactattaattatttttgtatatatttatatttaataaagtccgataaatagtatcataatataattttaaaaaaataattatatcataatcaataaatattagagtaatttgcggcataaatacctaagtttatcattcggttgcaatttaatacctaagttaaaattttggcggcataaataccttccgctacactttcagacattctgtaggtacct

SEQ ID NO: 405987 - DNA, 742 bp, Cannabis indica
cctctactagaagtagcgagcattggatgttacttgttgaaaagatgattaaaatcaatgtagatgtttctattgttagtgggaatgatagctttgtgattgattagatggcgcgtgaccatggaggaaatatcattgaaactgattcaaaattattgccagattgtatacaaccgacaatggcaaagattatgggagttcaagaggtgtttagctagatcaaacatcagaatttttctcaaattataattgaaacggtcaagtagttgttcatacaattcgtcatacactctaaatgaattctacatttgggttgattattttttactgtaagtgtctggtttcttttttaaacaatatttttattgtctttgttaaataatttacgattaaggcagctaattgtttagctcgtgctacttattctttttcaggtcgtcgattcagtggagagtttgtcccaactgatcttcttactattttgttagcatatttgaaaattaaaatatacgaaaaacttttcaataaaaaaaaatctcaaaacccctaataaataaaaaaaattaaaaaaaaaactaatttaaaataaaaaattgtaagttaaaaaaacacttctttttcttttttactaataaataaaagaataaataggaaaaaaaaaaaagaaaacccctaattcccttaatacacatgttggaaaaattctcattacaagagagaatagaaggattacaatcaaaat

SEQ ID NO: 405988 - DNA, 675 bp, Cannabis indica
tcttctggttcttcttgatgtcctgaatgacacaatgattttcaagaaatgtgaataaacaatgagctgatgttatcaaagcagtaaccgataataaaatgtattgaaaattaggaacataaagtacattagttaattgaatgaatggtgaaatgaacacaaaaccaacacaaataacttttctggtagaaccattaggtacaatgacagaggataatgaagagttataatcagtattgtgaaataaatcaagatggggacacacatgatgtgtacgccccagtatcaattatccattgattttttggaataaaattttacttaccagattagttggataccataggctgagatggtggagttggagatgtgtcactgtagaatttttgtgcaaggaaggccattatctgttgacattggttgggagtgagagttagaaaaaagatcttgacttcctccaggtttttcctcagcaacatcatcctttcctccactgaaattggcagcagctttcccttgtgtaggtttgttatggtttgtgttgtttcctttgtctgggaatctactgtggagcctgtgtcgaggtggatatccattgagacgatagcaattagccatggtgttaggctaaaattagtctaagtttcgggtcgtattttcggttagttttcactc

SEQ ID NO: 405989 - DNA, 689 bp, Cannabis indica
caaatgtattaacatgagcaagcaactcatacaaaatcatttaaaagccatatgttagactaaaattaaaatataatctacatggacaattccagtggggagcaagaaattaggtattgaccttcaattaaaatatttactataattaattgtcataatattttgacaattaataagaaaataaaattaggtaactaagtatcaagtcccatataatttaatgtaataacttttagagagtatcgctaaccaatcgcaacacgacacatcgagaaaataataagcaccactggtgcctaatagcaatgctcttttttcataaaatgatcatatatacatatggatctttatcttattcatcgaatgtacgaataataattacttgataatatatatattactaatcatcatcaccacttaatatatttgtcagtgcaatgcaaataataatatccgtacgtatacgtatgtataaatatacagattcttatatactatactactatatatatagtaggggtgttcataaaaaccgaaaaccgaaaccgaccatcaaaccgaccagaccgtaaccgaatttcggttccacgtcatcaccgaatttggcggtcggtttcggtttcggtttttttgtacacggcggtcggtttcggttcttgaataaaaaactagtttaaccaaaaaccgtc

SEQ ID NO: 405990 - DNA, 970 bp, Cannabis indica
ttaatgtttttggttatttttaatcgtacaactataaaaaaattattatgcaactgtgtacaaactatttttggtagtcaaaatacttgtcatttaatttttgacatcttatctcaatatattaccaattgttatgcaacttttttcttcttctcattatacaacttataaatctgatatctgactttaaaactatttcttttgaaattatttatgtaataaattcttaataagtgtcaaaactatccagaaactattttgcaactactagtaaaatatttcaactttgccaattagtagcaatctatcaaatataacatttcatcctgtcaaaattctcatacagatttaaacaattcaaataattcagttgtatctatttaattggttgattgttgcatgtctttagattgtgacaatgttgaccacatttgctgcacctattctgttttttgtatcccaatcagctataaatcttcttttcgttggtcttccaaatcttattttctggtttggtggcagaacaaggatatcttttatgttctgtggtacatcccatgttgtgtgattgtgtactggatatgttgacccactgtatgtttcaagccatgttcttgtcgtgtaatcaagtggtagtattctgggtccttcatgtcctctatctgttcaggataaccggagaccacgactagaaggcatcactgcccctttggtatttgtcattgtgaatctctctagcaccttatcaatgtaagttgtttgagagagagcaagagatctgttcttcctatttctgatgatttgaataccaagaacataagcagcttcccccaagtctttcatttagaatagagtgtcaagcaattccttgatgttagtcattttcttgatattgttgccaataatcaaaatttcatcaacataaaggacccagaatactaccacttgattatccttgagttggtaaaca

SEQ ID NO: 405991 - DNA, 560 bp, Cannabis indica
ggatagcaaaattgggcattttttttaacgagtactccttcgtggatggcatggacactgctcgtactcccttcacactgagacttagggaaagggctgagaaaattctccaactgccgaatgctcctgggaatatcactttgttgaccacagaggctaactttgtgaaatacaagctttatcgtgaaaattttatacccaagtctgtgaaggggaataagaagaaatcaaggtcgggccaagctgagggagttgagcaagagaaggagctcattcaacttaagcgtgagcctaagttgaagggtgatgctggagccaaatagtatgctcaagcatattcgagaaggaggcacaagaatattcaaagcaggagacgcggcgcaagaagcaaaaaattctcccaaccgagcagaggccgatagaagatactattcggattagggaacctggcatgcctggttggccctcaacccctgtagagttaaaaggaaaagccgtcttggaagagtaggaagactcttcagatgatgatgctgttggaagttattttaccaggaact

SEQ ID NO: 405992 - DNA, 743 bp, Cannabis indica
gtcactagtagactaacgagatcaataacaaccatctcgggaacaacagagtatagcaaaaaacaagacaatgtactttattggtcgaacaagacagtataaaggagttcaacctaaagagcataaacgatacaaattgaggagtttacttgaaagcttatataagaattatttaaaatttcatcatgaatgatcaagtattaacaattatttttatcgaaatagtaaaaatctcacatttctaatagtggtacccatttgtgaaatgtggcccagacctatcttaaaatattttttccactagtcgcaataaattcgtactactaagatgtgaatatgaagattgatttcacgttaaattttgttaaaatagtcccttaattcaaaaactaaaaatattttagggttaattttaacaagtttttttttttaattttgcactcgttagtattcacttaaaagcttacattacacatttcaaaaaatcgtgaaatttcacagggagaaagccaagactgatgtccatcactttttaaatggacactttgagagaaaacttagttctcaagcactaacaattaggggtgttcactaagtatccgatccaatccaatcggcacgatccaatccaatccaatccgcaaaatacggatatccgcacttacgcggattggattggattgaaaaatctaaaatccccacttgtgcggattggatgttgtttgacctcaaaaagtaaccga

SEQ ID NO: 405993 - DNA, 762 bp, Cannabis indica
aatcttatctttttttcacttatgttttatatcttcctttgaaaaatttgaaattttcttattttttgatatggaattaggattaattgaattggaatccttatcctatttgaagatgacatttgaaattagagagagaaaggaagaagagaaaatacttttggccttttaattatcatttatctttttctttaatttctcaaatttttccttagtcccaataacatttgaaattgttgttactttttaatttttattactatttatagttgtataggaattttaaaattggcttagaaaaggagaagggaaaagaataattatatcttttacttattatttaccttttccttagaaaaccttaaatttaaaagactcccattagctttaggattaggatattggactcaactataaataagtgagttgatgtaacaccctaatgctaaggcacactacagtaattttttaattatagggttatctttcttaatcaaagaactttcttgaaaatcgtgtcaaattaaaacttttattttaattatgatactttatacacgattatttacaaaagccgagatcccgtttctaaattttttacaaaatattccaaaatacacatgtcaggtcgcacatcgactacaaaatagaaaccccagatgtctcgagactgaacaatccaggtcgcgctaccatgacatgtacaacttcatcctagctcaggctcactcctgttcagctttcgcctttcctttacctaca

SEQ ID NO: 405994 - DNA, 1150 bp, Cannabis indica
ctctacaatctccaacaatggcttcaagttagtgcttccgctcatcttttatcatcttctacttctttaatttagcaaaggtttcattacatttatgatttagggtttctatatgaaagcaattttagatatgttcagatctgtgatttatatatttcttaagtgttttataaattctaacagtgggactatgaatgtctgctgattcagttggattgaaaaagattggtggctgtaaaaaataaaatcaagctcaaattgagtcttgataactttgtctctcaaaattacagcatccaacttgggcatatataaactactatgtgaacagggggataaagtcacttagactaaatgtgtttgagagataatgatcacctcaaaatataagtttattatgtggcttataatgtggagaaggcttcgaacaaaagataagcttgaaaggataataatgaataaggatatgacatgtttgttatgtgggaatgttaatgagagtattgagcatttgttttttgaattgattatagcaggaaatgtttggagaagataaaacattgcttgaattgggatgtaaaaagcatacaacttcacccattgttgcgatgtatttctcgagctaaaaacttcaacaacaatcgccaaagcatgctatttggtgtgatagcagtcgtggtgtacctatatatggcatgttcaaaatgacctcttttggaatcatatactgtgaatgattgaccaaactacttttaagttcaatgtgatgtaaacataatatccttagtgttatgccttgtaaagctagcaccaagaatagagattggcttatgagtttatagagatatatatatatatatatatatatatatatttatatatgtatgttgtatgggggggatcaaaggtatatatgaatagatttgcaatatagatgtattgtctataataggttgtaaatgttaagatagattaagggaatgcaaaagtatttatttaaaaaaaaaaaagaaaaaaaaatataatagatagatattttttaaatatgtacagttattgaatttaaaattacaatattaaaaaatatatattttatgttacataatcatatttaatttaatatatgataaaatataaaaaaaatatatat

SEQ ID NO: 405995 - DNA, 546 bp, Cannabis indica
ggtattagggatgacaattttacccgaaaacttgtttactttcatgggtaatattaccatattagtacgtaaaattgcattgtgattaatgtataggctaattatttgaatttttaacatatatcaaatcatgcccttgaatatttttagttgttaaattttttctctgattgagattattagatttgaggatttttgtcaatttccgttcaattttaccaatatatttcctccaaactttgacatgtaccaaataatcgtgcttcctaattactttcattcatattagatttctgttagtaaatttggaaaaaaaaatccttgaatttaacaatttcaatagttctgagagaatttttaatgacaagaaaagttcaagagatatgatttaatacatatcaaaattcgagagtcaaaaatcttaaattagcctaatatatatgacgagtgctaattataacctcttaatcaaccttcacactcgaaatcacatgtcaaaatatttttttttcaattttttttgtagcaatataatatcatccctat

SEQ ID NO: 405996 - DNA, 685 bp, Cannabis indica
taattctcgttcccacagacagcgccaaatgttgtcgagcaaaatttgcaacaccaaatatatataacaatattaatgacaagaagagattatttgaagaacagctagcgagtattgttatacaaagattgcattcattgtcaatccgtttacacattgaattacaataaactaaataatgtaaccatcaataaatgaatagcagttacttaattcagcaacgtatgcgcccttttaacatgcgagttgactgttcatattctaatgttaagctcgcgggcctaactcttaattgcgtttaggatgtctacgttcttatgtagtcgcctttgtgggcatcgtatgacgagctgatagaacctagacgtacgagtctatatcggtttatcaaggctgttgggtcattcggacatacctcgcacatacctcgcacatgtgagttactctcttgtcccgcataataagaattataatcatgcgatcagactttggtcatgctcgctgtatctcgctgactctatcttgagcgaggtttaaaacttcgaggagtctcttacagacgtctcggctttcattggaaaatctgagtgcacgtgtctttcaaataagagtctggtctcgagtttctaggtgagagaaatctcactataacacaacatgtcagatcctattacgaggagtatac

SEQ ID NO: 405997 - DNA, 646 bp, Cannabis indica
gacgaccctgtaagtcgtcccacaattcacccccagtggtggagagatcagtagtgatcccctgcctgaagggcagtaagttgtgtactatcatccaaatttcttactctttcagcagccgtgctaaaacaacttaagtacgccttaagtgtctcgctaggctgttctttatgttggtgagtgaggacgcttcaggtcgcctatcccttgcagcctggaactgctttttgaagtccttggacagctgttcccaagaagtaatggaatgatgagtaaatttattgaaccagctgctgctccaactagtgaggtgggaaacaaaatacaacgtaaattgtttgtaacgttactagctcgcattatagtcttgaagttattcaaatacgagatcggatcggtggtcccatcatacgacgagacatgagggtttttaaatccctgggaaaaaggagtattcatgatatctggatggtgtggctcgagttcctcattttagtcatatccagattgttttcctagctcccctacttgataccttttgaacttatcctccaactcttctattcgccattggattggatcctcttactttggaccgagttgttggtgaagattaggtttttttggttcaagtgctctcgcagat

SEQ ID NO: 405998 - DNA, 1139 bp, Cannabis indica
acatgtgtacacagtggtaaaattggtatttaacagtgagatttcactagcgactcaaatttgccaaaaaaaaaagtgaagttaagttaagagggttttttaatccaaaaaagatcaggggtttcgacaccaattatcaaagaataccaataaacctgaccaccacactcttgccatatccaaagacaatgcaagtttaaaaagattgttagctaaagagttcacagaatgattacaaaagaaaattttagaaacattaacacggttacaaataacataaatatatttaaaaattaggccaaactcaaccaagaacaaatttctcttcttcaggatatggataacatgttgacaatctgattcgatctccatattgttgaagccaagatgcaaacatagaagtaatttatatgttaattttactatttttatttgtcgcaaacaatatcactatctttctatatatttttgaaatagtaaattacatttctaatttcaatactattacattgtttataatacacatacatcaaaatgttatattttaaattatatataactcaataagtgtaaaaaaaaataaagaagaagattacaaaaattgagcagtatcgcacgaagcgcgacttaattccctaattacttgtataaacagaaacacaaatgaatcagcacataatactacaagaagacagtagggcttgatattgtttgtaatcttttttattgtaattgaactaaatgcattacaattttttttgttattattattttttaaaaaaattttcggatggtcgggtttgggttttcagattttgggtgtttaaaatgtgtaaccgaacccagttttcgggtggtcgggtttggagggtttcaggtcgagtatggcaggttttgtggtcagatttggattaacacccgaatcaatatttgcataaaaaaaattgtactgtacagtttaactttctggagcactgtaaacaaaaataaaataaaggttggactatgggatgaaaagtacaaataatactatttttatttttattttgataaaagtaaaataaaaaaataataaaaaatacaacaaactgatgcttgtttcccacttttttttttttttagactgaagtcattgtttc

SEQ ID NO: 405999 - DNA, 800 bp, Cannabis indica
aacctgaggaaactgaggaaagaataggagtacagcctgggatacgtggaacatcggacgaaaatcgccaacccactattcagtctcataagaatgaaactcgtgcaaaccctagtaggaagaaaaaagtgagtcaaaccttgagacgaagggtagggtccggccacaatcatgacgagagtgatctacgagagcatttgaacttgaaaaagcctgacctccgtcaacgactcgattcaagacaaaaggattcattccatttacaaatgaacgggttggagaataagtccagagcacatcgaatcacgaaacacaggagacaactggggcacgatactgttggagaacttaattcggaagcctcgggatcaatgaaaaaagatgattccaaaaggctgtataatgacaggaaacccaacaagtttatccctctttataccgaatacaccgagctcaatgaaactcggaagaagatctaccttgcatacgtacaagaagctatttttggcgagccaatacctatgaaacatgtgaggcacaagagggatccaagtaagcggtgtgaataccatggtgatattggcataccacaaaagagtgtcgtcggttgaaagatgagatagaaagtctcatatcgcaaggacaccttcatcgatatataaaggggcaagaagatgcctatgatcagttcgatcttcccaataactcgagcgactgaaggttataacccttttccacgagaagaagggacactttggttatctcgagagggagagggtcgcaagagtacaaaaggcagt

SEQ ID NO: 406000 - DNA, 461 bp, Cannabis indica
gaaagttcttgagaaaggaaacacgaaagtgcaactcacttggctcaaagaggctcggagttggccaaatcgaagtcgagaagccttggttctggcaagctcctgacaacagtgaaatggtgacgggggactacggggttgggatttttaaggtataggaatccatttttggggttcgtgtgggctaaaaaggacctaaggtggtctattcggtccttgactctagcgagctcagttcctaatagcggcaaaaggggggtttgtgtgggctaaaggggactggatgtggtcccttccgtgtgggtttaaaaaacgaaggtgtggatttagagaggaaaaaggtgaagaagaaggttctggtgttaggttatttttagcttaatttttgggtcactttttgtagttatttttattctttgttattatttttagaatagaattatgcttgttttctttgattt

SEQ ID NO: 406001 - DNA, 678 bp, Cannabis indica
ataatctctttttcatatcaacataatagcaacaaggtatatttttgattctataaattaatcctaaataagtttaagatcaatctatgtgcttaaatcaagggctagtcctaagttgaaatgggccttaaaaaaaatatacctattataagaataaatagtattttaaaaattattaaccaaatatatattttttttatttgggctcctaagatagatggactttaggtataaatctagttcgccttagcctatagccagccctacttagatctagtcctaacatgtaaagttatttactaacactcatcattggctttaacaaggatattttccgaaaatatatctaacttatttattaacacttaaatatgttgagaaaaacattaggctattaatttttataatcaatgtttactagtaaaaaaaaattaatttacatattaaagtattactttaccaaaaataatacacgcaaacaaataatatagcacattgactttttaacctatagctagatcattgcctaaggcctctcaacctatgttagaatgcataagtgtattgttgaggaagtaaaaatgagtgtgttgaccgaggttttcggcaactgttaaaatataaatataataatgagctgtaagaaagtgagatgaagactttttacgtggttggggc

SEQ ID NO: 406002 - DNA, 2259 bp, Cannabis indica
aatgcaacttgcatttgacgaggtggggaatgatagaacatacaattaaagtggtgatgacaacataagattgatgtggtcctaacaagatttaatgtttcacgtccattccaaggccacactcaaccaatcctggcctgctttgcttgctaatattgctcacatctaactcttaaaatagtagtacatatgtaatattaactgcacactctgatctgtattcattgactagtttgggaaatggtcccctattatttcaatttatgtggccaaaacataaaaataagatgaattattcatgctcattatctattctggagatgaaaattgatgtggaaaatgaaaacaaaacagtacattgtgtgagtagaaaaaggaagcgtaataatcaacaggaatatttaccctatgtacatcatttttaattttataaaaaacaaaaaaaagaagaggaacaatacatctaaactacattccgtaacgttgccaaatgctcatgttgtgctttgtcttaaggctctgtgtcatgtcaaaaatcataatctatgtctgtcaagttctgggaggcagagcgcttaaccaaccgttcttgctcatcgtacctatcgagattctcacaaggggcagggaagacggttcctattactcgcccgtatacaaaggcacactggaaaatatgcttcttcttgtaggtcagtcccactgacatatcccggaaagtcacgtttctcactggaatttctgagcttccgtggatacgcacaggaactcgaacaccctgtccgtggacacctgtgaagcttatgtcctcgagaatcgggaaagctttccgatcgtagttgtcgtcggggtgttcgttgtagtctgtctttataacaattcccacgcgaacattgtcgaatgttaggttgcggtaggttatgtggcggacatatccacctcttcctggagctgttttgatgcggacagcgcgccttgagctccacacgaggagattctccactgtcacatttgaaaccccaccagacatctcactgcctattgatacgccagcactgttgcattgttgccaaaacggattcaagttattctcttgttataaatatgaaagttggattaatccaccaatttttttagttcaaagttcaaacttctcttatagtgaaacatttcgtgtattaggggatgtaaaacatggcccaaactgcatttaattaaagataaatattggcttcaagagacttgacctaaaagacattcaaggagaaagcgtggcaatgttctagtgaagaaataaaaaaattgctaaaaaaagaatatagaacatgcaatacaagttaaaatgaagaagtcatatgtttacttaaagattctttaataagtgaaaagggaaaaacaaagagcttcatcatatatattggcctaaaataacttggtatttcatgattgtttttttactaataagaagcttgtaatttgacttcccaagatctcattaaaataattgctcttattgaagggtagattatacttgtattcaatttagcattgacctattactagttctcaaacaatattttttagaattaaaatgatctaatgagtgatatattaattttaaacagctatcggctacagaaaaacagtaaaatgtcatttaaacctaagtctaaccactactaaggcagacatttctttttggggattagcttgaatgaaaagatcagtcaatctgtaataaggaaaatcaaatttagggagttcgattttgttaggaaagaaagagtacaagtcattttatgacattttccctcagtgtaacagcatttggacagagacaggacaaggaaaaatataaaactgacctgaccatagagcgaacaacaagattcctgatgagtatgttccttgaaggccgtccataagaaattccatattgatcccagccgctctttatagcaattgcatcatctccaacgctaatataacaatcctcaatcaccatatcctcacaagaatctgtttgccatgcaaatttggagctaattaatactcaatagtcaatagatacattagatagacataccactgtaacattactgttagtatttgttaatatcatcccaaacataacaatgaataagttttgacttttgagtgcctgcataatacactggcagtaggaccaatgctaagcacatgttacatgaaactgaattaagaagcagaagccagcttaccaggatcaatcccatcagt

SEQ ID NO: 406003 - DNA, 519 bp, Cannabis indica
agagtagtctctaatcataaaaaacaccatttgacaataatactagaggttagtcataaatagaggtggatatccgatctaatctaacctttttttcctcatccgattcaatctaattagtaattggatttggaaaatcatcatccaatccaattcaattactaattagattagatcgattttttaattggatatccaattacatacctaaattttaatattagcttaaaaatataaaaaaaaatacgtaaaaaactaagtattactttttatttaagtttaatatttcataaatatactattcttacaagtgtattacagctagaagttttaaataattaaaacaataacatttctaagtaataaaatagaacaacatatcatgaaaataaatatactaaacaatcaagtgttattaattcaacatacaaaaaaatttaataaatatttattatatttttcaatattttttattatataaatatttttttaatatatataaatgtaattggattagat

SEQ ID NO: 406004 - DNA, 553 bp, Cannabis indica
gtcttgaatataagtgttctacccacttcattagtatgaggcctttcgggaaggtgctcaaaaataaaactgtgagagcttaagcccaaagtggacaatatcatactaatgtgggagtcaaagtgagatagtggcccaataaagtgaaagaacggacccaacaaatgtacaatgagtaatatagtgtaaattaaatttaatgaacacccctagtgagaagaacatgttaaattaaaagagaaaattgcataagaatgatagactcaactaattatcatatatgtgtgactctcgttttttacaagtcgtatttttcatctattgtaagggaggacttttgttatgattaataaaaaaatttattattaactcaaaaaaatgaggtctaacatcatttgagaatatcatcctaggcatggcaaaaagatccattcattcggattgggtcagtgatccaatccgacggatcattactgatcagaaacattcggatagttattggatcttggatcagatccgacccgccccgctcaatttttttacggatcggatc

SEQ ID NO: 406005 - DNA, 638 bp, Cannabis indica
taaagaataattagcaattttgtttcatgaactttcgataatattgattttggctcttaaaatatactgcttgttaaaaattttcttaaacttttacacactagtatcgcacgtatgctatgttttatattaagtattatattatgagttcagaagaaaataaatgaataaaaaataaataatatttaatttagagagatttgaataataaatttaaattaaacttttatgtccagtaaaaatatattagaaataataataataaggttataatatatgttgcatttgttccctttcttaaaataatagcagcaagaacatctttgacctggaaaaacaaatattacaaaattaaaaataagcaaagcatgtgtaaattagacaaagaaggaaccctcaattctcaaagtctcgattataaagtaacaaagaagtattaaaatttcatctgctcattataaagccaccttcactcaaaatagcacaacaaaagtaacaaagaaatattaaaggtgtaaattttaccaaaagcaatgagaattaacaactgatgattgcattctgtttcagtaggtgaaattgagagagaggcttttgttgtgtttgcctgtatgggtgatgaatgggttaatcgtaaa

SEQ ID NO: 406006 - DNA, 649 bp, Cannabis indica
ttactaattgattttattctttgagcgtggcccgtggactagtagtatttgaaagaacacttataccacgtataattctcttgtgtcaatttttaaattctgcactattatttctagtattttaattttggttctagtttgtttctgcaaaactgttttatgcagtgacagaattatattttactgcgaattgttacaattgtgtttttactgttattgtgtaaaaatttgttagcttttgcaaaaatacggtttttaagacataaatatgttagtcatcaaaattcccatatactataattctgaaagaacaatcaagaactaatacaacaataatgattatcaaaaaataaaatgaacaaagaatgaaaacgcaaaagagaaacgattcaaatctaatcaaatcaacaaagatatattttttgagcacaaactcgatcgagcctcttctactatgatcaagaacaattacaagatgtacacaggtcttctagagtaacaaatgcatcttctacacttcaattaccctttgcattaatcaactcacaaagtttctctttgtttctttattttatttatttatttttatattttcataaatacctaaaaatgacaatttttttttttttttacagattttaactttttt

SEQ ID NO: 406007 - DNA, 697 bp, Cannabis indica
aaattggctaacaacactcatagtgaagcttatgttaggccaagtgtgagttaggtatattagttttcccacaagacgttgataccttcctcgataaacttttgttccatctatctgtacttcaagtttgatattagggtccatcagagtttcacttggcttgcatccgatcatcccagtttcctgtaagagatcaatgatatatttccactgagtgactgagataccttgtttggatcttgcaacttccatccccagaaaatatcttaattggcctagatctttaatctcaaattttctagagaaaagctgcttgagatgagaaatttcttccacgaaattatctgtaaacacaatatcatcgacataaataatcaatgttgttaattttctaccaactgagtgtttttttaaacaaagtatgatctgattggcactgggtgtaaccatctcctttcaacacttttgtaaacctgtcaaactaggctcgaagggattgcttgaggctgtagagagatttttttagtttgcacacttttccctttgagaatcggtcctcaaatcttggaagaatgtccatgtatacttcttccacaaggttgccattaagaaacacattctttacgtcaagctggaataaaggccattcattgttagtagcaatagataagagaactcggatggtgttcaacttagc

SEQ ID NO: 406008 - DNA, 963 bp, Cannabis indica
gatggcagacctcgttttactcaaagatagcatcctactcacggaccttgtcttgctcatggacttcgtctcgagtgactcatggatttactgtttccaatgctttctcgatcattagctcgtcgggtactttctcctctccaagttgatcgactgtgggtccttgaccgccctgaggtcacacttacttcttcacgctctgttctttcccctgagtgtgatttgtcgtatttcccccattagggtcagtacgagccctctctccatgggttcaggaagaacgctagtgattactcgcaggtgaccttcgctctctaggttgagtcctaagaacttcctcattttcatgaggaatttcttgttcatcaatttctagttgcctcccatcctcatttctatgagagggttctggctgatgattctcatttttagggggaatctcattctccataggttgttcttcctggatattttcctatctcttggttcatgagccacgaggcctgcctcgtggtcttctcactccagttttaggatgattttgagtgttagtcccatgccccgccctaactgcgactgcatcacgctctaactcagcgttccgccgctgggcctcctccaagcagcgtctaaggcggcggtttccttctcccataggcagagtacctccacgattgggctcctcatccttagttcaaagattctggccattcccacgctgagttctcctcgagcgtgttgtttgcgtactaggaccaacgtcaggttgggtcctccgggaacgtaaggtccgagtgctaggggcaccctcaggttgagtcctcttggagcgggtggtccgtctggattgttgattggaaaaccttctggatcccatgggctctttcccagaacagtgatgagtttcttcatgtggtgtattaacatcttctgggtttggagccatgaaggagatggtttttc

SEQ ID NO: 406009 - DNA, 513 bp, Cannabis indica
aataaaatattataatcaaaataaaaacaagaatatgcaattactctactcaaaatagctagtattcaaactatggacacacaaacatattggaaatataaataacacaaagtgagcatagttgttctgtcagatcacggtctacttagtccattgttgcaagagttttctatcttctccttttcatgttggatcactcctttatatacaaagcaagtgtcatttgattacacaaagattgacttaattatcaaatctgtttttacaatgaataacaacatttaaatcaattaaaacataaatataataaatgaagaacagttttggcccaattcactaactacagcaacgtatgcgacctttgtagtgtgagttgtctattcatattcccacataagctttcagggtgaagacacgtacaagactaattgagtctcacatgcgtaagacatatgcatcctattcgagttgcatatacggatatcttgtaaaaggtcgataacttaggacatg

SEQ ID NO: 406010 - DNA, 543 bp, Cannabis indica
cagccataggatgatggctcgaaataagcaaacgatgcataaggtcaatgcgtctgaccctcatgtggcccagcacaccactttacccagcgccgaaccggctccgcccgtcaaggaggaggggaatcatgaaggagacgctgaagtccaagagatagaggaacaggacgatgtccgtcctagcagcccttccgaggcggaggaagaggaggaggctgcacctccaaattttagggaatacaatgaggctggggagccagtagatgcggacggcgatgtcctggttgaaggagtggactacgtcaccgaggagcttactgctgcatttcctcacaggaggcaagatgccttaggtgccaggtgggtgagccctctatccaaagtcactgcgacacgcttaagtgacttcgaccaatctggctatctgggtcaactaggatgttatgttcctgcctcaaaccaccgagccataaacctgaagaaggggatgtgtgcctggtcgggtgctcattccaaacaaggggcaattctacctttgcaccc

SEQ ID NO: 406011 - DNA, 703 bp, Cannabis indica
gcatgtcctagatcaggaacatatgagctccgtaaccaacatgggactatactgttacaaagtcatgctgtttgggttgaagaatgctggggcaacatatcagcgattggtaaatgagatgttcgcgaatcagatcagtcgaaacatggaagtttacgtcgatgatatgttggtaaaatcagtgaaaagtgggagtcatgccacggacctcgcagaatgcttcgaaatactaaagaagtacaatatgaagcttaacccgaaaaatgttcctttggagtttccttaaaaaaatttctaggattcatagtcaacgggaggggcattaaagcaaactctgagaaaatcaaggcttggatagatatgccatcaccaataaagccaaaggaagtccaagcactaacaggaaggatggctgcacttaacagattcatttcgaagtcgactaataagtgtttgctattttttaatgtattgtgaggaaataagaaatttgagttgacaaaagaatccgaggaggcctttcaaaatattaaaaggcatttggcgacgcctccagttttggcaaaaccagtaactggaaaaacattactcctctatctggcaatctcggaagacgcgattagtgcagcaatagtgcgagaagaggcactacaagaaaacctacttttgccgacgcatttttgcaccggcaaaagtacactaa

SEQ ID NO: 406012 - DNA, 501 bp, Cannabis indica
gttgaattcagccatttcagtagaagtagaagtggaggtagatgcagcaggaggttcatcagtagcaccaagagaagcagacggagcctttttcttagaagacttttcttgaggaggtttcatttggaactttgaaagtggtaccaacaacaagcatttttatggtttcattctcaagaatcaactcctcttggttagacaaaatcttataaatcaagtgaggaaaaataggattgagtctaggtttcttgccctttctaggagagacaatttgctcccaaatcatatcagccggaataattttagcactagtagaaactttatacaaaaagaaggcaagttcatttgaaacatttaccgaatttgagcaacgaaaccaattggatagggcaaacctcataagagcagcatgatgataggtaagttgagacatatgcattgtgtcagagagttttacatcattatcaccagtgagatacccaaactgttgggttttgtgcc

SEQ ID NO: 406013 - DNA, 825 bp, Cannabis indica
gattttgaagaaacttttgcacccgtggctagacttgagtctattcggttactgttagctgtggcatgttttctgaaattcaaacttcaccaaatggatgtcaaaagtgcctttctcaatggagtcctacaggaggaggtctatgtgaaacagcccaaaggatttgaggacccgaagttcccagagcatgtctataaactcaagaaagctctatatgggcttaaacaagctcctagagcatggtatgacaggttaacctccttccttcttgcaaatgggtttgccagaggtactgctgataacactctttttattaagctcttgcaaccaggtatttttgtagctcaaatttatgttgatgacatcatttttgggtctacttgtgaaaaggaagttgtcaaatttgttgatctcatgactagtgaatttgaaatgagtcttataggggatctgagtttctttctaggtttacaaattaagcaaactgatcaaggtatttttatctcacaatccaaatatgttagaaaaatgcttgagaagtttggcttagatcacactaaacatgcccctacccctttaagtactactaccaaacttagcagagacgagtctggtgagtctgttgatcccaccctatatagggaatgataggtagtcttctatatttgacagccagtagacctgatatttgctttagtgtaggcttgtgtgctcgatatcaagctaatcccaaacagtctcatctgtctgctgttaagcgtattttaaatacctatctggaacttcagagtttggcttgtggtactccagagataccaacatgtc

SEQ ID NO: 406014 - DNA, 661 bp, Cannabis indica
agcttacagatactcaggagcatgtatactttgccacccagcaaaatacacattaccgaaagcctccacccgtgaacaaggatagctcccggagatatcccaataaaagatgcgaataccacaatgacattggccacaccacaaacgagtgcaaaaacctgaaagatgaaattgagaacctaatcaggttaggtcacttgtatgaatggattaaaagcaggttaccgcacttaaacttggctccagcaggaggcccattaccttagggaggagcagggaatatgcccgaggggcaagtacctcccggaggggcgcttcctcaacaggcgcccggattaccaccccagctgaatggaagagtggccatgatctctagtaggcatcatgttggaggaatcgccaggagcgagttaaacgttactcaagggccttaaaacacgatgaagtgtgggaggtcactcaactccctgcacaacggcccaaactcgtggaccaacctattacttttactgaagaagacgcgaagccagtgcctttcccccaccatgacccctagtcactagaaactcctatcgccaataaggtggtggctagaatattggaggatgacagaagctccgtaaatctattattcaaaaaaagccttcacggccatagggct

SEQ ID NO: 406015 - DNA, 592 bp, Cannabis indica
catgtgttcctactggtgtctccgattaaggggatcaaatgtttcggaaaaagaggcaagttatgccctaggtttataggcctttttagattctcgagaaggtttgactagtggcgtattgtctagctttccctccaacacttttagccgttcacaatgtatttcatgtttccatgttacggaaatacgttttagatcctaatcatgtgctaagttatgacaatcttgagcttcaaccagacctattatacgaagaagaacatgttcaaatcttggacagaatagataaagtccttcggaacaagaaagtagctttggtcaaggtgctctgtgaaacaataaggtggaggaagccacctgggagttagagtccgacatgaggtctcagtatcaagagttgtccaggttagattttgaggttttaattttgaagctagaataagaattatgatttatcatttatgtagatttatttgaattcaggatgtattatttatgtcatacatgaaattttatgttattgcatgttttgtacccgacaatattggaaagcgacgttgggccaatagaatcacattttggtatttagtag

SEQ ID NO: 406016 - DNA, 721 bp, Cannabis indica
aaatcaagtccaataatcaagttgagtccctacctctcccaagtcaataaactttgtccaaaagacgatcttaagctctcaagtctcgagctccaaatgtttagtccaatcttagatattactctcacctataccatcaaatggttaaataattatcatcatcacattctacattcaaaatcgagtccaacgacatataatatgactatatttaaaatttggggtttcaaagcctcacctgagcggtgcacatttacaatcggtggcggtaaaaatcggtgtactggaaacatcgccgaaaatagggatagtgtatatcaaaacgatcacctcgacgagtagatcacactcatgctaaccgtttgtcaaaacggtatacgatatcgttggaaagtcgccgaaaaggggcggagctataaaaatatcactggaaaaagtagcgagatgggcaaaatggtttagtgtagattgttctcctcgacgagatgagtttagcggtgaagacgactcgtcaaacggacaccggagatgaccgaaaaatccgttcaaaagtttgaacccccaactttgacttgcgacctcgagctaacggcggcgaaagaagcggtgccgcttggggggtgagatcgccggcaccaggggagttcgagtggtccgacatgtggggttggtcagtggccagaggtgggtcgccgaagtgcacaagtgatggagcttgtgg

SEQ ID NO: 406017 - DNA, 710 bp, Cannabis indica
gtgcacgggcaaagaagaaagcaccataagggacaacccagagccaatgcaagaatccctgccaaacaacaatgaagacagacctgcctagaaattgcacatggacagattagctacaggtcaactgtctggtacaagaattgcccttgtcacacctgaggggcaacacctacacggggcattcaaatttggattcaaagcttccaacaacgaagcaggatatgaagccctcattgttgacttaaacttgctcgggatctgcatgctaaatacattgaagtctgtagtgatttgcaattggtggaaaatcatgtcttcggagagtacgaggcccggggagagaaaatgatggattacctaagcaaaatacaggatccacttgcacaattcaagggttacaccctcaggcaaattccaagagaataaaatacaactactgatgccttagcccgactcgcgagcagcaccataatagataaggccaatttagtccctattcaattcctagaagagcccagcatcacctgtgcggaggaaattaaaatgatagagatagctcctaactggatgacacccatagcagcctacctcaatactggagaacttccaaatgatagaaatgaagctcgaaatatgagaaggaaggtcgtacgatacatcatcgtagaaggggtaatgtatagaaggggattctccatgccattacttag

SEQ ID NO: 406018 - DNA, 509 bp, Cannabis indica
cacatcaggatctcttaaagttgggtcttagatgtggataccgggctgagcgactggttgaacatcctgttcgttcagaccttgcatcctattcacattattcctaagatcatgggttgtacccaatctattgaatgctgaaacaccaggttgcctcagtgtttgattggtttgaccagtttgttggccagaactatcagcttagattgaattattaggtataactccaactaaggaattgtcgaatatggtttggacacctaccacttggcccataggtggaacctgtgatcggggattggacggttgaccgttatgagtttgggcggtatgccttctaggaatttcttctatgtcgctcagtgggatactagacgtagcagttggttgctgattagcaacttgataggctttccgtatcagtacggtggcctgtcttgtttggtcattgatggctgcctactgagccttcaatgtttccatctccctatccctccattcaatgaact

SEQ ID NO: 406019 - DNA, 623 bp, Cannabis indica
gagattgatgatttaggagtcaagcctttcaaatattacaattattggatgaataagtaagggtataaggaatatgttatcaacaactggactaaatagacccatgccaaaagggctcaaaggtattctccaaaagttattgagaattaaacatgtgttgaaggtgtttcagaaagaaaataagggtgatataatcaatatttttaaggaagcaaaaaaagctcttaattctgctaaggggtttttggctgttgacctgaagaatcttattctttagtttgttgaagtaaatctttaccaggcctatcttattgctaaaaaaaaaaaaagaattatgttagctatatgcatcaaaattctaagataacttggttgaattttgatgatgagaatacgagctattttcaaactttttttgaaaaagagaagaattgagaattgtatcttcacattttacaagaatgatgaagttgtagatgattaccagttggttgttgaacacttccttagccattttagaaattttatggggaaaagaagctctgcatctagcagattagatcctgcttttccttgttcatggtcctaaacttgcattcaacataagtgttggaaattatttt

SEQ ID NO: 406020 - DNA, 858 bp, Cannabis indica
atgattctaaactctctatttaggaatttgatagatattggctgagattattctatagattaatgctattttattgttctttctttctctattatggtgatttattcatatttgtgcttattgtatgtgtttggttggacaccttatgcatgatctatgatctcaatacaaaatctgaaaagtgaatattgagattgctctaaatgaatagagataggttttgatgtgaaataagaatattcacataacttatgtgacttttagactattgcttaatgcgaattgtatatttttctatctcagaaatgcagtagttaattggcatgcaatttaggacctttatgatctagaaagagtttaggttaatttataatatctgtcatcacatagaggaagaagaatggttaattagtgttaacagttgggtaatcagagcaattgaaatcgtatccctaatttcgcatctattgttaaaactttttatttgtttgttttgttaaattttacttagtttatttagttcaagatttatttattcgattgccaaatagagacaaaaatttaattgattggtacttaactacagttctcatgagaacgatctcacttaactgagtattacttgttaaaaagatacgtatacttgtgtgttggatttatcacaataaattttgagcatcgttgtcgaggctgttttagttaatatcaatatagttgaattctaatctaatttgttttccttttatttaattttactaatttttaatgaatgtgtttgacctgcaaagtaaatctaaatgctataccttgtgaattttttccaacaacagaatgagagccattctattctgcttgggg

SEQ ID NO: 406021 - DNA, 689 bp, Cannabis indica
tgtgtgtctctctttggccttaatagttcaggcaactatagcaggatatctgactttcaaatgcacttcaaacttagtcaatgaaagcaacaaatgctttgtcttcttcagaaaatgatagtaagacaagatacataatggttaaagaaaataccttggaaagaattgatatatattgaagagttgaactgaatttttatttggacatgtcattgcgaacttgctttatatacttatgccatttaatataaggtaataggtccacatttcaaattgaaataatctttgctatgttttaaattttactttttatttttgacaaattaagatttccatatgtctattttatatagtttatttctttttatattttgttccaattatgttaatttggtgcattttttttttatctttatttatgttgagtaattttttttcttcgcgaagggaattgatgctgcataggactgttcatccaatccaattcatacttttttggtcaaataacatccaatccgcactaagtgcggatttcattttttggatctaattcaaaccgcacaatagctgaaatccaatccaatctgcaaaatgcggattggatcggttattttggattgattactttttaatattaaattatttaatatttatgaaaaaaatatttttttttccacataactagcatt

SEQ ID NO: 406022 - DNA, 708 bp, Cannabis indica
gtctccaaggcattgaccttcccgttcaacctgtccacctcaatcgaaagctcctcctgcttggcttccttttcctccttcatccgatgaagaactgctcgaagggaagtcgtctcgtcctgaagactgtttaccccaacagataaggtctcgatggtctcctcaaaacggtcagaaacctcgagatccttagtcagcacagtgattttcttctgagcggcaaacagcttcttgttagcttcacccaattcaaaccgaacagctccgactttcgccttggcttcttcagcatccttcctggccaagtctgcctccgcccttaggctgtcggacagagctgtgttcttggaagcagaagacttagctcgagagtaagtgtaggccaacttcaaacacgcctgcacaaggaaaaaactttagcatttgagctaagtatgcaagattaaagggaagtattaagaaagacttaccctggtgaactccttcaagactccgcccacgagcaattctaaagaagagtcattgtcagcaccagccagttgctcactgaccttaggaaccagtgggttcatataatgcgccagcatctccttgccctttttggcatctggaagcaccaacaaaggtggaataggttcccgcacccattcaggatcactcttgaccagtttagaaccaaccttcagtggtccagactccttagacttg

SEQ ID NO: 406023 - DNA, 704 bp, Cannabis indica
gagcagcaagggtttgatattttctttgtggattcaagtagattttgagggaaattcaagctctaggtttagctcttgcaccttcgaagaaaatggttgcatgcttggggattttgatgattgtagctgctgtgtttgttgctgtttctgaagtttagatatgattaattgagtggattcaagtttggtttttagttagttagttgtagttttaaacatgtgtaaagctttaaactcaaaactttgaattttaatggtaaaatggtgtttttgctgctgtgacttttgtttgtgtttgagtttggtttctcgatgttattcatgttgtcttaggttgaattaagttgattgtagtggctggttgtggtgttacccaagctttgagctttgaagctcaaacttggagctcacatggtggattttgattctgtgtgtgtagggttgttttgttgctttaaaattgttctttggggtctaaatagcaggtctggagggtttggattgttttggggatgaattgcatgagttatgaatttttgaccctttcctgcactgaaccggaattctggttcagagaggcctgtaggaaccagaattccggctggcttccaggaatttacccacaaccaaaattccggttgaggaaccggtctacgggttggggcaaatttgggaaccctagttcttcccatttttgtgttatt

SEQ ID NO: 406024 - DNA, 703 bp, Cannabis indica
tagcagcagtcagctcctcgaaatgatcaatgacatctccagaaggtctcttttcctttgaagaagacccctcaccgcccttagacttcttggccagaggagaggcgctagagattccgcccattctcttcctcaaagcatcgagcatctaccaagacatgtctgcacagaacaaaaatagtacggttagaaagcagccatcagaaaacacaaggcatgaaaatcaagaagctcaagaacaaagtaaagtaaaatgcaaggtgaccaccctcacaagactcaaaagtccatcatcacctaatatcaatcttatctcagacatgacaactttcccttttccaaaaaagggaggagatggccgaacaagtgaaatgggctcccttatgcgaattgcatgttcaataggcctgggcaaggcgagagtttcttcttcctcttcagtggagtcacctgctcgtcctcagcctcatcttcaggatttaaaggctcctgagcgtactgcttggccctggcacctcctttcaacttgcttcacactttagttgaatcaactgattctctggatgagctcgttcaggccggccagcaccagattttcctcttcttccatgtcacggacttaggagtaaagtcttcgggataaagcccgtacttcacaagattgtcatcggaggttaaactggataatattcatgtcttcccc

SEQ ID NO: 406025 - DNA, 431 bp, Cannabis indica
atatatatatatatgataaattaatatttgaatgattgatctggtgaagaggaattgctaacttgaacatctatatttcatatgtacacaacttcaactgatgtagaggaagctaagaacttcagttcaggcgccccaagttcactttttcaaataatacgtacacaattaaaaaaaaaaaaaaattaaatttatagaatttgtttaaggatgatcagaagatatttataagaaagggggaaaaaaaacgtaataaaggctgttcatgaataacatatataatgcgataatttgttcaattcaattcccattatcccccaatctttatgttgcgaaaattattaatcactacgcaagtatacgcaatcaagtagtaaactcacacaggtgaggtcgaaccacagggaattggactaattactactaaatta

SEQ ID NO: 406026 - DNA, 947 bp, Cannabis indica
gctgtctccaaagctaacatacacgtcgccgcttccctgagagtcagagaagtgaagcttgttagtcgtcacccacaaaatcgattccgtatgatctctggcaatcgccaccgcacacatggtttccaccccgactctaacatcgcagttgatcttgacccaatcctcaggcgaggggaccaacccagagtaccatcaacctgttgagacttgagcaaactgatccataatctgagtaacaataatatatagagtcaatataatgtttcaagctacccatagtgttatgatgagtgaatgtgttacacattaattaagatatatatatatatatcaaactctattataaaataataaaaatattattacaaaaatataatcactatatattaggttaaatagcagcataagtactcaaagttttaagtttgtaagcggtataaactcaatatttatttttagcggcataagtacccagtgtttgtcaaactgtaatttttcttcagttttgtcagtacagactccgttttaaatttattaaaggaacatttggaagtaactgatactacatgtttctgtctagacccaatgatcaagaatctagaccttatatgtggcctatttaagaaaataacaaggtttgtacggacgaaattaagaaaaaaattactagttttacaaacagttgggtacttatgccaactaaaaaataaacattgggattatgccacttacaaacttaaaactttgggtacttatactgctatttaccctatatattatatatataaaaaaaaagtaaaagaaaaagagattacaatatgcaatataacacactatacacatatattatataatatgatcataaataaaaaaaataaaaaaaaatacttactcacaattttgagtataaattagtgaaaatgatcataacttgaacaatatac

SEQ ID NO: 406027 - DNA, 534 bp, Cannabis indica
ggcataaataagagagagtctacgtattgcacaacaaattcaggcaatattatttcccagaaattcaacattcaactgagatactctaaacatgcaagacaaacaaacaatagacaagtataaagtatcctgaacacttacatgaagtttgaaggcttggggtcggtgttgatcgtcgatacaacgaagactggcaacggcgaaggaaaaggagcagataatctatggtgtctggaatttttcctctctgtgaaagctttgagaaaatttggcaaaatagcgaaagtaaccaaatgaaatgagaaggctggcttttataggacaaaactggtgtgaagcagctgtgatcaggcgtcatcatacggtgagaatagcaatcgattcgcattctacagatccaacagttgggacaagcgttcatcaaggcggttggaaatgcttgagtactcgactgacacccatttaatgcaccggatcattaaatggataggaaacaaatcgttgcctgcaaaaagtaaaaactgcaatgatgat

SEQ ID NO: 406028 - DNA, 790 bp, Cannabis indica
attttcgaacctaggggtaaaatggtcaaaaaccataaccccgcacaatctcgatattttattttttctgatattgatccctctaagaaataaggttctacacttacccatgtgatcaaactagccatccatcgcattttccgttgtcgcccagcaaaaattacaaaaataacatatttcacatataattcaaataataccatttgagtttaataaaatctctggaattgagaaattataactctaatgctcatttctaataatggggcccacattaattaaactcataaataattataaaaatgtcagaaattagtgctaattgcctttattaatccaaattacaaaagcggtcatcacaattatccccccgttaaacgatttcatcctcgaaatctaacctgaatatctctggatgttgagtcctcaagtcagactctaattcccaggtgcttcctccaccttgctgtttctctagagcactttgaccaaggcaatggtcttgttccgaagaaccttttcctttctgtcaagaatctgtacaagtttctcttcataggataagtctgattgtagttcaagggcttcataactcaagatatgagtcgagtctgaaacatatttccttaacatagaaatatggaatacatcatgaacagtcgacagtgcttgtggtaaggctagccgatacgctacctgcccaaccttctcaagtatttggaatggcccaatgaacctagggctcaacttacccttctttccgaagcgcctaatacccttcattggtgaa

SEQ ID NO: 406029 - DNA, 1014 bp, Cannabis indica
ttttttagcagtatggatgctataaaaaatctttagtcacatttcgtcttggccaaattggttaagagagcactacaacaatttttgccaaaaaagtggcagtggtcgcataaggggggctatggacccttgggtaaattttctcactcatatttgatatatgaatggtaaaaatataattttaccaaagaaaaaacccctttctatgtggtggctgaccactaccaccacttgtgccaaaaatgtggcaatggtcgaccaagtggtttccacaccacttggtagcttttcacacttggttttaacatgttatggatgaaaaaatatttttgacaaaaaatcccatccctattccttgtggtcgaccactaccacaatttgtgccacaaagatggcagtgatcgactaggcttgtcttttggtgagaaatagttttttttcacttgtgttgcactccttggtgttgagggaacacattttgacaagttccatttggttcttaatgagtggcgagcactaccatttccttgtggcagtgttctctaaaaattagagagcactgccatcttcatgtggcagtggttgcataggctctattgcatgggattcttgtgcaattttgaatttatgttcaagtctaaacctttttaagcctaaatgagttaagtccctgttggtttccttatcaaattgaggtctctagggtgaaaaaatttgtgcaggcccataaaccctagtctgggcacacttgggtgtgtgagtcccagtaccaaatgattgattaatgttttcgagtcccctagaagagccatggggccctcaagaagaatgtcttaacttatttgacatttataagtcttggtcaaagtcgcaagattgacattttttgatttttttgaaatttgggtataataagaatcaacaatatagacaaactatgttgtttacaaaaattttaaaaaaaaaaaaaaaaaactaactaatagcacgttgaatccatagcaagcaagttga

SEQ ID NO: 406030 - DNA, 576 bp, Cannabis indica
gtgtgagagagagagagagatagggataaagttgattggagagtcaaaggtgaagacaagagaaatgttatgtggtgttacaaacgcggatctactactaaccaagtagtgttggtttttctttcttcatttttgtgtggaggagaatggtgatggttacgcctaaataaacgctgagttgaatcttactctggatcactattatctctcctctttcttctctcatctacttcttttctattctattattgctttttaactcttactttctttctaccattattttatattattcctttttatttttataaaatgaataaatatagtgaataatagtgaggagaatcaattttgttcataaccatctccctaaggctatgtttggttggaggaagggagagtaggatggatggagaagttagagaggatggggagtatgaaggatagagaggattgttaatctcctttgtattatttggtataaggtgtgaggtgggaaggttggagaaaaaattgattagtaaaattataaaattgttcttttaaaaataaaattttattatttttttaagggta

SEQ ID NO: 406031 - DNA, 1213 bp, Cannabis indica
attacgttgtgtttcgagagttgattcgtctcgtcaatatttccttatgtgtcgcaaagcggatgtctcgctatatattgcatgtagttaatttgaatatttctatttaaaaacgaaatctcgagactgtgtcttccaatgtaagatggtgtctcatcaatacaagaattaggtttgtgtattcttgtctcgcctaagactatacagtgagcgatttatgaatatactctattaattctatatttgatgagttattctattttgcactaaatgatataatcgttattatatctggtggttcatattccacttgattgacatgtgtcactctctgaagtacaactgaatttcgggtataacaattaccccttaaaaagtactttttaagttattacaaagggtaatttaaatttttcttgacccaatttgaaaaatcacatgcttttgaatttggtagttcatggtttcgatgcacatcattagcatttaatgaccaatcttttccaattctctcttgttcttgtctgttagatctctattttttttaatctaacggtgaccgatctcaaggtataaaaatttaaatgaaaccataattccactatttttacattcaaccaacttctaagccttttttttttttttgagtaaaaaccctttttctaatatgccatttatgtccgtgacttatttcctacaaatttcttcacacttaatctccaatctcaaaagttcccaagggttcatttagtcgttcatctcaaacccagttacaggattcctccctacgcgcaaacatccatctctgactagtaagttgttcatcctcttccttcctagtgtatatatattttttataactaattgcatcatcgttcttctttgcttggttttggtagttttgatttaattttttgggtaattttaagggtttagatagagtaaaaattttaggtttatcgtatttataagttttcgattttaataaatttcttccaggaattagaattgctcttttataaaaaaaaaatgtctcaatctggttctgaaatttatttttcgggattcttagaaacagagtgccctaaggaattaacaattccatttaaacccaatccagaaaccccaatccttacttgaagtaaatgatgcaaagattagggaccatttaataaaaaccaatcacaacaaagttgctagtcgctataagcga

SEQ ID NO: 406032 - DNA, 580 bp, Cannabis indica
aaatatgatttgttatttttatcattatttaattatctttttataaatattttacatacatataaaactttaatcaatggtatttttataatttaaaataatttatttcgattttaaaataatgtaaacacattaatgaaaaatattgcttatatctgcaagtcaagtaaataattttttctgattctgattgatggttaatccgattctaagtcattctaattatatgtaagtaagcttgtaaatctcatctaacacaaagttatattcggcaaattaagacacttttttttctctaaagaaagaacacttgttcttaagaatacatattcggcaaataatattatctgattttaatgacagtataagtttgttattttgttaagagtaaattgcggcataaatatctaatgtttcagattttacatacttaaatacttaatgtttatttttggaggcaaaaatacctaatgttacaattctcttacaccgttactaccacttctgttaactcataaatatggacacgtgaagggtttagatgcgttacattttatttttattttatttaaaaatttaa

SEQ ID NO: 406033 - DNA, 660 bp, Cannabis indica
agtgtttatgtggtatatctcttgagatgattataccatagatttgtatcaatgataaaatacaaacacatacaaacatgataaatatataaatataattggtattggcatacttaagataaagaaaaaaatgaagctcaattcataaatgcaattcataactaaaagagaaaaactttattaatattctcataaaaaaaatgaattgtctgcataattatgatatagggaataaaatcccaaaccaataattgacatcaaattgttcataaaataaaacaattaattcaaaaattaaaaaaaattctgagcttcatcttcaatcttggacaatctccacccttctgtccaaccatccgactcaactcgctaggataacaatccaagtttaagcagctggagctgaaataagaagaaaacaaacatggttagtagatctagaattaataacccaaggggataataattctctaaaacacatgagtttatagcatagaaagaaataccttgtttctttgctagaaacatagggcattggggtttccaatggcccttttcattgcaatagaagcattttccttttggcttttcctcgggattagcagcctttttctttttaactattttcacagctttaataggcttcttgctattcttcca

SEQ ID NO: 406034 - DNA, 578 bp, Cannabis indica
gtctttgacctgtttcaaaacccccaaatttcgcgacgtgtacacccataaattttctaatatttggccttgtgtgattcttttaaatatcacgtttggctctgtggtcttttaaaggtcattcgttataccacacttttcaggcccaaacgtgaggagagtgtattaaaattagtcccacattgttatgtgtggaaataaattatcatatataagatgagtgggctactttttcattgccaattaattttgagataaaacctcattcatcttatttcaaattttaatattaattattctaatttgtttagagaagcctgttacgaaaattataaacactacgcaagtatacgcaatcaagtagtaaaactcacacaggtgaggtcgaaccacagggaattggattaaataccactaaactatacttataattctatttggcaaatcgaaaacaattatgatttaagagaattaaagtaattcagaaaacgtaaaacacagttaaagtttaagcaatatgagatgatagggaggagaatcctgttgttgtttacccaaatcgttaatgcttaattact

SEQ ID NO: 406035 - DNA, 579 bp, Cannabis indica
agtattcctgtcggtttctataatcgtcgcctatacgactgtcgtaaaatgagcagaaaaggcgacagttacaaccgtcgttaatgtgaatttctcgacgatttaaatcgtcgcctacaactatgtataggcgacgatttaaaccgttgcctatagtatagggcacgattataaactgtcgcctatacccagttataggcaacgattttaaactgttaggaatgtaaaaaaaaaaatacagatttttctaccatttcccccattttttttcctgcattagttttataattttacctaaattaaaataaaataactaattaattttgttacaataacaactaactttataacacattaaatttatataataataaaataaatatatataataaataaaaaaagtatataaataaataaatgtatttataccgagctaggagagagagaaagagagaaagggagacggacgggaggtggtggtggtccaacgtatgagacgaagatgagagggacaccgacaggaggaggggtgggtggagatcgatggacaagagagacaagaagagagagagagagaga

SEQ ID NO: 406036 - DNA, 521 bp, Cannabis indica
atgggttatgtacacaaagtgtctaacattagttctactaatactattatacttttttttaatgaaaaaaaatattggctcattcaaatctcataaataaacttagtgggaaaaaatttggaaacgaatactaaaataatatcattaatcaataagaataggccctgtaagaaagcattaatagaggtgggcatccacacacatttatttaccatacacttaatatatattattcacgtaataataatgtatattaccaaattttaatctacatattattatattaaaaataaggctaattaataattttccccccgaactattgagattgttaaatttaaggatttttgtctaaaaaattctaacatggatgagacttcaagggacatgattttagtacatactacatatcaaggggcatgatttagtagatatcaaagtttagggagcatggtttagtatgtaaataatcaattaaataataaaattgaatgaaattagacaaaagtccttaaatttaa

SEQ ID NO: 406037 - DNA, 749 bp, Cannabis indica
ccctgagggactcctcgaagttttaaacctcgcttaagatagaatcagcgagaggtggcgaggatgaccgaagtctaatcgcattcgagacaagagagtagctcgcatatatcgaacatatgcgaacatcctccccgtgtccttgtataaaccaggagaacgattctctataaatacgagttggtcttaagaaccctgcagcctttataatgtaatataggcttgcatgtctaggtcctatcagcccgtcatgcgatgtccacaagaggcgactacctaaggacgcagacatcattggcccgtttgcgaaggcttttgctgtagggcccaaagaggttgaactcgcgaagaaacatattgctcagcttcaagaagacattaagaagctgaagcaagatgcgtcttctaaagtcaaagaactagaggaacttcgtaaggccaaggagcaggtcgagcttgaagccaaggcgaagatcgaagagatgtctcgcgacttggaaactgagaaggagaacggcaaaaaatagtacgaccaaccggtctcggactacatctataccactctttccaaagttccagacttcgacttctcgatccttggagcagaagccgcagaaatggccgaggcttttcgcgctatgtcacccacaccaactcaaggtggtggagggaaccttctcgaggagaccgaagtcgcggaggtggaggaggttgagaacgaggtggccagcaaagtcgcggatgaatct

SEQ ID NO: 406038 - DNA, 613 bp, Cannabis indica
cttggaaggggaaaagctaaggtgagccctaatactaacatgtttttccaagttttaaagttatacatgaaatgttgagttagtcattattttgctaagatttcaattggagttgttttctgtaggttaggtttgatgttttagaatttgagttgttgttattgattaattgtgtggttgagaaagtttgagttcaagaactcaaagcttgcttaacagtggtactttttaattcttggtgtaattgttgtgtttaagctgtaaaatatgtttaatatgctatatgttgatgctctggaaagtttggtggtgattggggaagattggagtaggttttgtaggcttaaagtttgagaattttcgtgttgaatctgcccagacaaccggaattctaattagttcagggctgttccaaccgaaattccagttagactgtatcggagaaggccaattttcgtattttggccacaacttttcactcgggtgtccgttttagacgttttatgtaccgtcttaaagcttatgacgagctctactatatggtatataaactacagctaaattatgtattttattttagggtgtcttcaccacaaagttcagtagaaaaacc

SEQ ID NO: 406039 - DNA, 1050 bp, Cannabis indica
tattagcggcggagagggtccgcggctaaaaagtccgcctctaatgccttcttttgttgtagtgcgagataggaatttattgtcccaagactggatccgcttctgcactttgtcttttaaatatctgaaaatgacattcttattcctgccaacagtactcggtagccctaagtacttattgtgctcagtcgcttcttgaattctcagagtagtacagatggtctgtcgtatatcagatgaagtattagtgctaaaaaagacagaagacttcccaaaattaacacgttctcccgttgtagtagcaaacatcctaagtaattgaagtacccgattcatctctccattagtcgccttacaatacagaaaactgtcatccgcaaagagcatatgagagacactaggtgctccattagctactttacaaccatgcaaccacttcctctcttcaaatttgcgaataagagcagaaaatacttcaacgcacaccaaaaaaagatatggtgatatagggtctccctgtcggaggcctctactaggcacaataggacccatagtgcagccactactcacaatttggtactgtaccgaggataagcatccaaagataagacgaacccatttatcagcaaatcccatccgaccaaacatagcacacaagaaatgccaatccactctatcataagctttacttaagtccaatttcaacgccataaacccatccttgcccatttgcttccgcttaagataatgtagaatttcaaaagagaccataatattatctgtaattaatctctcagggataaaagcgctttgatgtttggagattacctcaggtaacaatcctttcattctattagcaaggaccttagtaataactttggcaataacattgcaaagataaatggggcgcaactcactcatttgatcagggttcttctttttttggaattagcacaatattcgtattattcattcctaccagcatctgctcagttgcaaaaaaatatttaactgtatggatcacatcaatgccaacaatggaccaatatt

SEQ ID NO: 406040 - DNA, 848 bp, Cannabis indica
gcctaagtgatattttaacatcatttagtctatttctgtatcctggcaaagctggccaccagttctcggagatgttgttgttctgcagaaataagagactcgaaactcttcatttttgagtgttcttcccaagtcagaaatgagaaatgtaaagttgtgaatttgacttttttgacttcatggatcttagttattgtgaaaaactagatgaacgatcgaaatagaatcagaattggataagcagaacccagcgcactaggccatttgtcaacttgggtgttggatgcttattttggagcttccaggatatcgttttgatacttccaaggttctagaacttgaggacatggtctcctaccctgtttttgaccattccagatttaatgctcgaattatatttaacatttgaatgattgaaatcagtgcactaggttgattgtcaacttgagcattgggcccaacaccaggttaacctaggtgctgggctttgcttccagggtctcaagttcgtggttttctccccgagtttgcttgaatcttccttattttttatgacaaaaaaaaaatgtctgggacacttttttgagaacttcattggaaatagaccaagttaacaatatgttaacttgggcgttgggcccagtgctaggtgtcaacctaggcgctaagtcccatttatgacccttcgggagtttcgtttggtcctcgaaaatagttgaatcttaatctttgctgaaaacggagaagattcttggaagagttctcagaaaacatcaatgaaatcggcccaagttgacaaaatgtcaacctaggcgctgggccagacttaggtgtcaatctgggcactg

SEQ ID NO: 406041 - DNA, 579 bp, Cannabis indica
tttgcactaagatagtcttggaactgaaaccctaggttccgagcttgacttttgaggtgctgattcatgtattttcagctctcgaggcttggaattagttgctccatgtcttcatggtatagaatactgaaagacagcactactacaaaaacgagtttttgcatcggtcaaggcatctggtcaaactctttgaccaacgcgtaagtcagcctacacttttttgcttcagttacccactgtcacaaataattattaattagcgtcaattatctatccgacgataaaacaaaaactgaagcaaaagatgaaatataaaataatatgtatacactattagcgttgctctacaaccgacgcaaaaagccattatatacactattagcgtcagtgcacaaccgatgcaaaaaggcattaaaaaaatcacttatgggcctcaacccattttaaaaaaatctaaccctaaaatataaatctaacttttaatcctaattttcttctcagccacccctctctcatctatcttgctctaacctagttccctctcttcacccatcatcaccttctgttggaaattatttt

SEQ ID NO: 406042 - DNA, 890 bp, Cannabis indica
ggcaaagatatgcttgcccactacattaagcggctggttcctgaggttagtgaacaactggctggtgctgacaatgactcttctttggagctgctgatgggcggagtcttaaaggaattcactagggtaagtctttctttacactttcctttaattttctttacttagctctaatggtaaatttttttctttgtgcaggctagtctgaagttggcctacacttactcccgagctaagtctagtgcttctaggaacacggctctgtccaacaccatgagcgcggagtggacttcgccaagaaggatgctaacgacgccagggcggaacatagacctgttcggatggagctgggtgaagccaacaagaagctctttaccgcccagaagaagatagctgagctgactaaggatctcgaggtttctgactgtcttgaagagaccatcgggaccttatctgctgaagtgaacagtcttcaggatgagaggaattctcttcaagcagttctttgtcgggtggaggaggagaagaagcctacggaggaggagctttcggccgaggtgacaaagctgaaagagaaggttaatgctcttgagacagccggtcttgagctcttctttgacttttagaaggctaatcctcaggccaactttgactacttgggtgatgctaatgacatgtacctcgcgttctgcgcttctcaagtagcctatggtgaacctgaggtggctgcttctaccttcggccaaactgctgatgtacctcccattcaaacaacagatcctctagcttctactggcccagaagatccaaaccaagagcttgggactccaactgtttaaacacttctccttttatctttttatttttttatatatcttattcgaccataa

SEQ ID NO: 406043 - DNA, 609 bp, Cannabis indica
aaaattattaaaaatgttaaaagttagatttcttgttgtgttgaagttgtaatatttagttttgtgtatttattttataattttttattttattttattacttgacagttgttggttttagttatttttaaatttttaattgcattaaacctacaagaataatatttttatgaagtattaaacttaaattaaaagtgatatttaatttttacgtaggttaatattaaaagttaaatatataattggatatctaaataaaaaaagcttttacttaccaacagggtcggccctaggcataggcgggctaggcccacgcttagggcccactcatttttgggacccaaataaaaaaaaatatcttttataaaatatacatattttttaataatttttaacagtactatttatttttatagtaaaggcctaattttttttttttgcctataacccatttcaattcaaggccgaccctgcttaccaatgcttacatattcataaaacaaacaaacatagttgcgttaatttatagccttattggagctcagacagtcagactcatcatgtcagctagatatattcactataaaaaactactacttttagtgacaa

SEQ ID NO: 406044 - DNA, 750 bp, Cannabis indica
ttaattagttattgactttttgatatatgaccaatcctataatacttatatgtatcaaaataaaaattaataattaggagtctcatcactatatacaagttaaatactctctctacagcaattaattaataattaaaaggctaaactaaaattaatttggaaattaattaaaacaaaaaggaaaagtttaattgtgtgtattttactagtactcttaaaacgaattggtctaaaactaattagtaagcaaaaaataaaaaaaaaaaaaaaaaacttttgctaaatgaaaaaaaaaaaacactttttattactaagtcataagaaaaacaaacacaaagacaataaattaaggcatgcatatatgtgtatgtgaaaaaataataacaagtgataactattattaatatttataattagtctacgagatgctaaaaggtatcagtgttgtttagtattttttttagttaattaggatatttactttccaaactttaacatgtactaaatatgtctcctgaaattttctagccgttaaaaattcccctagctttgaactattgacaatgttagatttaaggactttgtcaatttcattaattttactatttcagtgattatttatatactaaatcatgtcctcagactttgatatctaccaaatcatacccctcgaactttgacatatactaaatcatgccccctgaactttcattcatgatagattttgttttttttactaaaattggataa

SEQ ID NO: 406045 - DNA, 501 bp, Cannabis indica
atgagtcaccacttatagaaagtgttttaggcactactaatgaccaataacaatattctttaatttaccccgaaacaaaagatattcaacataccgttttagtaaacaatttagtaagggtcttcaaatatttttgtcttgcaataagacacaatgatagtgtgaattaaagttctcacatagtttatttgtgtcactctttccttctttttaaataagatttttgccagcaaataaataaaatcttactataacaaattttacatttagtcacaacaatatttataattaattataaattataatttttatgttgtggttaaaaattctgtggctaaatgtattagtcataaaaatcacaatttattatgactaaatatgtttttaatcataatatttattgtgagtagaattaaattagtaacaattatatctgaatgctatattttagtcaaaaataattttttgttgtgattaaaaatcacatttaattacaaaaaa

SEQ ID NO: 406046 - DNA, 887 bp, Cannabis indica
ctccatccagaatacttgcagaaatattataagatacttttgcaatcgttttgaggaatttgaacaagggtttgaaaaggaggaaacttacagagtttactatggaaaagaagcggtagggtttaaaaaatgtagtttgacaaatagtaatgtataggtagaatttaggtacaaattaaagaatttttggcagctaaaatcttgtagttgttgtattacctgcatttaaccttctaacctcaaattttgacagtaacacccttcaaactactaaacaagtagtaaatataaggtattatccagttgattgctaccatgaattgtttatgtgtatactcttgtacacgtgacacgtgtttatattggtacacctaatattattatttataaattattttaaaattaaataaaattataaaaatgacaaataaaaatattataaaatttgaaataattttatatttttttaaataatagtattagttgtgccaatataaatgtgtcacgtgtacaagggtgtacgtataagcagtctatgttggtaggtagctgtggaaaatagatgacaccttaaatttactaacaattcaaaagtttggagagttttaccgtcaaaatttgagcttagagagttaagttcaagtagagtgatacttgagagggtttaaccgtaaaaacactcagaatttaatattatttttacttctagcacatggacattttctggcgcctaaagaattatgaaacataattcatctcaaatgtttttttatacaaaaaatttgaaaataatttacatacgatgtttgaaataaaagatcaaaataatttatttgcaggcgttaaaaagaaaatatacgtatatacatatatggaacacttcttaa

SEQ ID NO: 406047 - DNA, 522 bp, Cannabis indica
aattaactttaaattattttttttgaccaaataataactttcccacatgtttacaagtatatatattatttcatgtaaatttttcaatttttgttttttgagattttattacaaatcttcttttaagcatatatttctcccttttaaattattttctttgaccaaaacaattaagacaataattatttattttattaaaataattaattagtgaaaactcatcttatcctaaaataagaaaaaaaaaaaaaaagaagaatgattagaagtgagactaagataccataactttttacaaataataaatcttagacttatattattaatatttttcatcaaacctcaccaattacatcttaattaattaatgaaatatctgtagacaaaaaaaaaaagtaaaaatgtaaatgaataaatatggttcccaaagcaaaagaataggaaagaaatatggtatttttgaaggtttgagtttctgaatgaaagagagaaaaagaaaaaaaaattaatggaagaggtaag

SEQ ID NO: 406048 - DNA, 833 bp, Cannabis indica
aaattctcctattactctttgacgggctatcctgtgaggtttttgaattggtgatgaccaccctttggtggttgtggtatgataggaagtccatatatttggcaatacgcagtcaagattggatagtattctagacttagccaataaccatctgacagagtataaggagtatgatcggcgagaccttcatctgagattgggccttgcaaacccagttgtaacccgagctactcgatggatgccacctcctcctaaatcctttgctctagcgatggatgcttcagtgattccagagaggggctttgttggattggggggagtgatacgggatgcagaggatgtggtttagttggcgtggtcatcagtgtgttaggtgatttttctgctaatgtggcggagctgcttgccattcgtctgggcttgactcttgcacatcaatttggtttcaatatctccattattaatagtgattctactgtggcaattggttgcattaataacattcacattaattttagttttcagtctattttattagatatctattccttataagctactagtttgagctcaagccagtgatgtttcaaatgctccaaaccgtggggcaattcagcgggatgccaactgaggatcctcacctccatctccgttcattcttggaggtgagtgattctttcaagatccaaggagtgagtgaagaggtgctaaggttaaagctattcccattctcactacgagaccgagctagatcatggatcaacactttgcctcctgattctgtcaccaattggaatgatcttgctgagaagtttctgaggaaatactttcct

SEQ ID NO: 406049 - DNA, 723 bp, Cannabis indica
acatagttgttctttcttttcgccactagcagtctcttaccagtaggtccgaagcagcaacaccatctcgcctagacgcctagtatcctttggtgtcacagcttcccttcaagttactgttcttggaggttccctagtcgttacccctatctattactatgttcgagtactctgtgtatatgaggagatagcactggtaggaatattttcgcatcagattcagtctcccaatattagtatccatccttcgataccgcaccatcactatcaggttaatatcaatgcatctattttaaaagagaattgctaaaaggcactactaatgtctagcacattttttcgtgtcataccgctattggtgtaattaagtagcgggtcctctaaaacttaaaaaaataacttttagattatattgctaactaatcttatgccaccatttataaaaagtattgggtacaattggtggccaataacaaatgcttattttaataagagtatattgtacgagcaatgcaccaaatattttagggtgattctacaatgcacctccttaaaagggatgtactgatgcaccctctacttgtttcagcatccaaaaaaaatttttttgtctaattttttttcatatccatgtacgttatagctatttaagatatcctacaaaattttgagaaattcggaataatttacaatatagaaaacaatgttcaaacagtctatttt

SEQ ID NO: 406050 - DNA, 575 bp, Cannabis indica
tttttttttttcaattttgcatcacaatgactttcaaagtgctataataaagtacactgtgtgctacaaatctcttaagtcgtcattgttagaaataatagaaagattacagtggaagaataaaataagatgaatagaagacaaagataattataactttaaacaaaatattacaattaaggacaatatattaaataaagagttacaatccaaaagcataaaatacaaataaaagaaaagaggtacaactcaaaactcaaagatacaagtaaatgtaaactatataaaagcatatatctattctatataaagtatgcctatataactgaaattcttggtttatgagaaattcatggtgactttttatttttatttaataaaataataaaatattatttatatataataaaataataataaaacaaatcctattaatatttgaactgatatttagcatatttcaactctatatatatatttgaactgatatttagcatatttcaactctatatataactctagaatttaaaaatatatatataaaataaattgaaccttaaaccgcatatacaatt

SEQ ID NO: 406051 - DNA, 868 bp, Cannabis indica
atctagtcgaataggggactttccagctcttatcttgcttgtggtagcctctgtcgagccgccttatctagccaagtgttggctttcttcatggcatgttttttagatttttgatcttctctctccatacatgcctcatcttctcttctttggcatctcttctttaaacctgtcattgataagtttcaagcttttgaagcttttaaaaactttttaattctcacgttagattgtaatctttttggtatgttgatccacatgacaattttagaatgtataaagtgtgatttcctgatggaaaatatgcgattttggccttcgttgtgattcttgactctttgaatcatgaggaatacaaataacacattcaattttctttttttgaaaaaacacattttgattcaaaactaaccttggctagccctaaaggtcttgtttaggacctgaccggccctaggatttgatcatgggaggtggccagctttagggtttcctcctacaaagcaagcaagttcatacctgcgtttggtgaccctggccggatcttggttgagtcgtgggaccgtgaccgaccctctcaaagcttgggaaccctggccagcttaggccttggttccaagcgggtggccaatttctgtcctcttttgactttgataagaatcctatcatggccctgtacaatacaaccttagtctcatacgtggttcctttagaaactctgtatgaaacttaatggcgagtctattatagtcgagtgctcaacttaagactcaatatttgcaaagttgtaaactttgaatttatacttcgctgaatcccagtcttgtacatgttggaaattattttaccaggatctagattttacaac

SEQ ID NO: 406052 - DNA, 1005 bp, Cannabis indica
tgtctcatactaatggagtagtgcccatccttatttctagccaatgtggaattttagttgcacacccaacaatcctcccctcaaattaaggaccacaaacttgtggcgtcccttctagcgaaaccaccttgcactgccataatcaacactaatggaactcgctgccttggcatcaactttgtcaggaagacttttgacataggtcctaacaacgatctccatcttgtaccgttgtaatcattaacggaacacgctacctgactacctcaatattaggtagacttacgatacaatgcaccatacaaatttttaattacgatgtcatcacattaaagacttctgccacacattgcaaattcagcccattatccgaaagctcctaaacttttttggctctgataccacttgttgggccccattcttcaaccttgttgagccaccacctcaacttgactccaacattagtatgatattgtctactttgggcctaagccctcacagttttattttgggcaccttcccaaaatgcctcatactaatggagaaggtggaatacttatatttaagacaactcttgtctattctttcaatatggaactttggttgataccccaacaattctcctctcaaactaaggactaacccgtgacataccctccagcgaaaccaccttgtaccgctgctatcgccaaatggaatacaccgtctaaccttcaatattgccatgaagactttcaacacaagacacgaaacacagatctccatcttgtaccgtcgtaatcaccaacgagacactccacttgactactacaatatcaagtagaatttcgatataaggcagcatagatcttcaattgcaaggtcatgacattgagaaattcttgaacttttggtttggctctattcttccaccttgtcgggccaccatctcaatatgactccaaacattagtatgatattgtctgctttgggcctaagccctcagttttattttgagcaccttcc

SEQ ID NO: 406053 - DNA, 687 bp, Cannabis indica
ttttgtttcgtagtagtttttctacacttttttatgaattcgaacagctcctgttttgattgattctggtcgtcttctcaggtgaagtttccaaattaattgtagttctctttctggttgaacttctgttttgattgcgctaggttgctatgtggttgtgcggtggttgcccaagaagcatggatcttgggttgaaggtatgtgtaagtggtatttatgtaattttttttatttaggttgtatatatatttatttgctcagctggaagtatttttgtaatattgttactttttttagttaaaactgaaaaaagtcttaaaatatattagaaaaattagagtaattaaatattggttttcacgttatttaatttaataattattatcttaaaaaaaatttgtaatactacgcctctacaacaattagcattaattagcgttgtacaaaaaattcgtaaaccgcccaaaccgaataacccgtccaaaccgaaccgaaaaaatcgataaaaatgacaaaccgaaataacccgaaaaaaatacaaaccgcccaatctgttaattgggcgggttaaaaataggtccaacccgcccaattaaaccgaccaacccgattttgcacctttaatttttttttttaactttttagtttttattatatataacataaaatgattaaatatattataat

SEQ ID NO: 406054 - DNA, 607 bp, Cannabis indica
aagggtcaatcctaggaagagggtcagagatcccaacttctatgtccaaatcctggggatgttgagaagtaaacaggtttgagtagtacgattgaataagagagaggatggaatcaaaatcttgaaagacaattccatcctcagaagtcagggattcaatcctgttacttcgcttcctgttagaagcaaatttatggaaaaaatgagtgttcttatcacccaggttgagccactgaatacgagattgttgcctccaataagtttcctccttgaacaagagagaatcaaggttcgcttggagagccttttgtcgagagtaggattctgaagaattgtcttcaaaattcctagcctgttcaagggcaagttgagcttgcttgattcgttttcgaaagccaaagaaagctttatgcttccaatttgaaagaaaagtggaacaggtggattgctttaacaaaagatttgtggtagggtcatcgctgggggtgtttgaagaccaagcttccaaaaggacatcgttccagtgtggttcagagagccaaacattttcaaaaagaaaccgtttgtcttttttcctggaaaattgggaatcatggttctgattgaa

SEQ ID NO: 406055 - DNA, 671 bp, Cannabis indica
aacaaccatgttagcaacagttacaacgacccaatctcatacatcaacaatgttagcaatactaattacaacaactcaatctcatacaacaatcatgttagcaaatctcatataacaaccatgttactaatcctctcatatagaaactttgttagcaacccaatctcatacaacaactatatatgttatagcagtaattacaacaattcaatcgcataccaacaactacattagcaacacttacaacaactcaatctcataacaaccatgttagcagcccttatagcaactcatgaatatcatatagcaactatgttagcaacccttatagcaacaaaatctcataagctatattgttagcaattcttacaactacccaatcttatacaacaaccatataagcaattcttacaatagctatgttagtaatctaaccttatacatcaaccttgttagcaacccaatatcataaaacaaccatgtccaattatatcttatacaacatgtagcataactcaatttcatatacagcaaccacattatcaaaccttaaagcagctgagtctcatacaacaaatatttcttatttgaaattataatcattatacatcatttgattttttaagctataattttatttcattcttattttcgaaaataaataacattgt

SEQ ID NO: 406056 - DNA, 455 bp, Cannabis indica
tctttgtccctccactcggtaaaaataggccactgttcgtcaaatgcgaggtttactgcggcacgtaattcctcctgatcgtgatgtagggtattgttgtgaccctgcatgagtccgagcgcagcgcggaggttttccaattcagttgcgtctccgatggtcatctagacgttgatgcccggtggaacagtcgtgttatgaatgccctggctgtgtgcggaaccgtcatttccagtctcgtgcacaccaggcacagtttcagtaataggagttgtgccaccattcaccacgcttcccgtctgtccaggattgacaacgggtggaacccttgaactccttgggtcctgcaacgtcggatccagcatctgtgagtttgctaggtcgaacaggcctctacgagtttgtaccatcgtgtcgaaagagcgatctatgattctgctctcaatgaaagcacc

SEQ ID NO: 406057 - DNA, 543 bp, Cannabis indica
atttatactaaatttttagtaccaataaagttacttttaaaaaattagtctacttaaaagtacaatttcctagtttttttttttgttctaaattgacttcttagtatgatttctaacaataaatatttttattgtattatatatatatatatatatattatatgaaacagagcataattggagttttcaagatgaattgcgccttacactttccattgtttagaaacatttttccattatgggcacttgcagaataccgcaatcaagttttattgttgggcaaggaccaaaacccttaattttacaatatggtgtgagatcatgtaatgacacgtttattatacagtattcgaaatcagaataaattaatggagtaatataagagaataaatgaagaacaatcagaatcaatatttgtaatatgttgtttattttatcaagaaatgtaattgaaatacttaaattgactaaattgtcattttaagttaaactatagtagtggtagttattttataaaatatattttaaaagataaaattatca

SEQ ID NO: 406058 - DNA, 640 bp, Cannabis indica
gcaaattacaaaggaactgcagttcaatgtctgaatctttactttatcaacatataccactactattttcttcccatccttaatgatagatcagttttgtctgagaaaatgaaagcttacccgatgtgaagatcttccattgttgttgagaggaagcttgaaatccttcctgctccacctcgtcagcccaactagtggtctttttagatcccaatttcattttttcttccttcatcaaaaatatatcctccagtttatcatcaacacacagttttccttctaattgataatctttttggacattttacaaaaatattgaattagggttaatacttttcaattttaatgccacacggcagatgttacatttatactgtcctcccccctccttttttttttcttttatactgtaaataccaaaaaaaaaatatgaggcctctatctatcacaaccacagatagaatcactacaacaacacagccggaaacaaccattaattccgacaatattgagcaaaaacagtaaaattaacatcaaataaataatcatgaaaaaacaactgtaaaacaacactaaaacaatcaaacaaaataaagaaaaaaatgatttaaaaaaacaaacaatttgctgcagagcctca

SEQ ID NO: 406059 - DNA, 644 bp, Cannabis indica
aaactctattatagtattaaatttaaatcatttatattataaatatttatcatttttcgaaaacttattaaataccaactataactataatatacaatatcatataaagaaagagataattttaatgtctaaaagtaaaataatactactaccaagtcataattccaatctatctatatattcatataattctgatacttttgaggtaatgaaataaaatgaaatggaaacaattttcatttcatttctttgtttaattgcattttaaagtattagaatgaaattcaatggaatgctctttccactattttggtggaatgactattccattttaaaaataaaagaaagaccattccaatgtaacaagaaaaaaaaattaatggttttattatcaatttttttttatgtattttaaattttattccattgaattcctattcctatattttcatttctcctaaccaaatgccacctagagaaatttggttttgtaagattttatctttttatattattttgctcttattttttctcatttttctaaatattttcaaattttagaataacatatggtatatgatatgttataaattgtaaataacatatttaattatttatttttatttgtattaaaattattactt

SEQ ID NO: 406060 - DNA, 698 bp, Cannabis indica
tattagggagttctatatggtgattcaaacctacactttatacctgatttaagcgaaactttactaaaatatttaaaagaaaaaaataccataaatttttcttttctcatttcaatgtagcagtctactgtttatactagcaggtttcattgatcatcatcagaatttggagaagaaaaagctgatggcagagacaatcttaagcccagtaatagagaagttgattgagctgcttgcccaagaagtaaatttattgtaaggagttcacagagaagccaatagtctaaaagatgaattacagatcattcagccttttcttaaagatgcagaagcaaaattggagagaggacaacttagagatgctacagaagtcttaggccgtcacataaaaactgctaaaccgtgggaaccgtccaacccattaaaatctgcccacatagaaaccgcccattaaaaatctacaaaaattaggttgggttgagttttaacccgctatttggcggacgggtacgggttagcctaaaagggcgggtccaacccgtacacgctatttttttttaaaaaaaattataactaaaactaacaagaaaaaccaaaatcctaaacctaaaactaatcatattatataagttaaatctgaaagtttctttgtttttagtttttattttttattttttatttttagtattctttgtttt

SEQ ID NO: 406061 - DNA, 550 bp, Cannabis indica
agctcatacataaccaaaagttaatcaatttagaaataaaatagatatatccaagtattcagttgcaaataacggtattttctacttgaatattatactatcaaagcttcacacataaaagtatagagtaatgctatcaaaagactttcatctaatccccatattagaactttgaactcaaaaatcatgaatacataaaaataccaaagatttcacggtgatggcagttgttttaaaattatatggtgattattctataaatttattgtcttctttttattttagatgtttattttgtgtgaggattgttcaacttttaattttttttcactataacgtatatttgaagatatttttgttatgtactttcttgtatatgatgattttaatttttaatttttttattaataaattcatatatctattgaaaaatacataaaaataagtttaaaattataataattctattattcaattaatattttttatatataatttaaaattactataaacacagcgaagagcattctgtttatactagttaaataat

SEQ ID NO: 406062 - DNA, 657 bp, Cannabis indica
ggacccggaccctcacctagcttcagaccaaaattgagacacgaactcaggccccgacatagtcgtgtacccagaagggaactgagagccggacctggacctaaatctgggacacgatcccaaacatagacttggacctagatagggctccggatatgaacctcgactcggaccaagacacagactgggatcgaaatgctagacctagatcaggatcgagatcctgacccagacccaaacttggacccgcactcgagaccccaacttggacctggacccgaacatagacccaaatcggggtccagacctcgacacaaacatggacacagagtcggacccgaactcaaacccacacctaaaatcaaacgcaaagctagacccaaacctggaccaaaactcgaacccagaccaggatcagaaccaacgacttagaccaagaactgaatccaaactcatatcgggaatggaacttgggactcggacccaacctagaccaggacccaggacgcgaacccactcccggaaactgatctggacctagattgaaatctggacccgaaccctaactcagacgaggactcgaattacgacctgaactcaaacccaaactcgaagttagaatcgcaaatcaaactagaaccgaactaggactaggac

SEQ ID NO: 406063 - DNA, 514 bp, Cannabis indica
tctactatgtttatgtttattagaccaaaaaacagtcacttgaagacccctaaatctatcctcatagttgaacatgacattaaagtcaccaagattcaaccaacgatgatttaaccgaacataccagctaaggacgaccacaaatctcttctattagctatagagtttttcccataaacagcagtgacatatgatgtgtgtcgtaagccgttttaaatttactaaataattttattccaatacttacaattatttcagtataaaaataaatacaagtcgatcccacgagaattatgtttactttattattcaaaattaaacaataataaaaagggggaatttttttttttacttttctcttagaataaaattaacaaataaattgagaaaataaataagatactacgatatttaagaaatagttaaaggttaatcccaccctcaacaatcatccttaattaattcttaataataaatgttatttcaattttccaatcaaattattagtcccata

SEQ ID NO: 406064 - DNA, 654 bp, Cannabis indica
aaaaaaatggggaaggttagatggcgactggagatgatagacgttggtgtgggacctctaggttcctcgacggcagcgttgaaaatatttttgggttgagaaaaatcgagagtgagagaaagagtagtgagagagatattagggagagaagtagggctgaacatttttactgggtttgacccgaaacccagccaactcgctcagatactgaccccgaccaacccaaaattttaaaaaaactcgtttcaattcgggtgggtacgggttcaacccggtacaccttttaaagcgggtttcgggtttgattttttaagtgaccgggttttgggtcggactcgaactcgcccgtgaactcgatttttttactcttacataaactttaataataataaaagtgttgattagatttttagccaatcgatgcagagtggtaataaataagatttaaaccaaaatcttaacaataaatgtaaataatgatattgaaattcacaataaatgtaaagaaagacaccaaaatttaaagagatttggccccagatatcggtaatagcctactccccttgtattttattaattagagccattcatgaagcagccatcagtcatcagtccatgaagcagccagagtgacgtactcgtgtataagagcca

SEQ ID NO: 406065 - DNA, 724 bp, Cannabis indica
tttttttttttttgaaaatttgttattcaagtccttacaatttttaacattttcctattattaataccactttcacaaaaatttgcgacagtcttaaaaacgatttttttcaggaaccgttgctaaaaaaattaagtaactatttaaaaccgccgggaaaaatttagtattctcgatggtttaaaattgtagtatacaaagtaggcgacattttttaataaaatgcgattttttaatggacccttataggcgacggtttaaccgtcgcctattaaggatctattaaaaaatcgtcacctacttctcgccacattttccacgtgcccacttactatttttctatttcttacatgcccacctatttcttctccatttcccacatcctaaaacgaaaatcttaactctccaaaatcccacccacgcctccgcaccatcgctctcctgtctcaccgtcttcctccctttcttcttgtctctctcgtccatcgatcttcacccacaccttctcctgtcggtctccctctactctgcgtcgcatatgtccgaccaccaccacctcccgtcggtgtccctctcatcttcgtctcatacgtcggaccaccaccacttcccgtctgtcttcctctctctttttctctctttctctgagctcggtataaatacatttatttatttatatacttttttatttattatatatatttattttgttattgtataaatt

SEQ ID NO: 406066 - DNA, 727 bp, Cannabis indica
caataataagtttcgctggaaaagtcaccgacaccgagaaagtcgttggtgtcggaaaagtcgccgaaaaagatattgtcgctggaaaagtcatcgttgctggaaaagttactgtcaccgaaaaagtcttggaaaagtcactagaagtagatatctcagatataaataaaaatataatcggttctataatataatgaataaaaataaataacacaaaataactcaaactggttataattgaaatataactaattctgtaacataataaataaaaataaataacagaaaataactctaacgagttataattaaaatagcactggttctataatagtgttataatgaataaaaatgaaaataaaaataacacgaaataactcaaaccgattataactaaaatagaactagttatacaatataatgaatgagtatttttagagtagatatggtatgagtgtaattatttggtggatttgaacatgttgaatgggtattttcgtttgagttattttattaactagtttttgtgtgtgagtttttatcttagttactttatggaaccaatttttttgtcttaaatttttaactagttgataaatataaccggttctttatattacatttgagttattgtgtgttattatttgtgtttatttattttgttataaaaccagttcttttaatattcatgcctcaatattttttggaattgattcctatttttttt

SEQ ID NO: 406067 - DNA, 777 bp, Cannabis indica
attattaataatcttgtttgatggaattattttgcagtaagtatccatgcttgtttaatgaacttaaggaaacccaacatcccaaggtacatacacatatataccccaattaaattaaatatacacatatatttttgtgagaaaataaacaaacaaatacaatagtacattatcttccctcaactaattcgtttttaaaagttgaactatgtataataaattattcttaattaaatttttttttttttttttgaaaattgaaattattcttaataaattaaatgaacagtttctagtatttgcatgctccgattcccgagtgagcccttcccatatcttaaatttgcaaccaggggaagctttcatggctcgcaatattggcaacttaattccaatatttgacaaggtatatattaaacaattacctaattatcaatcaaaatttaaaatatttattattattattaattctacatgttaatcgttgttaatctctaattatttaacagctgaaacactcagaagttggatcaatcattgaatatgcagtacaagagcttaaggtaaaactcatcattttgatttctatttattttattaattatcatgttactaattattcattcatcttaaaatgttttaatttttatatacatgacaaaaaatatttacaggtggaaaatattttagtcattggacatagtcgttgtggtggagtaaagagactcatgtctcaccctgaagatggttcggccaccttgtaagataaatttcatt

SEQ ID NO: 406068 - DNA, 833 bp, Cannabis indica
aacgccgtattaggtcgtattgtattgtattgtattatattgaattggattatacatcatatttttatataatactatgttaaactttaatttatactaaaatattatatatttaggtgtccataaaagttaataccacatatagttttacataaaaatattgtataaaatacaattcaatataatacaatacaatacaatacgatttaatacggcgttccaaacgagctctaaaagtaaaagtggcacttagagagatatagagaagaaggtaaaatttgagagaaatcatcatcaaggtggtggggtgtcatcatcaatgacctttagctcctacaataaactttgtttgatttcaataaaacagaataaaatacaaaccttttttttatttatttttcaatattattcatatgaaattttgtaagtgtaaataacaataatgttccttttcttgtgctagatcacaaatgcaaagctaccaccgcaaccttaaaaattaaaattaaaggtgatgagtttaggacttttgtttttgttgcatggcagcctttagattttttggttatctacattttagaccccacaaaatcatgtctacactttagcttttagggtttgaagaattatattatattataaagcaatgttttaaaagcattcttattagccacttgtagtatccaacaccgccacaatataatattttacaaataagcattgttattgtacaccagtagtacttagaatcttctaagcgtgtcgccttacgattggttaacgatacttactaaaaattattatattaaattatatgagactcaatacttagt

SEQ ID NO: 406069 - DNA, 577 bp, Cannabis indica
gtaaaaaaattgtagtgtagaaagagtaaaagggtgactggttggggcgaatatgtgtgtctaagttgtcctttttttttattcaatatgtgaacatttgtaaaggaactcaacacaacaactatcattcttattccaaaaaacaaattcctagtatggtagttattagtaactttagactaatctcttgctcttgctgcgatgttatatatataagactgctactaaaatgatttgtaggagactgcgaggtcatgtgttgtttgatttgattgtcgaaaactaaagtgattttgttcgtgggaaatatattactctttattctattaccaagtgtctttcaaaatggcacgtattagtactatgagcataatttttgtcaaattaaaatttaattataacttgacttggatgtagtatgacaaacttgtttatattttttttacacctaagtatactaaaaattgatttaagtttgttatattaaaaaaaatgaaaactgacttcaaaatattattctgtactattttaaaaaagggatattggcggctaaaccacctgaactttacggtttgta

SEQ ID NO: 406070 - DNA, 557 bp, Cannabis indica
cgggactcgggactgggacacgggaccgaaccgagacgcgagacctaaggccggaccaggacttgagacccggggctagatcgggactggggacccaggaccggacccgggactaactcgagactcgggaccgaaccgggacctgggacccgagaccagaccggggcccgggaccagaccgggacccgagaccggaccagaccgggcctgggacccaggactggaccgagattagacctgggatcaaaccgggactcaggacctgggatcagaccgagactcgggacccgagacccgggaccccggatcgaactggggacctggaccagaccaggacttatacctagaaccggaccgggacccgggacccgggaccggactgggacccgcgacccgggaccggactgggacccgggaccaagactaagactggaactgggacctgagaccaggaccgggaccgagactcaggactcaggacccgagaccgagaccgggactgggaccgagaccccaagacttgagaccgggacccggacccgagacctagacccaga

SEQ ID NO: 406071 - DNA, 421 bp, Cannabis indica
aaagaccacttggccggtcacttcgtctgaaaagaaggcctactggccgaacagacaaatacaatatatatatatatatatagagagagaaggcaatcaaagagcaggagtcccaggctcttgataaggatcaactgggtctaaaggagctagaggatcattgatctaggcgaaaggagcaacaacattctggtcggtaggagaagtggaagtggccgcctcagggttctcattggccgcctgagccatggagtaatcgaaaaacatgtctttggaagtgccaaggcaatcaaaatttcctttgggattggccttctagaagtcataaaaaatctcgagaacagctgggtctaaggtatccactttcttcccgagcatctccaccttggatttttggctctcaatctctgcctcaagttcc

SEQ ID NO: 406072 - DNA, 460 bp, Cannabis indica
taaagtaaatgaaaaaaaaaaatgcaagcattaacaaaaaatttgattttcattgatctaaacccttcaaagaatattatttctgtactaaacaacaagtattcagtactttttttaaaaaaaattcacagtttgtatattaagaacatctttaaacacgtcttcatataatcatcaacaagtcattaataattttatgctaattaagatttttgtcccctgaactttgacatgtactaaatcatgtcctctgaacttttaaagtcgttaaaaatgtcccccgaactattgagattgttagacttaaggacttttttcaaattttaataaaaaaagtctaacatagataaaagttcaggggtcatgatttagtacatgtcaaaatttgagggacatgatttggtagatataaaagtctagggagcatggttagtatataaacaatcattgaaatagtaaa

SEQ ID NO: 406073 - DNA, 907 bp, Cannabis indica
accccttaaaagggatgtactgattcactcttaacttgtttcggcattcagaagaattttttagtctaatttttttcatattcatgtatattatatctatttaagatatcatacaaaattttggcaaattcggaataatttacaatatagaaaacaatgttcaaacagtctattttacacgcgtgtaaaataaaatagtcacgcgtataacatactgtttgaacgtagttttgggcatgttaaattttttcaatttttttaaaattttgcaggatgtcttaaataactataacgtatatgactatgagaaaaaatttgactaaaaaattatttcggatgctaaaacagataaaagtgcatcaatatatttattttaagagggtgcattgtagaattttcctatattatattttgaaaaaagcgtttttatttcataaagtgcacatgaacactcttaaaaaaaaaaaaaacgggagaagagaagctaatttaagaattattatacatattttttaaaaaaattattatttagttttccgattattactttggtgttttccccattattatttctggtgtaagctcattagtaataaattaaaatattacgaaggattaatattataattaaactttttaaaaaaattgacttctgttaaaaaaaaagttatatatgtgaatcaatatttaatttacacaagtacacatttagatttttaatccgtacaagtgtatatatcaacactttacgattaaattaaattatatctttatatattaaaagtgcctatctaacagcattttttagtctaacagaatatacttaacgtttaaacccaataattaaactcaaaaaatattaatattaatattgttacacgattagcttaacagattagacttacac

SEQ ID NO: 406074 - DNA, 783 bp, Cannabis indica
acaggttgcccaagctgcttaggatgctgagaattgggaaaataggtttgcagaaatgcaaaccagaatcaatgaacaagaggaagtgaatcagtagttaagacagcagggtgctcctacagtgcctgttccagaaatgccagtggcacccgcccctactgtgcaggccgaaccggttatggcaacgaaccggatggaacccctatatgaaaggttccgtaagcaggcatctccaattttcctgggaggacccgatgttatcaaagtcgagcaatggctaactatgatcacaaggatattgaatttcatgggcgtcactggaaatgatagagtggtctatgccactttccaatttctagaagacactttagtttggtgggacatggtgtccatgattcatgatttgaaaactatgacttgggagaaatttcaggagttattcaatgccaagtactataatgaaggagtcagaagtgccaagagaaaagaattcactcatttgactcaaaaagaaaatgtgagtgttactgaatatacgactctgtttgattgtttggcaaggttggcttcgggaatcgtgccaactaaatccagtaaaaaagagaagtatctggatgggttaaatgcaaaaatcagacatgatttgatgatcactactgatgacagaaccacctatgctgagatggtggataagacactgcgagctgagggcgcagttggatgcatgacagagtctgttgggactccggtggttggcggggctcgtacccctcctgcataagg

SEQ ID NO: 406075 - DNA, 716 bp, Cannabis indica
aaaaaaaaagaaaagcaaaatgtgtccggccataggaagatgcaacaagattcgtcacattgttaggatccggcaaatgttgcagcagtggcgaagaaaggctcggatcgccgccgcacgcgccgctccttccgatgttccggctggacacttggtggtttgcgtcggaaccagttcgaggagattcatcgttcgagcgacgtatctgaaccatcctttgttcaagaatcttcttgttcaagccgaagaggagtacggtttcgctaaccatggaccgctctcgatcccctgcgacgaggcttgtttcgaggaagtcctccgagtcgtgactcgttcctccgattcaggtaactcgggcagattcatcgttaacgctgaggaatttcagagacgatgcaacttagatagcaggaagaagatcgagttcttcggcgaatctcgaccgttgcttcatgatttgtctgataaatcagtctgttaatatgtaaaaaataaaaaaaaaaaataactgaaaggcttaaaatagcattccatcaccttttttataagactaattagtaatttttccacgaactttgacatttactaaatcgtgtccctaaatttttttggccgttaaaaattcttccgaattattgagattgttaaatttaaggacttttgtttaattttagtaaaaaaaattactaacacagatgaaagtttaaggggcatga

SEQ ID NO: 406076 - DNA, 501 bp, Cannabis indica
taaatctttaatgaagattgattatattttaaattttaattaactataattattaattaatttttcataatttattattaagtaagaatctttttgcaatttttttgcccttaaattattttaaattttatagcaaaactctttataatctaaaattatacacatataattcataattaaaattttattatacctataactttaatttaaaattatttcacttaatttaaatatttaaaaagtaaagactaattatgattttcgtctcccgaatttcgacatgtactaaattacgccccctgaactttgaagaccgttaaaaattccccctgaactattgagatcgtttgatttaaggacttttgtctaatttcagtaaggaaagtctagcatagatgaaagtttagggggcatgatttgacaaatgtcaaagttcaaggggcataatttggtatatatcaaattccatggcgcatgatttagtacaaaattgaatgaaat

SEQ ID NO: 406077 - DNA, 1015 bp, Cannabis indica
ataaagtaagagtattaataataccggtgaggcgaacatggtgtataattccagaagaatagttttgtaggccttgaaaagggtagagttgattgtagacaagagaatagcctcttgctttcttagtaagtggttttccataaacaccatacaaaacaatgctatcaactctatcaccatccaatgcctttatatcctcaccaatttcatattcccctacataataaacaatgaccaatttttaatacaactcatgtacttgaatgtcaaaaatttcttagtagggactaaattgctaaacaattgaaaccaagaggtatttatgctaaaatttctgaaaaataacatatacttagttgatattgtctttatagtttatagaactcaactcatgtatttgaatgtcaaaattttgttggtagggactaagttgctaaacaaatgaaacttaaaaggtatttatgctaaaatttctgaaaacaacataaaaacagtgacagagagagagagagaggaggggggaaacaatgagcactttagttgatattgtctttatagaattcaactcatgtattagaatgtcaaaaatttgttggtagggactaaatagctaaacagttgaaaccaagaggtatttatgctaaaatctctaaaaaaacataaaaaacagtgagagagagagagaatgaaacaatgagcacttagttgatattttctttatagaactaaactcatgcattagaatgtcaaaaatttgttagtagggactaaaagctaaacagttgaaactaaaaggtaaattatgctaaaatctctataaaaaaaaacaaacataaaaagcagagagacagagaatgagtgtagttagttggtattattttttaagaagtacttgaatgtcaaaaacttgttagtagggactgaatagctaaacagttgaaaccaagagatatatttatgctaaaaatctctaaagaaaaaaaaaacaacataaaaaacagagagagagagagag

SEQ ID NO: 406078 - DNA, 975 bp, Cannabis indica
aacataaaattgtcaagcaactaagataaaacagattttaccaacaaagaatataaactacacttacattgattttaccaacatcctctaaaccagccaacacaacttgctcatcatcaatttcaagctggcttaaaccatcgaaaaaatcatctccctttacactagactctttggccttaacattctcaacatccttagccctctcttcactgcctgcaacagcctcagtttgaatcacatcatcagtaggaacatcacaaacaaccttatcaactccagcaacatcacctttatctttacccaactcatcaccatcatcggaatcagaatcaatattctctggatcaagtaatcccttatcatcagcatcatcatcatcatcatcaggatcttgggtgaccaattcatcaaatgatttaacctggttcaaaaacagtattgtaactgaaataaaacaggaaaaaaactaataataacagcagtaaaaaatatgaaacaagaatagtgtaaataaatacctcatcagaaggtcgacgatgaatgacattaactttttcttgaatatccttaattacagtcatgacagacttgaaattaaggtcaacaaaacacctcaaagaaataaagtcttcggccaaggattcttgattggaaatgaccaactccaacttagatttcaacaattctatgtcctctgaatcagactttctagaagatgaaccactctcgaatgtttgcttagtggtaccacgatcatcaatagattcatctaaaaataagccttccaattgcaacttctgcctctcctcatcagttggacgaatgttcttaatcttcaactgaaaaacagaaacaaaaaacaaaacatgaaacaaaaacaattaaaaaaacaaagattaataaactagcaacaaaaaataataaaacagtaaagaaactgaaaatcaccttgttcaacgacaaatcaaaaat

SEQ ID NO: 406079 - DNA, 608 bp, Cannabis indica
aatatttttatttatattttaagtgtcgtgtttgacctaaatttaatttaattttacttattgctatatttattacgtgacatttaaatttttaacaaattttatttaatgctaagaactttttagattcattttagttttgtaattaatattttattaatacatatattttcttttatgtcatattaataaatttgtatttatattattaaatattacttaatgttattagatttcagagttataattttaattttaatttctttaattaataattatatactttaatgtattatcattattgttatattttcatactattatatttattattagtgatcttttttacattaatttatattaattacaatttttattgaataactttatatttacttttatttatgtttatggaaaattctacaatgcacacccttaaaatggatatactgatgcacccctatctgttttagcatccgaaataattttttagtcaaattttttctcatgatcatgtacgttatagttatttaagacatcctgcaaaattttaagaaatttgaaaaagtttaacatgccgaaaattatgttcaaacagtgtgttgcac

SEQ ID NO: 406080 - DNA, 579 bp, Cannabis indica
cttaggtttcattttaaactattcaaatttcattccaatggaataattattccattttaaaatgaaaaaaaaaagacatttcaatgcaagataagaaaagagtaatttacgttataaatacttaagtttaactctcggttgcagataaataactaagttatatttttaaaactttcataaatatctaaccgttaagtgtcaagttattattcacatgtcgtttcttattggtacatttaaattaatttttaaataaaaaataagaatttaatgacctagactaatcaacaactgccacgtggccattgacttaatatacttaactgctagctacctttgaaagttccaaaaagataatttaggtatttatacaaaataatttatcaattttttctatacattttaaatttaatttcattcttattcctgttatcattctcatttgcaatcttatgtttttattccttccaaccaactggtgggaggtaatgaaatagaacatcattttaatagaataactattttattttaaaatagaaaggaaaatcattctaatgcaaaatgaaaaaaaaaaattaa

SEQ ID NO: 406081 - DNA, 666 bp, Cannabis indica
aaatttcttacatctaaatatctaaaaacaggtccttcatgatcattttcaactgtgttatggcaaatggcaatacatcacattttcaactctgttttgtcccatacaatttcaggcatgttttttatttttatttttatttttattaatgttttctctcccctttttttttattaatgttttctctttttgacaattagccacctaactctctatatagaaaaccaaatgtaatacatatgaaacatgtgtggccataattttatttttcatttttaaaataatagtaggacacaaatatacatatatagttttctttctagcaaattacaaatccatataggaccagtttggcacagttatgctgtgggaaaaagcagttgtagctgtgctgtgagaaaaaaacagatgcagcagaactgtagaaaaaagccgagctggacgttcggtaaattataaatttcaaagtattgtgagttgttaatatctattataattataatgataatgttataatctagtttattataattacaaaatgtaaaaatttattttatataatattttattttctatagattttaaatttttttacaaatataaatttatatgcatttgataaaaataatttatattatttttatgttatattttatcaaatataaa

SEQ ID NO: 406082 - DNA, 91 bp, Cannabis indica
aagaagagagagagagagtggtcggccaaggtagagagagagaggctcaggtttttctaaatgaaaagtgtaattttcctgaagccttcac

SEQ ID NO: 406083 - DNA, 647 bp, Cannabis indica
tttccataccctatgcccccgagatcaccagagtttcaccgcgcacggtggctgtctaccatcaacgatgaagcttgcagaaaccatcgacgagatttgaaagatctttgcaagtagaccacgtttttaaaagtcattatactcaatggatctccaacacgattagatcggacccaaaagtttctacgccgacagctcttaacggtgactgaacgacaaagggagcttcaagaaactcagagctcgtggtttgaaacccgacaagggccacggtggccttaactccagagaacgatggagagtcccgtggtgtcctttatttttgacagcgagacatcgttgctggcaagaaaacatcccagtcgagagagagatttaagacttatgggttcagagttaggacttagagatttaatgtatttctacacttattccatagccccgagaggattatatttgagaaaaaaatagggatattttccttaataggctttttagatccaaaatttacatttttatcttagtatgaaaaaataaacaaaaaaggaaagaacaaaaacctttttttactaaaaataacggactaagcaaaacagtccccttcaccctcgttctccttcgtttccagccgcaccagaacttcccca

SEQ ID NO: 406084 - DNA, 1021 bp, Cannabis indica
gtaaagtacgtctacttttttttattttatatatatatatatacatatattgtataagtctactataatcagcctatcacaacatgtgccccctactttgttttgttcatcactctgtattttattgggagaatctttgatttgatggtggtaaaagctgttggccaaagttagagaatgaaaaagagacatatccaagttgagtagaatatgttgtgttttctatcaagatatatacaaatctttttatttgtatactttttcttatatgggtattataagttatttaaagaatgttctttgaaaaattgtatatttgaaaaactatagagatattaatatacatattcttccataccaactctcacaaaaatatgctaagaaacttagtttgggggacaaatgcacctgagttaacggctttaatgtaaatgtatggaccttttatttattttttattttttaatttttttaactaaggaatgttaaaggggaatatgactaagcttgacttgaaaagacaagttacccaaatagcatgcaatggaggaagctttttagactataatttcttttcaaatatattttgttgtcttttagaatgattttgaagcttggaaagttttggcccgttacttacttgttaggtttgccaagtttaatcatataataacccttattttctagtaaatttcatgtagcttttgtggtgggtcattataatgcactaaagtttgatattattggctcactgatttcactattaataattaatcaaaaagattagttgtaggtcatagccatgagattgatcaagatatggttacccatataacaacaaactactatactaagaggaagcttcaagtttatgcatgcttaatagatagactatagtattttcaaaatatatatataaactatagtttattttttatattattattcacattattattagacaccaataatatttaagatggaatagtaataatttttataataattatttaattaaaat

SEQ ID NO: 406085 - DNA, 600 bp, Cannabis indica
aactgggtaaccggttttggcagttggaattcccaaaaactttagcttttcgattcgttctagtttcaggtttccagttggttaatttcctgctagtttaggttattgccatattaaattgcagtatataggtttttgggttgaaagctaagtcccagttgtgatttagcgtgtcacttatccatgttgttatcgatttgatttaggatcctataattcgccgagcagctattccactctagttgaccgacacacctgaatttgggattgaggtaagattagtataatgtcatgcatatgttattacatgtttagcgtacatgttgtttatgcctgttagattacattgatagcagtaattgtatacatagagttgtactgattactaataaatgtatgttggctataatactgatcgatgctgtcacatcaatatggctagagtatagctagcatattgagtttaggctgacattatgatcgatagtattgtcgtatgaacgttcttgactcagtaccgtgtgggacacggggattagggttatgatcgagtgtatgggcgctaggttataacccaagatatttgtatgttttacgtta

SEQ ID NO: 406086 - DNA, 520 bp, Cannabis indica
aggatgtcttaaataagtataatccacatgaccatgaaaaaaaaatgaactaaaaaattatttcaaatactaaaataaataaaaatttatcaatatatcttgttaatggggtgtattatagaattttctaatatcttatataataacgattaggtctaactctataaacgccttttattaaaaaaaaaaaatcgtaccttaaattagggagaactactattaatttcagcgacttcacttgagaagacgaccaaaatcaatcaaaacaaaagttatttcgaattaatgaaaaaaaaaaatacaccaaaactactacaaactaaaattcaactaaaatttggtttaattcacgtaaaatttttagattcatgaaatgcaaatctcaaaaagttaaattagagttcccaaacaatacaactcaagtataatcaaaaagatcgtaaaaatgtttaaaattccgtgaaaccatatttttgtaattttttttattgtttttgtgtatttgtgaaataattcaaaa

SEQ ID NO: 406087 - DNA, 738 bp, Cannabis indica
tttgaatttggatgaacatatctcattttgggaaccaaacgtgcgcgcggggggatgtgtgtacgctcggacagcacgcgtcttcagacaagtgcatgaccgagaatactcgaacaaggccctgtctgaagggctgctcacgccgagctccctcggctaacagaggctacacgcagccctttccctcgcccattccccttcatctgcgcacgcaggggtatgcattttattttgtcatatcttttgattcaaaaattatttttcattgaaacaaaatttaaattttggtagaattttgtgtagaatctgaattttcaattaaaaatctaataatcagaataaaattaattttattatttttttaattaattaaatttagttttagatattaatagcctttgaatatgaatttttttttagaaactagccttatggttgattttgaaattttttattattttatttattttaattataagatcagatattacttattttattattaaaatttgaagtgatcttattttgatattaaaatattaataaaaatttagaaataatctagttaaagtttcaaatttgctaaccatatcagattttcaaaatttgttatttttgaaatatattttattaaattaaattataaggttagaaaaatgtttgttttaaaattttatcttattatatatttattttaattaaaattaattttcgacaaaataacatgaaattttgaaa

SEQ ID NO: 406088 - DNA, 576 bp, Cannabis indica
gactaacaaaaagcaaattaaagaaaaaattaggtaaatgtaaaactgatgacatagtgatcatatgtgtaggaacaatagtgtcagatccaagaacagaagatgttgatccatcagctaaagcaacaatagaagtgggactatgagactgaaaagtggaaaagagactggaattacctatcatatgatctgtgacaccaaaatcaatgacctattttgagaatttggaaagaaggcatgcattagagttacttgaattagcaatggctgtgacagaagaagatgaagacttaagtgtttcctgataccttgagaacttggcaaattcatcagcagaaataaggaccgatttgtcagatgtatcagtagtgcttgcaatattagcagagtgttgttgtcgatttttgaactgtaacttcctacactcaaacttggtgtgacctggtttcttacaatagttgcacatgatgctcccagaatttggtgttcgattatcaggtccttgtgaattacctcctttgtatccacttggagtagagttttttttttcgatgcagaattattacgactcaccaa

SEQ ID NO: 406089 - DNA, 820 bp, Cannabis indica
gagggcggagacggtggaggaaagaaattgaggagcgagattgaagtgtggaaatggaagctgaggaggtggagaaggggcgagaaatgaaggaggctatggttaaggttctgggaagggagcgagataggaagttggtcgccatggctgagaaaacgaagctcaatgccaaaaggctaaaggtgttttgaaggaagagaatactcgaggttttgggaaagaagagtgaagtggaatgaaatcaatgaaacacaaataatgtcgttttcattaaatggtgtcgtttttgttaaatgatgtcgttttcagttaaacttgtcgtttctcaactgtcgtttttttgggttgctgaaatgcccaatgtcgtctttataaaaaaaaaataaaaaaataaaaataataataataaagtaaatcccaactgtcgttgtttacttataaactattgtcgttaatcgtaaatgttgtcttttttatttatatataagataaggtgattctacaatgcacccttaaaatggatgtattgatacatcctctacttgtttcggcattcaaaagaaattgttagtctaattttttttataattcatatacgttatagctatttaaaatatcctacaaaattttaagaaattcgaaataatttacaatatgtaaaataatgttcaaacactctattttacacgcgtataaaataaaataatcacgcttgcaacacaatacttgaatgcaattttcggcgtgtaaaaattttccgatttttttaaaattttgtagaatgtcttaaataagtataatttacatgaccatgagaaaa

SEQ ID NO: 406090 - DNA, 646 bp, Cannabis indica
aatatactatacataacaaaaatctatatatatatctattatttgtaataagacataatatttaattataacaataataatatgacacttttaattttaaataacataatgtttttatttaaaagttatgtttgttttgttttcatttacttctgatatattttgtgagaagactagtctataacgttcaagacgtgtgtagaaaaattcaatgcaataataatgtgtggtgttcgagtctcccctattatttggtgcatcgacttggaaaaaaacacttcaaaatagttagatgaaagtacttgaatttaattctttcttatttacatgaattcccattaattcagatatgtaagtccataatatcagctccctcatttcattatagtagactttgattgagtttttcatattctttcctatatatacagtgacggatccagaatttttaatttgtgggggtttaattattaaaaaaatatttattatttactttacattaaaattataattattttgtgggggctttttactattttgttgtataattatttaactaaatagaaaatatttaatttttttttctacactaacttttttttattgggggctataccccacactcttattattgtgtccgtcactg

SEQ ID NO: 406091 - DNA, 514 bp, Cannabis indica
caacctgggcgctaggcccagcctcaagtgtcaaactggactttgggtcccaattttggccctgtgaaaaattttatttggtccctaaaaatagttgaatcttaatatttactgaaaacaaagaagattcttagaagttttcttcaaaaactccattgaaaatggctcgtgttgacaaaatatcaacttgggcgcagggccaatcccaagtgtcaacctgggcactgagccctttttttgcacctaagaagtggtgtttcttctttagaaggacctacatccttggttttgatagaagatgcaaaagtcagatctttgatatgatacttggaaggtgcctaaattgatatattgtcaacttaggcactgggtgcttgctccaattctaattctgatgcctcaaatatgtccgaaaatagtattcgttatacttacaatatcaattttataaatttttgaaaaattctaaataatttatagtactaaaaataggtcttatttttttttttttttt

SEQ ID NO: 406092 - DNA, 594 bp, Cannabis indica
gtgattataagattcccaagtatctttttggcaacagtttactgttccgcctgaggaccaggcctcggaccgcttggctcaagcacaataccttcagaacactgcccctcgggagtccggtgaaggagcatcccgaggtaatcaatgtggttggtctcctactgtacttagggctgagtgtaatacattagtcaccttccaagactctcgtcttaatttttatatttggaattcccttctcatggaccgcattggacataagtttgacagttggtatcctaaatttcacgtccaggttaactatcacgagtcatattttggtatagctgagcaatacagtactatggaagatagggcaagtcacatagatgcgagctgggattttaaaccgatcgtgccttttgatatatttaaaatcacaggctgtagggattttagtggatattatggtccccctaccccttcatctagtgatagctcgccttctcgtgactttggtaaatctcttaggtggaaaattatattcctcccattttcatcagcctttttaatagctgtaacgccttgtcttgttttgcagacatgggttatgaa

SEQ ID NO: 406093 - DNA, 730 bp, Cannabis indica
aatatttttatcaatttaaagataccaaatataaaactaacagaaatattaataaaattttaattatcattagtaaaaattgaaatataatttagaaagttacactttaaatagagttttcttagcactcatttttatttattttattttttttttcagcacacaactttcacatcattagaggtaggggtggacaggatctaagctaatctaattgagctaaacaaatccaatctaagccaattataaaaattagacatctaattataattggattagatattaaaagttagattataattggattggttattgaatgtcaatcttaaaattcaattagaaattgatccaatccaattacttttaatatatattaattttttttatttatctatatataataaaaaatatttaaaaaataaaaaaatatattttagttatacttatattagctatttattttcttttattaaatttgtaatacttgattgtttcgtgtatttgttttaatgatgttttgttttattttattacttggtagtgttgttttacttatttcaaacttttaattgtattaaacttgtaagaattatatctttatatagaatattaagttataaaatgaatagtgatatcggaaaaatttctaaagtattatttatttatgttttatttaaaattttatggtttaaagtttttatttataaaaatacgtttataaagttttaaa

SEQ ID NO: 406094 - DNA, 1000 bp, Cannabis indica
gccatagcttatgccagaaccctaaactatttgcatcgtgatggccatgtttttgattaagcagcatatcataagcacttttgatagagaactcaccagatctttcgccagtccaagaccaacagtcttcgacagatgaagagcttaagggaatgccaatgatcaactatgcatcgcgttggttgaacatatccttgacaagagagatatccatgcattacaatgcatttcaaagagagaactgaccatttggttagcaaagccatgctcagaagaagtgacatatgtgttatcagggtcaggaagccatggatgcttcaatatggtggttgtccttcctgaaccgatagttcttctaacaccaaggttgacaagattttaggcaccccagatgcttctccatacaaagctaggattgttgcctaactccgcattaaggaagtcagtgttggggtaatacttagccttatacaaacggcttacaagagaggttggagcgcataacaaccgccatccttgtttagccaacatcgcaagattgaagtcatgaagatgacgaaatcccataccacctgaatctttgtgtgtagccatgcgatcccaagacatccaaataataccattccctttggcactcgatgttttccaccagaaattagccataatcttctctatttcttgataaatttcgagaggaacaagaaaaacactcatcgcataagttggtagggactagagaacagtttttaggagaatttctttactagcacgggaaagaaacatgtcgctccagctgttgatccggttgataactttgtttttgagaaagccaagaatgacagttttttttcctaccaattatgctaggcaggcccaaataaagagagccatcagtagcttcaggcatgcctttttttttttcaacttttaaaaattatttttcaatgaaataaaatttaaatttcggtagatttttgtgtagaatcttatttttcaaata

SEQ ID NO: 406095 - DNA, 965 bp, Cannabis indica
tccttgaaaccttcccactacgaaaatgtaccgtgactatctatccaagaatttaaatggttgtatccgtttcggttgtatcaagacaatagaggcagtgggaccatcttatatagaataaaatgatacaacactttggaatcaaagaaaaaaatatctcctctaatttgctactttatttcagatttagtcatattctttgagaagtaatatttgttgaaacaaacactttcttatcttaatgaccataggatggtccacccttaatcacttagaatagctatcaaacatgcaaaccgtagttaaaagttctagcttttcttaagttcatgatcaggacatccatgattctagtaatggtttacactaagtacacaaccattccatcattctaaaattatcctatggctatggtatatccctagaggacttaggcaactgctagtaactaatcataaccttttaatataatcaatacgcaatccaaatttttggggaggtaagtttgaactgcatatccaccaaatatttctcctcccctattaattttcaagatctttaaccacttaccttaatatttttttcaccattgttagaaattcatgaaatttctcatacattttaaatttctttgcataaggtaaaatctagagtgattgtcttaagaattcaatgataacgcatatgcacccctaaatgtacacccatattttcgaatatagatgatcttacattcaagtggataaaggcatattttctctttgtagagaatgatcttgtcaaaacgactatgaacaacatataaatgccatagatatattaaagtgtggttgtggtcttttgataaattaggtctagttacatcaaagagttcttagaattgtccaagtgggttctggtcacagaatgctaaactaacattccatacataaacatacagtggaatccattgacagaaaatggat

SEQ ID NO: 406096 - DNA, 1198 bp, Cannabis indica
ccgatcgcatactccatgcatccaacctgagcttttacttttaaccaatgctctggaaagacatagcacttctccaaatgcaagtaaactctgttgtagattatcatatcagtaaaaccctatgtctgataatctaggaaactttattcacatagtcatgtttactttccaatgtgttgacggcacaataaacaggatcaagtatgtgaaaagggtttcagatgaatttatacattatgtacatataatcatgaaataaatcatgtgaaccatgcaacattaaatgttatttctgatctatattaataagtaaatctgattatattgaaatgagttttatttagggcataaaacccaacaccagcaggtacacaaggtccggctctgtacagacacaacagggaggacgttatcaggtacaccgaggtgatctgcgtgatcatctcaacgcagttttcagggcacgctcccacgaacctcgtgacattgaagagcctcgtgatccccaaatgggcgatcagggtgtaaatacttgcaccaacccgcctaacgcaccagctgcgaccactggggttaatatcccagcaaacctcgctgcaatagcaacaacacctgcagcaacaccaatcactgctcccttagccgggagtattgatcaaagcatgcttttgcaggctttgaaaatgctcgaacagcagagaaagcccatatacaagctgcatgggacctctccttttactgcagaagtgcgacaagctcgactccccaagggattccggttatccgaatccctaaaatacaaaggtacctctaatcccattgattatttagagaaattcaatactattatggaagtggatcaggtacctcagctcgcaaaatgtcgcattcttgcggcaacattggaagagaacgcccacgattggttcagccaattgcccgaggcttctatctcgacatgggagacctttgtcgacctgttcctcacgcatttccaagccacgatgacctataggccgccctataccactctggctaacatcaaacaagaacctggtgagtctttacaagactattttaagcgttttaatgctgaagtaacaaaagttgagaaggctcccgagtcttcgctagtatgtatgttaataacaggtgtcctgccaagaaccgatttctggaaggagctgcaagctcgaag

SEQ ID NO: 406097 - DNA, 798 bp, Cannabis indica
gaatgaaatgattatgaatatgataccgggagaagggagcacctatttcagcttagtatatgcaaagcaaatataaacacaaatgaagaagattttttgtattcagctgagtttttgcataatttgaaatttaattgcatccccaatcatgacatacatctaaaggaaggtgctcctgtaatgctccttagaaatctaaatcaaacataacgtttatacaatgacacaagattgattgttcttggtaaatggtcaattggagctaatataatctctgggataaatattggtcaaaatgtaactatttcaagaataatcatttttccaaatgaatccaagtggccattcaaactcaatagaagacaacttcttttggcactatgttttaccataacagtcaataaaagtcaagaacaatcgcttaaatatgtcggattgtatctccctaagcaaatattcactcatggccaattatatgtcgcagtgtctcgagtaacttcaggagaaggattaaaataaagtttgcaaaactagggtcgaacccgcgcgaagcgcggctttgttccctaagtataataataaaataaaataaaatgcactaactttcgtacataaaccaattaaataataattaacggtatatataaatgcttccactttaactaaatttaaattaaattttaattctacaataattttctaaaattttcgtacataaactaattatagtacatgacactaaaactattaagagattttttctataataaaccaaaaatagatgaaatttacatttat

SEQ ID NO: 406098 - DNA, 561 bp, Cannabis indica
gaggtgtaggagattgaggagctggacgatgtacgtcgtggcagtccctctgaggcagaggaagaggaagaggttcgaaaccccaattagtggggagtacaacgaggctggggagccagtcgatgctgacggagacgtcctggttgagggcatggactacgtcagtgaggagcttgccacggcagttcctcataggaggcagggtgccttgggcgccaggtgggtaagtcctctgtccaagattacggaggcgcgccttcgaactcttgaccaaggcggatacctgggcgagatggactgctacattcccgcccacgataatcgtgccacaaatcctgacaaggggatgtgcgcctagccgggtgcccatggtcagcaaggagcattgatgccctttcataaatacctcaaggatgtggcagatttcttcggtctctgcccggcccagttcactctcaagggcattaagtatttgtctgccctcttcgtcctctacgcttcccaagggtggggtactccttcttctcacgaagttgcctggttctttgattcgaagtccac

SEQ ID NO: 406099 - DNA, 877 bp, Cannabis indica
tatacagttttcctttgcagttcagcatgctggatttgaatgtcaaaattgagaaatagaagtgatgaattgaaagggcttaatgagctgattttggtttgttaaattttaaagacattcctagattgttgacaatatgttttcttcaattgtctatggaaaaagagtgtataaactaaaactataattgatcccccgtcccaagatattttgtggaagtttggagcccatatatatatatggtcgtaaggttgtggaatggtcatatcttgcattcgtactcattggtttgttttgttttgttttcttatcattattgatactgctatttgcatattttattttgttgtattaatgtgtatcttaaggaaagtgctaaggtctttctttttctttggctgtagatgcatggaagatttagtaagcaccacccgttatgtaacctggtctcttcacaacaaggttagcgtggctgttctgtggtttttctaacttagaaatgatgaatttttaatttccacattcaaaatttctttgttatgttatcttatttgacttttcgtttaaaattgtagaatcgagccggacttcgtcagtttttggactcatttgctggaacagaacagtccactgcaggtgctactgttcctgttggtctttctcctgattcatcaaatgggttgggaaatgagaagcaggagtcaaagcctagggcagatgtgaagcttagtcatttggcttctggaatggactcaacatcttcaatgcaagcaacagacacaaggcttgccgatcttctagatagcacactttggaataggaaacttgctccttcatctgagcggatagtttatgctttagtgcaacagatatttca

SEQ ID NO: 406100 - DNA, 784 bp, Cannabis indica
atatttattacgtattttttttaaaaaaaaaagttcgtattgtgccatgactacaaaaaaaatatagatcgtgcattgttgtgcaaaaattttttaaagagtaggcccaatatttttgtgtcgtggtcggatcccgtagcatattttactcgtgttggcccgtatttcttaaataggtctaaaccattttcaaatcccattttaaatttggctttattttttcatatttttttttacaattactaaattattatgtatattgtaaagctttagttatatttatataacttttgaataatattttgtaaataatcatataaaaaattactaacatttatattacatcatatatcaacttttataaattatttatttaatatattttaaaaattaaataaatataataaattacaaagaaccgctaaaattatattaccaactaggtttccgagcttcataagacctgttaatccactcatcaaatttcgagggctaataaacttgccccaatttaactagtaatttcaagaattactttaattgcagtcaaaaaaataagtaaaagtgagattcattaacttcacaagagaccaaacaaagagaaagctcaaatcgaaaaaaacaattacactaaagtcttaagttgagtaaggttctcattcaaagtttgccacaagatcaaacgatcttttaggtatctaaagcaaactaataaaatagatatataaaaatagcctcataaaaaaaatatatatatatatatatatatatatattttgcttat

SEQ ID NO: 406101 - DNA, 705 bp, Cannabis indica
tagtattcatctatatatgaagataacaaaaaaaaaaaacaaaaaactacataaaataataataaaaaacattaaaataacattaaaacataaaaataatataaaataacaaaaattaacaacaaaataacaaaaatataacataaaaatatataaaaaaaaaattgtattttaagtaaataaaattttaaaacttaaaaatatttataattccatataatcaatatttttgtaattttttattatattttttaaaaaaaaatgtatcctccactacatcattcggcaactatggatgtgcttgggccatgcccactgcccgggaatttgagagactagaactggtgaaatccagcataggagggcccaagattagcccaatttacactgaggtattcctgaaatgaaaactcaaaacttttcaaaaataccattctatgtacaatattgtattaatttatttgtagtcaaatcttgttacataaataaaattttaacacaatttttttttgaacaacacaataaaaaatagggtcaaaatatttttttggaaaaagttttactcctaaattattatcccttatataaaacataaacataaaaaatttatatttttacttttaaagttttatttttatttttatagtattctatctatatatgaagatacaaaaaaaaaaaaaacaaaaaaaactacataaaaat

SEQ ID NO: 406102 - DNA, 497 bp, Cannabis indica
tcatgtgttggtccactaggctgctggatagagacatcagaaggctaaactggattctgaggttgctggtatgatgaaactgcctgctgttgtgtttctggtggctggtgtgggtgagtagggggctgattagtgtgtatagggtgcgggtttgttgtttctgattggttttgatggtgtaggagctgctgatgttggatttctggttgctggttatagtatatgggctggtgtgtggtcagttgtggctgctggtgcaggctgctggtgggtggtgttggatttaagggtatgggtgcttgtgggtgtatagtgggattggtggagggcatgggagttggaaagaaaacagcaggaccaccagaaattatattagaagtagaatggatagtaggaaacatagaagcagcagaagaagaaggagaagagtgtacctgagatgagaaagcagggaaacaaccttcattgaagaccacattacgtgcaatataaagtct

SEQ ID NO: 406103 - DNA, 940 bp, Cannabis indica
tttttttcttaacatttttaaatactctatcatacacaagttagccatttatatttcactttgagttcaaatggattgaaagttccacgaggtatatttttttttcttccatgtgtaatatcatacagatacaagttaatttcataataggtttacaatttcgtcaatcaatttacaggatattattccttatgtgatgctggatacctaatggtgaaggcaacttagtaccgtatagaggacagtgatatcatttaaacgatttggatgtcccacctactactcctgctgaatttttcaatacgaaacattcttctgctcggaacgtagtagagagagcattcggactattaaagggacgatgggcaatccttagaggtcgatcatactatcctgtcaaaattcagtgtcgaattattttggcttgttgacaatatgcaaacttttagaatttaaaattttaatcaatatttgtttttttaagtgattttaaccaatatttttaagatatattattatgtgttaaagagcttttattgttgtttaaattattcgtgctaaagagatattgtgttgggctgggtcaatatatatatgtgtattttactctttataattatttagtattgttaatttttttttataaaattatatgaaaaattataaataaaaattattttgaacacttacaaaaaagtattaaattattagtattttacaaaaaaaaaaataatcattattgtaagaaaaaaattaatcacattccattcctatgtcaaccaaacaaagtaatctttatattccccggcatcatcataatattattgggtacaaccaaacacggtaatattacattcctaggtttataattcccttcatcactctacaagcaatgttaaactcattcccataaaatgaaacatgcataccaaacaacctc

SEQ ID NO: 406104 - DNA, 703 bp, Cannabis indica
aagaacgcaaggtgggaatcatgagaaatgcaaagttcaatttggaaaagtttacagggaagaatggttttggtttgtggagggtgaagatgagagctttactcgtacaatagggcattcaagatgcattgcttggagctgagaatatcaaggacaaaacagagaaagaaaaagtagagattcttgacaaagcacacaatgctatcattctcagcctcggagacaaagtcttgagagaagatttgaaggaatcttcagctgctagattatggacaaagctggaaagtctgtacatgacaagatcactcaaaaacaggttattcttgaagcaaaagttgtatgcttttaagatgctttggcaaatctatgaagatcatttggatgacttcaacaagataattcttgatcttgagaatattgacataaagattgaagatgaggaccacgctataatagttctgaattctcttccaatggagtcctatgaacactttgtagacaccatgatatatggaagagaatctttgacattggaggaggttcaaagtgccttgatgtcaaaggagttaaaaagaaagtcagaactgaaggaagaaaactctagtgaagggttgatgattgtacgaggaagaaaagatagaagagggaacaagacagtggggaactctcatggacaatcgagaggtaagtttaattctagttc

SEQ ID NO: 406105 - DNA, 538 bp, Cannabis indica
aaactctcatagatgccaaaatatagaagaaggtctatcgaaacaacccgaggtacaattatttctaaaatatttttctttttctaaattaatttgttatgatgaattctattgaaatcttctgtagtacacctttaaaagagtgttctggtagaccctatatctgttttggcattcagaaaagatttttagtctaattttttttatcatgatcgtgtatgttatatttatgtaggattacctgtaaatttttaaaaaattccgaatagtttataatgttgaaaataaagttcaaatagttacttaatatgtgtgtacattatatcaaatagttacttaatatgatgatcgtgtatgttatatcaaatagttacttaatatgtgcgtacaataaaatatttaaatcttatttttggcattataaactacatgaaaatttttgaaaatttataggtggtcctaaaatatacaacgtacacgatcatgaaaaacaaatagattaaaaaactctcttagataccgaaccagattgtgagtt

SEQ ID NO: 406106 - DNA, 467 bp, Cannabis indica
ggttgtcgacattttttagatttctttttgctgttatgtatttttgaattgtctcgagtgtgtaatcaagtccacaaaagaagaagaacaaaaaggctaccttcgggagaagcttttacaagctttcgagagataggttttcacatctttcctcaggaggaagcaagaactcttcaaggagatcgaagaaagttcaagcacttcaagtttcagaaagattcgattagtaggtggaattcatcaagcttgcaacatacaataagagggagcctatttatgcataagtgtattactttgtattttttagatctatctaattaatcttagctctgggcatgaccctgtggactagtaacaatctaaaagaattgttgataccacatacaaaaaccttgtgtgttttcattttctacgatgtttgtttaatgattttattctgcagttacagagtgttggaaattatttta

SEQ ID NO: 406107 - DNA, 1041 bp, Cannabis indica
ctgagaccgagacttgggtgcaggtttggtctcgatcccaattgtggttcccaagtcctgttccatgcttgggtttgagttaaggtctaggtttgggtcccaagtcccagttcgggtttggattcaagtttgggacccaatcatacggtgggtctgtgtctgagtccgggtcctggtcttgttacagttttgtgtatgggttcaggtcctagtactagtcctgtttctcggtcccgatctccttctggttgcggttgtagtttcaagtcacggggtacgagttcgggtcgagtttgggtctgtgtttgggttctagttttgatttgggttcggggcgaggtttaggtccgtgtttcggtatcggttagggtttgaggttgggtacggttttgggtgccgatccgggtggaagacccagtctctttctaagatcctagtccagttctagttcaagttttggttttggttcccgagtgtgggtctaggtctgggtatgtgtccaggtctttgtttgagttcgagtttgggttccggttctggtctgattcccaaatccaaacactgactatgggtcaggtccaagcattgagtcccggatcccaagtcccgaggtgggtcctaggtcatgaattgggtctcggccgggtcccagatcctgatccaagtttcgaggcccaagtttaggtcacagttcggggtcccaatttcggtggccccatctatgtccaggtcctaggtctcgattcgggtccaagtttgtgtttcgattcttgttcgggtcttgagtcctggtctgagtcctagtgtgggtttgagtttcagatcccaggtccaactctggttcttaggtcctaggtccagccctagtttttgggtctgggtctgggtctggctctgggtcccggtctgggtccaggtcccggtctttgtttaggtcccaactcacaggtcccgatccgggtgcaagtctcggtatgggttctagtttgagttttggtttaggtttgggtcctgctacttcccaggtctgcgttctagtcc

SEQ ID NO: 406108 - DNA, 663 bp, Cannabis indica
gttgtacatgaaaagttaccccctatcataagtacttatcggtttgtaataacaaaagttagttttattgtcctcaattagctttatcttatctgcaattataattataattttactaaatatattattactaagtcagttgctaattaatgctttttgcctacttaagtagtttcattatatataagtcgtgtgaaaaagaaataaagaaataataaaggagtcttaaatgataacgaacttttaccactaacttgtcattttgtgtacactttctatacaagtcccttggattactgttttctcaaaagaaatgtaatattgtatagattttattggaaacttacaaaaatactggaacttgagttaatttttacaaaaataccatcacacgaaaaagttttcaaaaatactgtattaacactagtagaatacaaaacagaacaactcaaaacaacaatagaacaactaaaaaaaaccagtgaaaacttaacacagtatactgcggtataaaacttataaaaaaatacagtaaaaaagtaaaaaataccgcttggcagtatttttataaaaaaaaatgacaaaaattagtataccatgtaaatttcccattttataaatcttgtctttaattgtatattgagtgttgtatcaagatttatg

SEQ ID NO: 406109 - DNA, 538 bp, Cannabis indica
gaaaccatgctaacctccttcccagatatatttgaaaccatgccaacttccctctggaattctttatcagccatggtgggctacggggttcctctagtttggattggtcggaagctcctcaaccttggaatccatcattttcggctctgattgaggtttgaagtccttgggaacaatttgaaattggttggtgcgtctaggtattatgagtttgggaggatgaacttgtgaactcagaagggacattttgacaggaaagagatgatccattctaaaaatgaatctcactaaaaaactagaggtttatgaaaaatgacaagcttgagccgcccttttatacacaaagtctagtgacaagaaagctaagtattgagaaatccaacggttgggagaagggtagaatatgaagagacaattcatattgaccctcgaaactgtacaaccgctagaatcaaaggatgcattttttccaagaagaaatcttgatgaaaatgccttctgtaattattaaaagctctttttactaaaaaagaacttt

SEQ ID NO: 406110 - DNA, 425 bp, Cannabis indica
tctagtataggcgtagtattctcagtaccgtatcactaagtcgtcaataactaaaccaaggcatggactgcacaagaaagtttctactgtctagtcatattgctagaaacttgggggggtaaatgtttaccaaaattttaacgacgacgacgtgacaagaataatgacacgtggcccaaaaatactgagcctgaattaatgaagaatatgtaaagtcatgacagttggggtgaccgttaatcataatgggcggtcatgaccgttagaatgaaagtctgtgttggaatttattttaccaggatcttagatctgctcacaagtatgttgattaacatcctcaatatgaactttctaaaacgatgaaataaacacatataaagtttaggaaatcttacattgggtgcagcggaatataatgactcctt

SEQ ID NO: 406111 - DNA, 592 bp, Cannabis indica
aacatatcaatataggatcaaagttacactcttttgctatatctctctctatatattttttggatgtcatccttctcagctgcttatttcataactgcttaaattgctgccacctgtcccactgagttgctctctctatatatataagtatgaacatgtcctctttatcacttacttctactatagaaaaaaaaaattcttaatgagccacgtgtaagacttcagctttgttgtcatttacttaaaaaaaaaaaaaattaagattgaaaattatgtgtctaatttttgaattttttatatattttttttatctaacttgcaagtaacatgatttttataaaagcaagcatacattaaaaattttgcagaaggtgtcatttcgtatacacacttattttcagccctaactctaatgaataatgtattagagggtattatattcacacatgtctttgcttttgatttaaatttctgttcgtattttaaaattacaaatatatttggtactactcagagagacaatcacaacatttgaagttgcaatcctgtgggagaaagtgaagaatatacaatttatctcaaatgttcaaaa

SEQ ID NO: 406112 - DNA, 518 bp, Cannabis indica
gaaaatattattagttattaagtaattattattatgtatatctaaataaaaattaaaaacaaataatgagaaacaaaacaaaacaaccaaaagtaacagtatatttcaaaagcaacagtataagaaagtgtgtttttttttttttgaaggaaacagtataagaaagtgttggttatgaaatcctaggccatataccttttcaaaaatagataaataattaaaaaaaaaaaaaaattcaatgacatgtataagctacttcaaaagcaaagtatattttaagttttgaaactatattccaacaaccaaaagagatatataattgttaaatatgtatattttatttagggtaaatagtggcataagtactcaaaattttaggtttgtaaacggcataaacctaatgattttttttagtggcataagtacccaatgtttataaaactgtaattttcttccagtttcatcagtacagactataagacccaaattttagattatttggtctggacgaaaaatat

SEQ ID NO: 406113 - DNA, 594 bp, Cannabis indica
ctttatacctctaatcttattttagtgaagtgctcatttatggtatttggactcagttctttctttcactactacaaaaaggggtattcgcgactgttctaaaaacgttttttttcgaggactgtcgctaataaatttaaatgactattttaaaccgtcaggaaaaattgagtattcccgacagtttagaacagtcgttatggaaatctacggcgattttaagttaaaacgcaatattttagtcgtgattatacaaaattttgacaattgtacttaaattgtatatgagttttgctaaatgtgtacatgtcacaagattttagaacttattttatcaggatctaaatttattaacatgtatgttgataataggactataataataccctaaatatgattttcctaaaacagtaaaataaacacatataaagttgtagaaaatcttacattagtggtagcagaatataataactcacttctattcagatttctaacacttggcatgtttggtttgttgtaatgggtaatggaatcagattatccattacaatgtttgttttgcttttaaaaatgatgtaatgggattacattgta

SEQ ID NO: 406114 - DNA, 773 bp, Cannabis indica
atggatgggactggcagaattttgtcttgctcataaacaactggagaacctcgtttaaccactctgttgatcaagctgggataaggcagggtatgcttgatactcttggcagaggcagaactcataattcgatcatacatgagtgttggaagatcaatgcttacaccagtgcctaaggcatacagaaatcgagctgtattgtagttgatcgtggaaatatgtgaatttgcccaccagttggacatagcaattttatggaggatcctgtaaaactctgagagaaccgtgacaggtaactccttcccattccaaacaaaattaggattgccagtaatctcagcacctacatccttaaactctggtttatactcatcattaaatgtgggatgggtgatggttttgattttcaggacacaactaatggtggagggggcaaaccgaaacctattacctctaatataagcaagataaaggaactgactcttcctatttagaatgctttcatctaggttggcataaaactccctgaccagattctcatttgggggttggagatgagtaacagacaaagaccacccacgattttcaattaactccttaatcctaggaaaatgcttgagcttaacacgatattcaggccacaatgggcgacgacatacattctcttgaaatctaagcaatttatcattagagtaaaacggtgcattagacttgtttggctcagacacactaggttcagggattttgatttttttagccactgaggaaggagt

SEQ ID NO: 406115 - DNA, 730 bp, Cannabis indica
catgtagattaaagagtagtagtgaagtgatcgatagtagcaagcatggtatatctcttgtctttttggtttttttttttttttcactgctacttaattaatttttattgtactgtttgaccaccgtatgttttgaaactgattggttctattatttattaattatctgtattttcttattcgatcgggagaattatttcttgaatagttgttgataattatatgtgatgagattattggattattattgtggcttttattgtttgaaatttaattttttgtttgtcttttctttcgtggtggttgacaagattaatgactctcgttcggtctcgtcttggtagatagataggtcgttgacaataaaaataagttaattaggatttttatccttgaattttgatatgtattaaattatgttctttaatttttaaaagttgttaaaaatattccttcaactgttgagattattgaatttagggatttttattcaattttagtaaaaaaaaaaaaaaaactaacgtggatgaaagttcaggatgtatgatttagtacatgtcaaagtttgaagagtatgatttggtagattttaaagtgtggggagcatgatttagtacataaataatcactgaaatagtaaaattgaatgaaattaagagtctttaaatctaacaatttcaatagttcagggagaatttttaacggccataaaagtttagggagcatgatt

SEQ ID NO: 406116 - DNA, 498 bp, Cannabis indica
ggttagggactaactaatgatttagactaaattaataaatttattatctttttaattttttaaatataatacacgcacttatggatataagagtcacatcttttgataaaagaagaatagtttaattaggactgtaatatatttgacctatatataatatatataatagagtaaggttttgcatggtccataatgataattctatacaaatttggcttagataaagtgataatattgtaaagatcaactaatatatataattgagttaaacgaatcccatgctaccaaattgaataatatataaacaattatgatataagaaaagaacgattatcattaatcaaataaatctataagagtatttaaaaaattacggacagagtacatctatctaaacacgaattcttaactagtaacaatttttatcagtgcatagataatttttctctttttttttttactaaatatcatttttatcacaataaaaataatattatt

SEQ ID NO: 406117 - DNA, 522 bp, Cannabis indica
tggacaggaagagttggcgcctctagaggccttgcctcaaagaggggagttggacgctacttgggagtctcctccatcaacgcttacccttgcgaggttcaagaacctcgagactaaaaggctagttgggggtcttccaatctaccaacccgacaaggaacaccttgcccatgcccctcctgagaattggatggcgtggtttggaccccacatagagactcccagctaagatgcaccacaacgtctcttagagatttaggccacatcatgtgcaagcagcatactagcgagccaatggaaatgtacctgctaacctctggcatcattcttagacgcactaccgagtcgacccgacaatgtccatgagtattctaactcatggagacatatgagtcccctcgtggtcctcatatgcctgtcttactagtcctactgactagtagtagctcacttagcaccaaggtgcaaaggggtggtggagagttgacaccgggtactcccccttaaggagcattctaagct

SEQ ID NO: 406118 - DNA, 1068 bp, Cannabis indica
ggctagtttagaactcatattaatttaaacgaaataaagggaaataaaagtagaaaaaaaaagatttttcaaggaaaaaagtatcaaagaaggtagaaaagaagaatttggagtatcattgttgggctgcctccaccaaggtggatgcaaatttatctgcatttcaaagtacttaatatgagacagaggatcttctttgcctatatacatcttctatgtgggcattttaaacatgtgcaagagttcaagggcgttgatgtgaggtgaaaagggtgatccccttctccagtcaagttctaggtcggtgagttttgggttggtcagcctttggactaggctcttaagttgatctatttgggcttgcaccacttgatcaacttgacctacctgttgaccaacctatgtcacatgtggaccccttagagcattaccaggcatgtaattgtctacattgattggttgggtgttaggagggattgcttgtctgtcccgactttctcttatgtgatttaaatcttcccttagatcatgtacggatcccaatctattgaagactggttcattaaggggtcttctgatatgggcattgtgaacaatatacctgtataaggataaaagttatactaaccatcttctttaagattacggttaggcagaatctgctcgtctaccatgtggcccatagttgaattttgtggcctcagaatggacaatctgttaacttagatttcatgggagtagttggtcatgttaggttgtctgccctaaataaaaatcatttcaatataatcagatttactaattgataaaagattcagatattattctatgttgcatggttcacatgatttattttatgattatgtttaatgtataaattctattaaagtccaaaacatatataaatataaatatttgttctataattgtagtttcgtcagcacagtggaatataatcatgattatatgttcaaaagtttaattcccatcatttgtcagttcattagatttagactggcatgacaatcggcgataaggtatacttacacattggataagtgttatgtc

SEQ ID NO: 406119 - DNA, 710 bp, Cannabis indica
tttttttcatcttattcctttgacattttctaatattcttctattctaaatctgcaaaaataaaagatatcaagcgtgaaaatgctccaaacatgatttaaactaaattaaaaatatactaaaattaatctaaaattaatcctaaaaataacctaacaaattccctgaaactaagcttatactcgtcctcgagtaaaacactaaataaacattaaacaagtaaatttccaacacatgagaaattttcaagtagcttcaataacatgattatgcaaaatttcacttatgcatataatctggaatttcagttcaatcacatcattggcatacttcaatttatttttatttagctcatgaaaccatagaatgcaattaactttaattgaaccactttatgaatgccaattacaatcatcaatccactaacccaaaattctatatgcttgcaatacttactattctccactaatataaataaatgtacaactaagaatcaaaaggtctttttaggcttgttgtgttagacttaggtaagggtagattacatagtcatttaggcttgtttataccataagcttctccaatcatgtcacccaaaatattttttacacaattctaataccctttttttttctaattacatgagagatatttaatttctttttttttttctaactaagattgtaataactttatatttatcttttttt

SEQ ID NO: 406120 - DNA, 710 bp, Cannabis indica
ataaaaaccatgaaaaaacttcatcttcaacaatgcaaaaaagagtctttattaggttattatatctgtggccttcatcaacatataggtaagaatatctacactctcatactctgcaataatttagagtgcttttcttcacatctctatatagattatttattattaaactcatggcatgttcaacttttacattattgactattatttttaaactcatctttctttcttttcacaagtctaatctttatcttttggcatataaaataatatatgttgttttctcttcaaaatattcaaatttaatacccttttccataaaaaagatacttcatttaagtatatcattttatataaggtcggctaaaccactctaaatgtataaatgtataagagcatctttaatggtactcttaattatttttggctaaaatagagaattatttttataattgttgctccaatcaatcattaaatttgtcaattataaattaatttcaaaaaaaaaaaatatataaaaaataaaaaaaaaaaatatataaaaaataaaaaaattaacaaacatacggtcggagttttaatattttatgggtttagatttatttacataaaaacggtttaagtgtattttatgttgtattttattatttattgttaatttcttttattatttgtatgttatttttatgttgctttgttgttattttgat

SEQ ID NO: 406121 - DNA, 653 bp, Cannabis indica
ttttttttttttttttttgcgtgtgagaaagtaaattaattaatagtgaaaagttaaaacctttatttttcgtgtaaaaatgtgtcctttaacatactgaaaaccagctcatcacgtattaagatgtaattattattattattttaaaaaatcttttgttgtctacaaaaaattttatgttttaatttaagggttatttgcggcaaaacctctttaagtggtcaaatttttgcaactaacccctaattctaaaatttttgcggttaaactccctaaagtcaagttctgttagcacttagtcctttccgtccattttagctgttaaatgtcatggtggaatgtggcacaattttattggtccacgtaaattaatatttaaaaaataaaaaattaattattttaaaaataaaatataaaaaaattctttttctttaaatattaaaaaaattaaaatttttgcatttttttctttttcttttctatctctttgcattcaaaaaaccataatccaccataaccctagaatccccaaatcccccaaacccagatccccgaatcccccaaacccagatcgccaaaaccctcttgatctcgatcaaaatgacgacgaagtcgacgacccagaaccggctccatctcctcgaaccagcgag

SEQ ID NO: 406122 - DNA, 472 bp, Cannabis indica
gaagtgtttattaaactcttcgatacggtacgctattgcagctttcttatacaatttagtcccaacagcacttttgaaacaatgttttatattttgctttacatgccaataacatgccccatgagaagccataacataaacacgacgaactgcatgttcaatactttgatgtctatcagaaacaaaacataagtctgagctatcaggtatcaagtccttcaacttctctaagaaccatgtccatgaagtgttattctcactgtcaaccaaaccccatacaatggggtaacttggtattcactatcttgtgtagttgctactaataacacacctttatgcttagtcttgatccaagctgcatctataccaattacttttctcatgtaagtgaaccctcttatggccacacctaaagccataaaaaatacttgaatttatttctaaatcaagttcaatgtgggtaattgtacca

SEQ ID NO: 406123 - DNA, 551 bp, Cannabis indica
ctatccagtactaatcatgtggaagaaagtgttcactattattatttaaaattatttaattattaattatgtctgttacattatcataggacagtttactctttcctatgaaaatgaagttttcggatttttttttttttcagaataagtaataagaacgagatttagtacaactttattttagcaacattggaatgggttaatgaggaggtatgttgataacgtttaaaaagggtagattgaatcattactttctaatattattaatttgaatagaatttttgaattaataaataaatttaagtaccaataatattatcgtttattataaataaaatattacggtatatatttagtttgtgagatcgggtttttttttaattgagttatttttatattattagcaataatatatgtacattcattatacataaattttatgcggatggtgtacacataatatatagaaatattcattttagttaataaaaaatgcaataaaatttaataggggctttttcatttttacacttcaaaacagtttttttttt

SEQ ID NO: 406124 - DNA, 599 bp, Cannabis indica
ctccttggatcgtcacctttctttaaccgatggaacacaagaggaattctattaaatgtccatggactaccatccaccacagtctgaacatcaatctcatggtaaaattggaaaatatatctattagtatccaattctttaatatacacacctttaccggattgccaaagtgaagccatcatatgtctcatggcatcgaaatctattgttcgacccgttaaaaacttgcccaccaagcaccacctatcatcaaaaaccagttgatcctcatcatcatcccccgtaatcagtaccccaccctcctcctcctcctccaaattcagttgagcatattgatcctccagagactcatttggaacactgctggaagccatgccaaaaagaaccaaaaaaacattacgactggaaatacaatcacaagaaaatcaaactttccaacatgtcaaaagacaagacaaagataatccatatattttttttcatttgtttaacatgtaaattatctttagacaactaaaagcctaaaagtctctccgtagtatttttgtaataaagaaattttatgaatattatttttgtaattagtaaatagtataaat

SEQ ID NO: 406125 - DNA, 607 bp, Cannabis indica
caagtgagggaccagattaatcagctacatttacattactttttttactctttagattcccttctttaaccaaatatatatgtagaataaataatataaaaaatcattttttcatttcatgtgttttttgttttgaaagttcattcatgtcttttagatgaattaagttttcaactttgtattttgtaaaatagatgatatataatcaaaatagtttcaaaaattctcataaaaaattattatgacaaacaatagtacatgtatatggccaaaaagaatgccaaaaatagcattctattttgttttttatttatagaaaatcaaaaatagtatttgggatagagtataattgagctgctttcttaaggttgggttgaaccaaagagatagtatttaggatatggtattatcaatacatttgaagagttttatcaaagcaattttttccctgatttcagtctatagttgaaatttttgtagtgttgggatttttgcagtttatttagtgtttgtttaaattacatatacaaataggaattgtgcattgttttgtgttatttcttattagtgggaatttgcaggtcaaagttggagtgaaaggggctga

SEQ ID NO: 406126 - DNA, 995 bp, Cannabis indica
tgtgcacaagctatcaaagcaattgttttatgtcttcacagttttggcttctggttcatgatgttggaaattttgacttttttactttaactttattgatttgtgttttgtaaaacgatctgcaaataagttggctcattgcttgacaagagactcttctttctctacaggctgtgtgcttcagttagaggattgttcctctgaaatgcgttctattattttgaaactaaatttattaattaattaagtttatggatttttattacaaaaaaaattattttaatgttgatgaaactggtttctaatattggcatggtttttatattatatatttttcgcattgtatttttttttcattatgttattgatgaaactagttttttttttttgcctcttataatgaaatatttagtttcttttaatattgataaaactagtttttaaagttagtattatttttagattataatttctcgcactgtattttttttattgtgttgttgatgaaactagttttattttttgttcaattttgattatttaagagtctagaaaaagtttttttttttaacttgactaattatgtttgttatcatagttgttatattatttgagatttattttttattttgtatttattttttactaattctaattagcaagagtttgacaaaaaacctaaactaaaagatttatgtaatataacaccgtttttattatgagatagcaacaaacaatttaaataaaaaaaccgtaaagtaactatgaaaaaattaaatgtcttcattacaaagagaaaataagatgaaacaaacaaataaaggactaaataataacaaataaacaacaaaattgttatacccgaaattcggttgccatttcagtggaggatacgtgtcaagataaatagaatatggatccacgtgatcacttttaatggaataactcattaattgcatcggtaacaaagtgtacttgcaactcgctgactacaa

SEQ ID NO: 406127 - DNA, 710 bp, Cannabis indica
ctcaagtcagtatgtttcatcttatttgctcatcagatgaaatttgaagaaaaactgctgcaatttataacagttggctttaataccaacttaaaagggacccaccagcaactatatataggggttcctctattctcaaatagaggactgagttgagagagttctgatctctaatctccaaagctcatactttagattcagtttagtaagagagagtctaagatcgtagtgagtgtgtgtagagggatgtaaaaaagggagtatcactcttgaggtgatttccctcaatgtgaggcatttctttataattacaactgtgttgagttgtaatcttgggctcattctattgtgtactactgactatttctattcaataaagatcaaccattcattcattattgagttaagttttctttctcttattttcaattaagttcaagttttagttttgtgattggttttagttctgaattgtgtttcttgaacattattactgttgtaacaacttgttttgagggtgaggattcaccacaatatatataggttaagagcatattagctagtaaatgtaaatttcaggataaaatacatataaggttagggtgattatacttacacctcatcattgaaattaataatttaatttatctttttaaaaggaataaatatcattttggaccctgtgttttgcaaaagttacagattggacc

SEQ ID NO: 406128 - DNA, 612 bp, Cannabis indica
tttttttttttttaaagaaaaagttgtaacttattagtttattgtatgtaatttattgcataatttattagtttatttataaattttattagtttattagttatgtgagctttttttttaagtttattgtaacctactgtaaataaataatgttacacaagaaaaaaaaagtaacctaaaagtatttaaaacaataaaataatataatataatctaaaaataaatacattggtttcaatgtaacaaaaaagtatataaaataattggtacatttatctaaaaaaaacaattggtacataataatggtagcttattataatacataataatctattagtttcgaaaataaactttaaggttacccaaatatattttaaatattatacaataatataacttaaaaaataattatttgattataagatctttacaaataagttttagaggtaaccaaattgcatctaaaattatatgatataaaaataaagtttttttttaatgtaaaagtaactagttagttttttatcggcattataaataaccaaattgttacttttgaaaatgtaagaaaaaaaaaaatagaattcaggatgaagaagctatattattggt

SEQ ID NO: 406129 - DNA, 882 bp, Cannabis indica
acctcgagatcgatgggctcgtccagtgatctcttcttatgggcagtggttttcctttgcctcttgggatgaaccacttcagcagctgtagggaccctaagattggttgcccttttcttccccttccggtccatgatatcttcataacccatgtctacaaaacaagacaaagcgttgtaattattgaaaaggccgatgaaaaaagaaggaatacaattttccacctaaggggtttaccaaaatcactagaaggcaagctatcactagatgaaggggtagagaaaccataatatccactaaaatccctacagcatgtaatcttgaatatatcaaaaggctcgattggttctaaatcccagctcgcatctatgtgacctgccctatcttccatagtaccgtatttctcagctataccataatatgactcatgacagttaacctggacgtggaatctaggataccagatgtcaaacttatgagcaatgcggtccacgagaagggaatttcaaatataaaaattaagatgggagtcttggaaggtgattaatgtattacgctcagccctaagtacagtaggagacaaaccacattgattacctcgggatgctccttcaccaaattctcaaggggcagtgttttgaaggtattgtgcttgagcctaagcgatcccaggcttggtccttggtcggaacagtaatctattgccaagaagaatacttgggaatcttgtaatcacaagtatattccttatcagcgagaaggcccaccgatcgcaggatggcctcgctcaaaaggaaatcgcatgaccgaagaccgtagggaagagttatcagtcgcctatgcctactgaccatctcgggggtagggagtaggcctcgtcaa

SEQ ID NO: 406130 - DNA, 999 bp, Cannabis indica
aagatgtaagtattgggctgatccacttggtcagctttaacaaacaagtcagaaatcacaaataatacatttaagccagatcctaaccatattaggattaagatttattgacctaagatcaactaagtgatattgacttagaaagatataatggcaagtttatgatatcttattaactgtcaatatcggtccagtccgatgtatactccatacatctgatattagaatacttgctaatgtcatggaaaggatattgacttagaaagatataatggcaagtttatgatatcttattaactgtcaatatcggtccagtccgatgtatactccatacatctgatactagaatacttgctaatgccatggaaaggacattctacttaagtgtaagtaaattttatcgctgattatcacgtcagtgtaaatctagtacactgataaattatgggactaaagactttgaatcatatatataatcacaattactttctcacaattactttctactatgatgacatcactgtaattgtgaataattatatattctggatttaacataaattgtatattaaaaccataaacatagaaaatacatgtaaacttaaatgacttctagtcttttattgacatcaaataagattatattgaaatgagttttatttagggcataaaatcttaaaaaactaacataaaactagaagtgcattttaattagtccattatcttaatattcatatctagtgtagtgtgtttgactatgctcataagacattattaaacattatttttccatatgtattattcctctagggatgctgaattatttactgcttgataagtgcatctgaatattcagaagacacaactgtcattctattcaaaataggatagagataaaatagtcaagaactttcttcagtttgattaactttctagtatcttttaaaaacaacttagttatttagcttcactagtggaactaaattattatagatgagt

SEQ ID NO: 406131 - DNA, 617 bp, Cannabis indica
tacatatcgtaaattacacttgtattaaagattgtaatttttattatagcaaatcagttatcaaaatagcttccaaatgagaagggacagaccttctactggaaatacgatcaggatatgaacaagaatgagctaaccagttagccgcttagttcccatatcgtttaacaaactggacagaaatatgaaaagtagtaaatgaccgtataagattaatacaatccgaaataataagaccaagagaagaaagaatttggctcttgctattgatagcattaaccaacaagagacaatccgactccataatcaccgctgtaggacgaaaatcctcaacagcactgccttcttcccagcatgctttaacccaactcaaagcctctttcattgacaacgcctcagcaacagcgaggccaatttacatatatattaggaaacaaattcggggttatattttgtttagtaacaactaaatcaataaaattaaggaaaaaaaattgctgaaaaaaactaaaaaaaaatgtgtgtttttttattttcattttttttagatactaaatctaaagtaaaataattaaaaaaaatcaattattttaataaatttaatttataagccttat

SEQ ID NO: 406132 - DNA, 530 bp, Cannabis indica
accctggaggaagtgatgaagggacctatggtccaggagaaatacacttgccgatacaccgactgggaggttgatgagttgcattcaactctaacctgtgcccaccaactggaaaagatcttcactatgggcgggatcaagccctctgcttctggagtctttcaccgtcttctcagagatgaagagacgcccaaccgtaactacggaggtttcagagtgtggagtcagactcatctcatgtcctgagcaatgctaccgcttcaggattacttcataaatttttagtttttgttggccttgcgccgtaccatcttatccccaagcataccgcctgctctcaggcttgtttattttttacgttgccagaggctgggctctgcccagtccggctgaaatcctttattttttatgaacttgtatctgtccctaagaagggagacaaaagatgattttttcacactccgggcccatcctgctaatgagggttcggttccttttaacttccaaaaaaatgttaaggaatatcgtca

SEQ ID NO: 406133 - DNA, 509 bp, Cannabis indica
cggttagtaggtggaatacatcaagcttgcggcatacaataagagggagtctatttatgcataagtcaattactttgtatttttgataccgatctaatgaatcttatctctgggcgtggccccgtggactagtaacaatctgaaaggattgttgaaaccacgtacaaaaatcttgtgtgtttttacttttatgcactgtttgtttttctgggtttctctggagttacagagttgcattctgtaactacagaaaactgttttcagtaccagttttattattccgcatttaattaaacatttaattaaataatcaaactgggaatattaaaatacggaatttcaaaatagaagaaagtattaatgatatctagagcttgtgaaattaaaatttgttgacttcttattaaaaaaagaaaaaaattgttgacttcatgtttgagtatttcaatttttatagcagtaattattaaataattttttaaaaaataataataataataaaagattct

SEQ ID NO: 406134 - DNA, 941 bp, Cannabis indica
tttgtacacttttatatttttttgaggggtgggaagtgtgagattggctcttttgttttgttttatcttttttggtaaagagaaattcctttttgggttttgtcttttaaggctgaagttttgtaatagagaagttgtgaggactcattgattcagtgagtaaacaaattctcatattaaatgtaatttcatcatagtaaatcattcgtataagacatagttttggctcagcttcacatgatatagtattgtacatcgacctacttattctattttggtcttacataagaaaaatgtttgccccacaagacaccaaagaaatcaaacttgacatttctcaatgatgcacctgacttttgatgtttgattatggaagaaatacattatagatttctctactcaaaacatacattattaatggatattggcggctaaactacctaaactttaaattttttaacacttaacctcaaaaatcgattttttaggggcaaaactacctaaactcccattatgttttgctctgtacccctctgtccaaaaatcacagttaagtgccacagtggactgctcatgtgtacatacttgtacacgtgtcaaatttttagtagcccacgtaatattaattttaaaaaataattataaatatttaaaaaattaaaaaatcagaaaaaaaaatttaaaatattttttttagatattgacggctaaaccacccaaacttcttttattttcttctttcttcttctttactctttctttctataactttctgaaaccctaatctctcagccctccctcccaagccctatctttctctctctcgtcttaccacctaagacctcaccggagccgaagcacccaggccctcgccagagccatttgccctctctttctctctctcgatcttctccttcccagaccctctctctctctttctc

SEQ ID NO: 406135 - DNA, 1097 bp, Cannabis indica
tcattttattgtgagtaatagttattaggtttatagatctttcaattaggttcaagttgagttctagtttcttctttgttatgtccttgcttttttatggagaatttatttcaatgttgtgagtagaatgaggacatgaaaacgtttaacttatggtgatctgattgtctcaggcatgacatgactttcgtgttaaaatggattacgattagttgaatatgactcaggttgagagggaaatggtgtgcctccagtttcggttactattggtgttgaaaatgttgctgcatcgtttcatgaaattggtggaaaatgagtttaaacaaactgaccacccaaatgagcctcttgataatgataggcctactctgcgcattatctcaaccttcgattttcaatgtaagcttatttcttggtccctttacgtggtttgtattaatatgtatcttttctagcttctctttgtttttttcttttctttttcttttttcacaatctttattatttctgctactaattcagttctttatacagtaatttgaaagtttatatatttatctatgtagaaaatcaaaaaggaagccgtcgacaggagacttgcggcatcaagaacagtgtcggtgggtggcaacagcaccatggggaggaggcttccaatatcgtcactcaacaatcaacaagatgcttcttcgaatgctgtaaatactactgtcgtcgagggatcagatactgcaactgttgttgatttcacaaaggatgaagttcaggccttgctatatgagaagttcaaatcaaccaaagtttgatatcaaggtttgtttaaattaatattccttaaaatcttcttcatatatgattgattttctgtttgaaatatattgttttgatttggttattttcttgtgtaggtagggattaatgccatatttgggtttgacaagcatctgagttctcacctcagtgtttgaacatctattactcaagtaagtcaacataataataattgttaactcatgtcatgcacatcacatgtgttttttatccatttttgatattgttctttctctatgaatgttgtctctgaggtttttggactt

SEQ ID NO: 406136 - DNA, 665 bp, Cannabis indica
ttcttctccattggagatgatcttcgcagctttgaatatctcaggcgatgccacagatggaagggaatattcatttaagagctccgattgtatagctgcctcatcaccgtcaacatctgacacccactgtgtcactcctggaatcgatggtcctacttcctgaacttgccatttgtgttctctgaagctgtcgagtctagcaaaggctcgtttgtgttctcttattgccatttctatctctttatcaccttcaatatacgtctctagtgttgaaggagttccagaaattaggttcgccgcgtagcgatttcggattccttcttggttgcgaacccatactgattgcacagcttggtggatccactcattgagatcgttgtcctccgatattgttgcgacatgacttcggaggttgcgggcgaggtggagtaaccttacttgcccaagaattacttgatccagaagcaacgcaaggtcctccagtgtattaaattcagaatgataataataagactctgatttccattgttcctctaatttctcctccattcttattatcggcatccgaagaatcggtgctctgataccaattgataagccccgagaactccaaactcaagaacacaatgaaacagtagcaataataggagtagaacagtagcaaa

SEQ ID NO: 406137 - DNA, 556 bp, Cannabis indica
tttgtttcagtcacttatataatatctatagttgatgacaataatacctaacattacaaaatagcgcgatcattcctattaataattttttttattaattaagttatttagcttatcttttgtgttaaacagctacaacctcaattaaatgtttgaataataataataataattaaaaagttattttttgggtgtaaattaacaaaatatttatggtataagttcttaaaattttgagtttataataacattataaattgaatgagtatttttatagagatacaagtgtccaatgttaatagaattgtaattttcgtccaattacattagtaggaactctattaatatcttaaatttgtaactagacttagttttaaatttattgaaagaagatttagaagtaattaacactacatattttcatctaaacccaataatttaaaatatagacgaaattggaggaggaaaattatagttttaacattagatacttatgttagtaaaaaaattattaaatttatgtttgttagaaattcaaaattttaagtacttttcc

SEQ ID NO: 406138 - DNA, 502 bp, Cannabis indica
aatacactcataataaacattgccaaacccgtaccatttgactgcacatatcatttgcccaaaatatctgatactgttttgtcaacaatttggaaaaactcttccctataagaaagaaaaaaagtcattgcagagtacacaaaagaaagtcactgcaaagtcatattccctataagaaagagaagctgctttgttttgtataacttcctagtattttttcagcagtacataatagtcatacaattggcttaatcttatacagaaacaaacaaaaaaattaatctaaaacaagcattaatatttcactggtttatatttatcatgataatattattgttaagattcttacttggtattgcattgcattatctgatgtcacaacaatcacattcaatggtgtctctctcaaggaacagagaacctaaatttaactcaagcagaaaacatcagaccaaaaaaaggtaataataattacaataaatcttgagcttacttttcgttc

SEQ ID NO: 406139 - DNA, 873 bp, Cannabis indica
aatatttaaaataaaaaaaattagaaattacaccgtacgtataattacactcaattttttatagaagtgtgagaattagatagtgtaatggaaaactctctattacccttccattacacaattatagtataattgcgtggttagacaaacacacaaaattttataattaccttcaattaccaattttaattttttcttgattttctttacgtaccctaaaactcatattttattttgagtttaattacttgatttataatatttaaaatattgtgtaaaatatttatataataaaatactgtaatatttttcttaattgaaatttatactttttgtatacacttgctgatattcccccccccccccaataatttcatcttggctccgcccctggatgggtctcagggtacgttactattttttaaccctaattactcctagatcaaccccagccctcagatcaaataactcccttatctaacggttgtcgtacatcacggaatacatttcgtaaaagtacatcacgggacaaaatcgtgtccctaaaaatatataccactaatatatatgtatattatattaactaaattatataccacaattaaaatatataaaataaataattaaatatatacaacatgccaataaaattatgaaatttttacaccaaaaatacaaaatggcaactttattacatatttactacaacacggttaattcaacttttttacattttctctttaatttattacacatataccacatgcacatttacctccatgcatcagacacgggcaactcccctatcaatcatcaatcaaccctcaatcacttccctctcttttttctttttttttcctttgatttttcatt

SEQ ID NO: 406140 - DNA, 581 bp, Cannabis indica
acttttgattctgaagaagctgtggaaagagtattggaaaataatttttataatctgaaagaaaaacaaatagaggtaaagatggctaaagcaaagataaatagaagaaaccaaattcctaccgcgacaaacaacttgaaccagcctcctttgggttcccaaatttattaccccaatccctatccattccaacctcatcccaattattggatgccttattataatcatatgattccaactccatatccatatcaatatggacagaattctatgaatatgggagttcactatcccaattaaatatgtttaagtagtgaaaaatacttcatttgaaaatttaatgttgttttgttctcatttatgtattatgtcttttttaatttttaataattaataaattatttttcataatattatttttcaccatatgataatattcttatcgttgatgctaatttttttttaagatcacacgagaaaacttgcacgtgcaagcatatacttttgtgatgtaaagaaacaaataaatttataatgtataatataatatattaaataatttagtagatagcttaaaatat

SEQ ID NO: 406141 - DNA, 925 bp, Cannabis indica
ctcgagttctgatctgggtctggtttccgaggcgtaggtccacgtccgggtcctaggtctcaatctgggtccatgttcgggtttgggtcctagtcctaatttcgattttgattcaatgtttgggtttaggttttggtctgggtctgggtcggggtctgagtcctggtttgagtttgggttcgggtctgggtctaggcccagatcctagtctgggtcttggttcgggtccaggtctgagtttgggtcccgggtgttggtccaggtctaggtcagggttagggtctcagtccggatctaggtcccaagtttcgatctcattctaggtttgggtctgggttcgagtctaggttcgtatccaaatccctatctagctttaagtctgggtctaagatcaagtcccaagtctaggtctgggtctaggtctcggtcttggtgtgggtacacaactgtgtctgggcccgagtttcggtctcagtttggttctggggctaggttcgagttcaaatctaggtttgagtccggatccttgtcactatcctagtctttcggggtcctagtctggccaaatctggatccctgtcacgtgtctcgttctggttctggttcaggtccccagtcccaggtccgagtttgggttcgggaccgagactggggtgcgattctaggtcccggcccattttgtggtctgagtctggtcatgttggttctgaggttcgagtccaggttcagcaccgagtccagatttgggttgagatccaagtctggctcttagttcaggtctagttctgggttggagtctaggtcctggtccggctatggttccaggtctaggtccaagtctggtaacggttctaggtccaggtcgatgtcttggttccggtcctgttcttgggtcccggtctactttcgatttttgttccaattt

SEQ ID NO: 406142 - DNA, 861 bp, Cannabis indica
tgaagactcacggccttgacggcttcctctatttctctgaaactttctgttaccccttgatgctccggaagacacagccttctgtttgttattagggttgccactgtcggtccccttactaacattaccactagcaggaggattcgatgccgtgatggcatcctttacagtctgctctttcgcaacatgctgcttagcctcctcagcaatcaaggctagctcaaccactttattgtacaaagtgtcatgtgaggtggtaatctttaagtcccgactgattgtggcattcagtcctcgcacatacttttgtttcctagtgaaatctgtaggcaccagattaccagcgaacttagacagacgatcaaattccagagtatactcggccacagacatcttcccatgagtaagcttcacaaagtcttccatatgtgaagttctcacaactatattgtaaaaattttcttcaaacaaatttttgaattcctcccaggtcattacactaacatctcgggtttggcccacgatatcccgccaaacgcgggcatgatcttacaacatgaaggttgcacagttcactctctctgttcctgtcactcccatattgtcaaggatacgggtaatagtgctcatccactgctaagcctttattatgtcaatacctcctagaaaggtcagaggtcggaggttgtagcttcacaaaccactcaaatacagaatctcgatgcggcataacaaacccttggttacccaccactggcacaggtgctggtggtatcacttgttctacaggggcacccagttgccttaaatgacgcaactcttcttcctaacgaagtatgacactttgcatttcttgaaaca

SEQ ID NO: 406143 - DNA, 526 bp, Cannabis indica
ttccagtgtgagttggtggcgaaatttgtgtggaagttgttcaccaagggcaactttgatcctcacactaacaatattgtatgatgcggttgccccgttccccacccttccctttacctttaaattgaggataccatggtgggccatgatatttccagccagacaagcgacaatgaatcacaataattaataatgtgtattttttttttttgaagtaactgtaaagaaactaaaacagttacaaagaggaggaggagaaacaattcctccaaaggatatccttatcctgcctgagggcttctcgagcattgttgtgtgctgtggtgttgtgaactcgagggatgtaatgaagagaaacaccagagaaagaggatagggacttcttgatcagctgcactacacttgataaagccaaattgtcttgtcaatagttttttatccttgtaattagttgctgggaatccgattctatggcatctaggggaatctttgtaacgcccttacttacgtaaaataagatgccata

SEQ ID NO: 406144 - DNA, 893 bp, Cannabis indica
tattttgatgtaaaagttgaacagtgaaaacgtttgtaaatattttataaatcgggatcccgtgactttttgcaaaatggtttataagtttaatgaaaaagcaaaattttaattaatcacgtttttccataaacctcgttgattagcaacgagctgcacagtacgtttaaaaaaatcacgtaatacgcctaaattagttagggtgttacaggcaagctccgaagagcatagctataatggtacaattcttagtattggacgttccatcagcatttaatgtcatgttaggccgaccatctttatatgacttaaaggctgttacgtcaatattttattcatgccttaagttcccaacaaagaatggggtggggtgcctaagagaaaaccagcaggctactcgggaatgttataaccttgccataaccaaggctaaaaaaggaagtattctccagctagagttcggacaagggaaaaaacattattaagtagggagcctcccaaggcagggatgaaaatgtggatcctcgacttggggaaccaagcagcaatgtggaccagtggaagactagaagagattgaaatcgactcgaatatccgaccagaaagcttaagattggaaaaaggtttgccgctcgaagtataaatcagcattgataagatttctgagagtaaaccattttttgcctgctcacatgaggatatggtcagaattgatccttctataatttcacatgtcctaaatattgatccaatcttccgatcagttcaacaaaagtgaagactattggacaaggagcgagccctagccttgaaggaagaggtaaagaagatacgcaacaataatttcataattgaagcttctacccagcttgggttgctgatcccgtactggt

SEQ ID NO: 406145 - DNA, 1089 bp, Cannabis indica
atttttttagcgtatagtaaatttctttattttttattttttatgtatattattaatttaaaataatgtgcatcttgatgtattattatttgtattatgctattgactatatattgatatagtatttaaattttagatatttaatttgatacaaatatcctgttaattaaattttaataaaatatttatttatctactattattttatttttccattttcccctcttctctttttttttaacttcaactcatttttctatttttaatattttttttatacgttgacttacctcacttaaattaaagcacatttttaaattaataacaataattaattaacaaaatatctaaatttaacaataatattaattaatttattataaatattattattgtaaataataattatgcaattacaatgcataatagagacataacagtttcaaatgtaaaatgagatataattattataaataatgatactattacagtacattatgaagacaacagtgttgataacaattttgaatgcagtgactactataaataaaatacggtgatgacaataactagagactatatataaaatataaatgagataaagtaataacgactttaaatatagttgttgaccgaggttttcggcaaccaataaaataataagagattaaagagctgtaagaaattaagagaaggatttttacgtggttggggcgttaatgagccttagtccacgagtctgtatatttatgagtgtatttaatacagagaatgttcttggtgagtatttactcttcttgcacttatgcaacccaaaattctcgacccccattaatgagctttgagggggtatttatagtgtttttgtggggtgattcccaaaattatagtacatgtatttctgtcactatcaataaagttgggtattcccaatgaatataccatgggtaatgcatggtgaaatccctaggtgttgtagggattttatgtggattgtccttatttccttttgactgatgtgattcttcacagtgtagccgtcattagacttaagtgatcatagccttgtaggtgcagatcgggggttgt

SEQ ID NO: 406146 - DNA, 507 bp, Cannabis indica
atataaatatatataaaggtatattggtagtcattctaatacgtttaatccataataaggtatatatagttgtttatttttttctcactatacagtatatacatcatattaaaaaataaagttattacttatttatatatactcaaaatactaaaaaataatattttcaaaaaaaaatactaaaaaataataaataaataaataaaaaaaaaggtactcatagattacactaattcactatcttgagaatcatattataatgtataatgagaaatgtaagtaaatcgccttatttctaactctataaatagttaatgtcccttttttaaaataataaagtaaatgtctttttttactttttaatacttaaaatacccttcattatataaaaggcattatatgttttattcctttaatagaaattatgaaaaacaataaatcaaaacctctctactaaatttttgtcaactattttttaattacataaaaagtattatatattttatt

SEQ ID NO: 406147 - DNA, 659 bp, Cannabis indica
aaatatatttatttagtgggatagttaatatgaattatttgagttattgtaccaaaaataaaagattctacattacattagtgttaattcttcaccaaattagtgtaacaattagaaataattactacttaggttagggcaccctctcacaaatgttacctaacaattagcgataccatattcatttgttattcctttctatattaattgataactataataatcaatccaatgtcatctaatactagtgttagtgttagtaaatatggattgaacttttttacacaatataaaagtatgacttggcacgaaaaatatatacttaggcactatatgatacgaaaaaatatagacttaagcactacacaacatgacatgatattgcaaattggcacgatacggtacaaaaaatatataagtttaggtatgacacaatactgttagacattttatatgtataatataaaatatatgtatgtgtatataaaatgcggaattaaacaaatatatacactatataacttaaggatcgaaatacctccagccattgattcttgagcttcaaacccacataagcttgatctgcaaaagaaaccgattgatgtgggtaatcgggcttcctcgctctctcaactctctttagatggattttgctgtta

SEQ ID NO: 406148 - DNA, 526 bp, Cannabis indica
caccccatattaattattgtattgattagaatatttttcaaaaaagaaatatgatgtttgtgtcattaatgtaatatatataaatatatatatatatatatatatataatgatgaatataaatggtctgctctgattcaaaccagtaagaatattgtcgagaccataaccagaccacataagacgaacagggtccaaataactggatcaccaaccactgattcatttagttccgtcttaagcagatttgtctaaactgatttgtcttttaaactatagtttacgaatttcttgaacaaccctaagatctgatattgcatatttgcagctaataaactcagttatcttttttgtctccacccacttttcactggagtgcagtgaaaatagccctaaggtacctgaaaggaacaatgcatctaattgcgccggtaaaagtatatatatgtatcatggagcacgaagctccctttcttccccattttcatttttttctaaaaaaatttctcaccctctctcgttctctc

SEQ ID NO: 406149 - DNA, 624 bp, Cannabis indica
agcttttggtttattattattattattatttattaattttagcttataagaataaataatatatcttttataagattttttatgcacgacttaaattaaaaaaaaaataaataataaaataataataataataataataataataataatacctttttttttttaattaaacgttcttctaagaatttattttaaaatggaataatttatcaatgttttaatgagattattttacaaatacataaaaataaattacaaaaatgttattgtatagaattttaaatatttttgcaatttttataattttatttacaaaaaacacggtattttaatatatttttatgtcagtactcttgagaatttattgttgatttatctattacttttatgtatttttgtgttatttttatacgacaccttaaaaattatatttaacattgtttaaataaaatggttgcctagcttatacttaacattgtttcaattgtttttgtgtttttataaaattatcccaataataatatccaacactacattttcttattaaattaaaccatactatgtttttgttttttaatttaaatttggggaactattaattgtttttctttttctttctttttt

SEQ ID NO: 406150 - DNA, 725 bp, Cannabis indica
tgatttttaaggcaagagaattatcgccagtatggttttcacagataccactatgtactccacggaggatataatcacatttttctccgtcaatgcatttgagtagcggctggttgaagcttctgcgataaagtcttccatcataaatgacatatcgagcagctcgatgtcgcagttttcttggttctattttgtcttcgggcaagacctccttttccaaataatccactatcggagtcatccatgtaactcctctgacaatgtctatttccatcacttcatctcgactcattgttgagtgagttagcacatcgacaagaatcacgtcgagcaattcagcttctcttgttgaggccaaacgggccaaagtgtctgcgtgtgagttatgagcacgcggtactcgagagacaatcacttttttgaacttttgcaacaactcccatgttatcgcgaggtacttagccaaacgcctacctctggccaggtattctccgtttacctggcatacaacgatctgggagtcactaaaagcctgtaagtattggatctttatttcaagggcgagctttaatcctacgatcaaagcctcatactcagcttcattgttagatgcagaaaattcaaatcgtaaagcagcgtgtaccttaaaattgcttggactgatgagtattatgctgccactggagccttcgctattagaggctccatcgacgtataaagtccat

SEQ ID NO: 406151 - DNA, 739 bp, Cannabis indica
acaccctccatgtttgatcaattatatactgtatgagaagatacatgccagatgtggtacaaagtacttcaacccctaaaaagaaataatggacaagatttaatgagaatcctttttaagattagccataatgtgttgatgagattaaattaggccctgtgacaagtaagacgtcaacatatactagtagcacaatatgcttataacataagtgttggaattaaatccaactaaatctttcctaaccataagcggttacaaagaaaagcaaacttgcacaactacagcaacctcaatacagttacaatcaaaagatcctaactaaaataactaaacaacagatatctacctgccagctcatcacccgaagctacttacccttctcctattccagcagtataaatgactgctcctggattcattttttgcctagatctgaagacatagagagagagtgcagcctgtaattgctctgagttcaaacataagaactcagagttgagaaagagagaggagagtgaaaatcagagagatagaaagagtgttcttgagagaaaagtagtagaatcaggagataaacaaaagcagtaaagagaatcgacacttattagatgatctgtagttgaaagctccatcaatcgtgtattggatcttgattttgtatagtgcaaggctctgctcattttctaaggggagctcaagaggactaccccatcaactcaaggggaacctctataaa

SEQ ID NO: 406152 - DNA, 717 bp, Cannabis indica
cctccacaaggacctatttccttgtattttatgaagacaaatacgatgtaaaagtcagatctgtaattggacacttggaaggtgcctaggttgacagattgtcgacctgggcactgggggctcgggggcccggggccccgggtgctcaaaaattaacttgctccgattctgattctgatgcctcaaatatgttcgtggtatgtctagttgatgtcctaatgcaagttttgaccattttgcactaagacgtggtcccaaaaattgaaaccttagttgaggatgtcaacctaagcgccaagtgaaaccctaggtgtccatgttggcttccgagttgtaggtttctgtaatttcagctcccggagcttggattagattgctccatgtcttcatggtacagaatactaaaagatagtgtaacaccctaactaacttaggcatgttaacgtgatttttaacgtactgtgcaactcgttgctaatcaacgagattatcgaaaaaacgtgattaattaacattttgcttatttaatcaaaaacataaagtaacatacatataaaattccgagatcccgtaacataaaaaatatttataaaagtttaacaatacatgtacaaaagtttgtcgcctagcaactacacaacaaaagccttgatgtcccaaagatcgtacgctctaggcctaactgttgggatttgtgccctaaataaaacccattac

SEQ ID NO: 406153 - DNA, 720 bp, Cannabis indica
ctactactattatgtagcttttttaacactagaattgggtccacatgcttctctttcttgtcttgtgttgctttttgattaatgtttttttgtggattttcatgcatccattgttacaatagggacctcacctctctattatttgtcactattcacaactctataagtattaacacttgaaattcaataacccaataatgtgttttggattacacatagagcccggagcccatttatacgtatagtataaaatttgtattcttcttaatcttctccactcctcccctgttttcatgcccactttcttgccccttttttcttaaatgaccattaaccataacattgttgttggtttaatttaatattagatcctacttatattattttaataaatatcataaaaaattactaacaaattataagacaataatttattgtggtattagacaccataaataccttatagctattctctagtgcttagcatcattaggaagttaggtggctttggttggaggtaatgaaatggaatggaatggaatggaaaggaaacaattttcattccattcctttgtttggttgcattttaaagtattggaatgacattctaatagaatgctctttccactattttggtggaatgactattccattttaaaaaagaaggaatgatcattctaatgtaacaagaaaaaaatttaattatttttttatcaattt

SEQ ID NO: 406154 - DNA, 705 bp, Cannabis indica
tccctctttctctctcacacgcctccaaggctctctcactttctcattagtgattttgcctactaattcatacatttgaatcttaacagagctacttcatatcctattactatagtgatctaagttagattatctctcgatatcaatacaacaaaaggagaataggtcattacccgctaactaagggggccaaacctctataaaataatgtatctcacttacttttgttttcttattatgtaactcgttgtaagcatcaacattaaatatgactctgctgttggttggctaaatttgaggtcaacaatacccttctatttcaatacgcaggagtgatcgagaacaagatagccgaaactctgctaaaattcctctaagctttattcttcatcaagagaaaccaagagagcagagttaggatttcttgcaaacactattttaaaatcattacacacgcctcttaaggccaatatatagacttgtggactagggttgtaaagaccccatagtttaaattttgaaattagcatataattaggatttaattatgaaaattatttatggatatttaaataattatttatgttgatttatttgagttcagaatgcatttttatgtcatatagtgaaatttcataattttgcattttcggggcccgacaacatggagcgcggtgtatggctcagttgttgggttttatgccc

SEQ ID NO: 406155 - DNA, 813 bp, Cannabis indica
aaagataaattagagagtttggaatataggatcccatgattttctctatccaacaaatcaatccggctaaagtagggattcaacttctaaacttttgtttataaaattgataaaaaatagaattaatttctgaacttttatttataaactaatttttaaaaattaatttctaaacttttgttttaatactctcctatctcattcttattcacaatatttaacaaaactattagtttaaagtattcaatatataatatacaatacataaaaaatatatatacaatataattataatattttttacatacatatacaattacaatatatgtgtacatacaatacatagtcaataaaacacaaaatatatacatatatactattaaagtttagatttttaccttataaccattcggcaactaataatagggctgcacagggtattcgggttttcggatggttgtgttcgggcttttggattttgggtgtttaaaatgtgtaaccgaaccgagtttcctggtagtctggtccatcgaatttcgggtagggtatggcgggtttgctatggtcgggttcggattaacacccatcgatatttgcataaaaaacttctatggtttggtgtcatttcactgtcacaaagaacaaaaaaagtacaaataatattataataacatttttatttttattttaatgaaaatataatttaaaaaataaatagtaaaacaaacttagtttcccaaggaaaatgacttgaacttttttcagtagctatttttatacccacgtgcatgatgattatggcctacttttgta

SEQ ID NO: 406156 - DNA, 684 bp, Cannabis indica
aaccactacaccatagaaccttacatgtagtgttgttagaaataaaatatattatattattaaatatttatttgtttatgtacttaatgaattatcattataaatattaattatctggctattttaaaattcaataatcaatccaaataactatttaaaagcatcaacatccctctcaacttatatacacagaccaagtcaaaattaaagcaaattcactccaaaactaatcttgagacactaaaatatgttaattttgataaaatttcatgaagagcaccatataatattatgggtaaataccattttttttaatggaaaaagttgcttctattaattaaaggtcgttcaaaagttactaattggaccctctattttgttaaatgacaaaatagactctgtattttttaaaatggtacaaataggaccctgaactaattttttgtcaaaataaaatttaataataatttgatctaaaagtgttatgacaaaactgtttacattttctatatctgttcgtgatatgaaaagttttcaagttggttatatcaaaaataaaataaaaattaagttcagggtcttatttttactattttagaaaatacagtgtccattttgtcatttaacaaaataaatgatctaatcagtaacttttgcaaaacacagaattcaaaataatattta

SEQ ID NO: 406157 - DNA, 507 bp, Cannabis indica
cggatgattagagaccacacacagattatcttcagacaacagccaaggcgtgttaagcacctcagtagatgaaccaggtcctattctcctacgagcaccatctttgagcagcgtttgtgactcaaagacactacgccatatataaaactcggattgccacccaactcggcctccaagaatgtacagttaggaaaatatcgagccttatatatccgacccacaaaggagtcctgatatagcagtaaccgccaaccttgcttacccaacaaagacagattatactcacgcaaactccgaaaacccatccctctagagttcttagttttgcatagtttcctccaactaaaccaactcacccctttcctgccacccgaactccatcaatacttagacataaggctttccatatgtgaacaagttttcaaaggcaataagaacacagacatagcaaaacttggcaaagcttgtgctgcagtttttaatagaacttcatgttgggttttatgc

SEQ ID NO: 406158 - DNA, 638 bp, Cannabis indica
aactttacggtttgtaacagttacctacaaaaatcaaaattttggcagcataactacctaaaccctggttccgtttcgcagggcactcttagtgagggcctctacaataaaaaaattattttctttattttctttattttctttctttttttcccttttctttttcttttctttcttcttcactaaaaaaccctaacaaaccctagccaaccctaatgtcggcgacacccttgacccccttgtgcggcgtcggagccaccaacggacctcctcctctccctataatctctcgacccaaaaccccgagacccaaaaccccgaaacccaaaacccccaagccccaaaacccaaaaccccgacctcctcctctccccaatctctcgacaattcctctggcgaccaccacatacgaagagagagatagagacagagagagaagagacgagaaaagaagaagaagaagaagaaaagaaaaaggagaagattaggagagacaaagagatcacctccagcctagtgcttcggctccggtggtgagacgagagagaaagagggcctggcagaggagggttctgtagaaaagaagaagaagaaaaagaaaaagaaaaaaattactttaataattttttaaaattaaa

SEQ ID NO: 406159 - DNA, 763 bp, Cannabis indica
taaatagatataatttggtgtatttaggggtttctctctataagttcttagccttgattttcttgcctgaccaaggctcgctagctctttctcggccttatggcgcgactctggtcaggtcttgttgattatcacactattttttatttcactggagttgttgttatctttctgcctaggtattctttattttcttctcgtcttatttcttcaaaggtgcgtctcggggatttgagttgctcattgaatttggattagatcttcactagtgttaatctttttagtttgttatttttatttgatatgtttttttttattattattttcaataacgttgttgttgcaccatttcgctattgttatggtagtagaactttattcattcatgacaggagatttttgtcttgtttctttttaggacattgggaaattttcaattggcacaaagtatatttgtgttagtagcatgactatccttgtccatgttcaaatctgagagattctcaattttttattggccccatagtttataatgtgattgtttattacgattgttatcgctatgatttgtcatttggctatttcattttattctaggtcgaataatagggttgttattactaaattagtcattaatatatgtgatttgtcgaatgttcatttagattggaaatctatcattcttcgtgcttctttgatgcttcaacgctaatagtttattagtattttagttgaaggtgttattagaattttcatttatatt

SEQ ID NO: 406160 - DNA, 686 bp, Cannabis indica
aaatgagatcaactcataaaaaataagataaagccacatgcgaagttgaatattaaacatctcgcattattctggcatgtattataaatgaggcacaaaaatgccttgaaaaataatacttaagctaaaatatgaataaatgagctaactattcatatgagcaatcaaaaagatatacaaaatagttacagaggtgaattatttaaaatattctttaagtttgctctaaaagataaatgtttaaatatggcaaattgtaaactgctcgcatataacagggcaaaaacaaactggtcgcggataaaactacatgcagattaaaattgctcgacatatatataagtagattaataactgcttaaacatgtcaaaggaaaaaatagaaacaatgggaatacttcctagagtatcaataagttggatcaaaatataaatgtttaaattgtgaaataaaatgcaatgaacagacatattcaattcaaacataaggtacgaggcattaaaagtaaaaaataaatgcataaaaagcaaaattggccatccaacaatgtaaaatttcttacaaaaataatgccactaggggcaaccattgtctcggccaaagggccactttcctaaataagtaaaaaaaaaaaagaataaaaagaccaagcctacataataggggtttagttggctcttcttga

SEQ ID NO: 406161 - DNA, 640 bp, Cannabis indica
cagaccaggatcagaaccaagacccagagctgattccagactcagatcgggattagaacttgggactcagacccaacctagaccaggagccaggacgcgaacccacacccggaacctggtctggacctagactgaaatcctgatgggaacctaaactcagaccaggacccgaactccgactcgaaatcaaacccaaactcaaactcagaatcgcaaatggaacttcaaccaaactaggactaggaccaggaccaggaactaaacccaaacccgaacccaaatcaaaaccaagacagagacctaaacctgaattgagactaggacttcaactcgaacctacaccaggaccaaacccacacaataaccgggaccttgacccagaatcaggatagggagctgggaaacagaactaggaccgggacctagtacccgacccagatctgaacttgaacctaggacccagctcctgacccggcaccagaactgaaaccagactgggacccgagattgggatctagatatggaccctaggcttggacaaaacccgtagttagtgtctggatttaggaccccgccgtagacctgaaccctgacaaggatgctaacccacacccggacctgaacacaatctcaaacccaa

SEQ ID NO: 406162 - DNA, 783 bp, Cannabis indica
agcgtgtttttctattaagatagataagaaggagatttcatgtttgacgagatacaactttttgagtcagcataaccgtctaaaggataaaaataagaagcggttgagtggttattagatattatcacatgtgtgaataaatgaaacgtggggaataactgtccacgtttcattaatagttgtaaacgaatcaatctcaaaaagaataactgccaacctatattctacaaataggggcagaatccatgagaaaagggacgacaaatttgagagagaaaatcttcttatttcaaatattaagattgtattttgtatccagaaaatatttctaataataaggactcgtggagtatgtagattttaactacaaaatcatgtaaaatatctggtgtcatttattttcatttatttctgtagaatatttaatacaaaaaaggctatttatttagttaacgaaaatctgcgttcgcaaggctaatttcaaccactcttatcctccattctcattaattgattgagaacccatagagagaagattagtttgtggaagaccatatacccatcatctcatatccaatggaattaggtatgtcttccatcttatcgaatcataaagtaatcttgataatctaacatgagtataagatccatgtgtatttctagatttaatttctaattatatattgtctcattacaattgtatatcttttgataattagataaataaatctgcttctgacttagagatctagggaggaagacttagttgatagtattgcacta

SEQ ID NO: 406163 - DNA, 582 bp, Cannabis indica
ccggcggaccattaccggcggatacccgccgctaaagggcaataccggcggatttcaggattattactagcggactgttccgcccctaatattggtatttgttgtagtgggtgcttctagggctagtggggttatgttgggggtcgggtgtggtgaggttgggcagggagtgttgaggaggggtagttgtggggtgaggcgaggccgttggtgcccactcgggatgggggagtttgtgttgtctgtcgatgcggttgtcaccccggggagggggtttgtggggtttgggagtgttgttcgtggtggtgagggggtggtgtgggcggcctgggctatgggtgtcgttggggactttcaagtggcggtggcggagcttctggctctctgagcgggccttgtgtggtctaacagattggggttcaatttggtgcgtgtggagacggattcttcagttgtgagttcttggattaattgttcggataatattcttatgtttaagccaattgttgaggagattatttctcttttagcggctgttggtggtggttcttgtagtgctatttcgcgtgatgcgaatggtgt

SEQ ID NO: 406164 - DNA, 562 bp, Cannabis indica
ttttattatagggtttatacattgcatacataaatttactactttttttctttcactggatgaatttttttaaaaaatattgtatattgtgttaagtgaaagttttcactattattctagagttttttttaattgttttactcttatttttaattattctgttttgttgttttacggttgttttataaaaaagacagtatttttgaaaaaaattccgtgtgaaagtatttttgtaaaagttaatccaaatttcaatatttttgtgaaaaaatcttattcttattgataggtggcccaaacccatcaagcatttacagaatgaatagaacattgttttttttttttttttttgtttggtaggtagtgttacagttactagtgtaggtatgggtgtaagggcgtgtgttgtgaagggcgagtgttcataaagggcccgataacaatgccaaaatcttggaggattttctatttatgcctagtttgtttttctatccgcaagttgtacatagtttattactgagggaaggttttccagcccaatcctaaagagttttgggctaag

SEQ ID NO: 406165 - DNA, 279 bp, Cannabis indica
ggtatttttgtctgtgaagattattttgcttgtttgtccttgtgtttttttacttgatcttattgttatggagaaagagtaaaatgatgttcggatggaagacgctcccatgggcaggttggtatatgacgatgaagatcctgaactgtccgagtttgatgatagatggcgtttggttggacgttttctcacgaaacgtaacatagatcttcaggcgatgcaaaacaaaatggcttcccttcggcaaccaggatgaggtgtttatgttaaagagcttag

SEQ ID NO: 406166 - DNA, 1277 bp, Cannabis indica
tccacagcggagggagccacctctgctggacttactcgatcctcagcctgggctctataggctgatttgcaggaaaaccgaccattattttccaaagtccaaacccaactgtctttgccagagccggtaggagtacctcctttaagaatagcagagacagtatcgcgatcaaagaaacacattaagctttcggatgttccatccgccactagtcagaaataactcggccacctttgattccctattcggagcctgcccaatcggcttgggagtgaaaccttttaggtgagtaatccaagggtcagaccagatgttcgtctcctttccatcagccacacgcttacaagcaccctttcgaataatagtcctggattttgtcacatttttccaaaaccaggagtctgaggccttcggttcacaatcaagaaatgacttacccttcaggtatttggcttcgagaatacgacagcataaagattgatggcctgttaggaggttccacccccatttagcaaggaaagcctgattcatttccttggatttacggaatcctaagcctcctagcgacttggggaggcatagtttatcccaagcttttaggtacaagccgtggtttcctttctccgagccccaccagaaatcacgcaccaaaccatcaatcttagacgccatgcgattggataactttgtagtctgcatagcgtacagaggtaaagatagacccactgactttataagcatagctcgccccgctttcgagagtgtcttggccttccaaccatgaagcctctcagtcaggttttccaggataaagttgaaatcagcatctttttgtcttgatctgaataaagggagccctagatacttaacttttccttctgatgatcctattcccagcatttccttgatcctctgtttcatagtattgggggtgttcttactgaagaaaatagaggtcttcgttttattaatcttttggcctgaccagttgcaaaatttttctaggcagtcccagtaacctttggcctcctctaaattggcctttcccacaagaatcaggtcatccgcgaaaaaaatatgagaaagcgtcgggcctcccctacttaaccggatcccactaatggttctcgagctctgggcgtcctccagaagtctagaaagcatttccgcgccccagatgaataagtaaggagacaaggggtcaccttgccggagcccgcacgagggaaagatcttgccgacggatcctccattcagacaaacattaagggaggtgg

SEQ ID NO: 406167 - DNA, 896 bp, Cannabis indica
caggctctttgtatgggtcttctaggtcagttagagctggaggattgtttgtctaaacggagggcactgaaatgttttggtcagctggggaggtggaagcggtcgcctcgggcttcccataggccacttgagaagtgcaatacttgagaaacatgtctttggtattgcctaagtaataaaaattctcttggggattagccttctagaggtcatagaaaatctcgagaccagctgtctgtaaggcattcaccttccctccgagcctctccacttcagatctctactacccggcctctaacttatacttctcaaccttagctctaagttcctcctcctgggtcttcttctcttcttccaaccttcggaaaacagcccgaagaacctccctttcctcttgaaggctggtcacttctttggacaaggaggcaatggcagtttcaagctaatcggaggcttgtagatctttggtcagttcggctaccttcttcacagtagcaagaagtttcttattgacctcccccagctctatccggacagccccaagctaaaccctggcgtccttggcgtccttcctgaccaagtccactttcgcccgaatagtgttggaaatggcgacattcttagaggcagctgatttagcccgagaataggcgtaagctatctttagactagtctgtacagagaaagaatgttaaaatttgaactaagtgaagaaggacaaaaggaaactgtcaggaaagacttacccttgcaaacttcttcagagctcctcccatcaccaactccagggaaaggtcattgtctgccccagccagctgcttgtttgcctcagggaccgaccgagtcacatagtgaatgagcatttctttgcctcttttggtcttcgggtgtattac

SEQ ID NO: 406168 - DNA, 573 bp, Cannabis indica
ctcagaagacgctgacgtaatccaagttgaccaaaatgccgagcaagtcagcccagccgtataggcccagcttgacgagctgaaaatatgtttcatggcatggccagacaacacaaaaagatcgaattagaccgtgctcgtggaactcctttctcaccagagattaatctcctgccactgcctcaaagatcctttttcccatctcaagtactttgagatgcaaatggatttgcaaggagtacgaggggacgtatgctgcaaaatcttccccgccactctgtcaaaagtcgcacagcaatggtattttaagttggctcctagaaagtttagttcattgaaaaccttttcttcagaattccatgcgcaattctcttcctcgcgtcagctcccattgaatttgggagatttggtcgaagtaaagcaacgaccaggcgagccacttcgggcatacatcagtagattcataacagaagcgaccaaagtctcacgagtaaccgaggatggaaagttatacgtgatactggggggcattgaagtccttggtgaactatggaaggatataaggaagagcgg

SEQ ID NO: 406169 - DNA, 530 bp, Cannabis indica
ttgctaatgatgaacatgaacttatatattcgaaaagctttacttatgatcagaaagtatgttatatgtatgggtgtcccggctgctggttttgaattaataaaatgatcgagcacaaagagaacctataaagcttatcatttataattcagctgaatgttaattattcattttagaaaatgtattatgtatggtacggaaaaatgagttttgataggtggagtggcggattcagaatttgaagtgaggagtataattttttttataagtaaagggtaaaagtaattttttttttaaaaaaaagactcttagtaggatttaaacctccattatgtatacaatatagtttaaccattgtaccatacataattttttttttaaatgatgtattttgtatggatgaacgtttattagcaatttaacgttgtagaatctcaaaaaataagtattaattgtaagtgttttattcttagtaacgtacgccccaatagtggctgttaggagtaagacttacaaggtatgaaataatg

SEQ ID NO: 406170 - DNA, 771 bp, Cannabis indica
ccgacagtagccggggctttaatgtaggccagctcctgttccctcctaaagatgtacttctagtaccggtcctccgctgaagtgattatgtccacccggagcaccctttccgcggcaggagttctaatattcgggcagatgaccttggaaaggttaaagtcatccaccgactgattctcggagatcagcttggccttctcacagttctctgttgtgaccaagtccccaacgttgagggccttcttgtcataggttgagaaggtcttggcccgttggaggaacagctgagtaggcgcagtccgcagggtagggagggatcctcacccactccgtaagaagctccgggcggtccatggcttggaagccggacgaaaagaagaagcggtggcggtattcctttacatgcttctgaaaactgtaagggaccgggccttcatttaaagggtgggcccggagcccataaaaaccatccttaaatttgtcccactttttggggacggaaacgagttcataaaaatataaaatctcagccgaactgggcgaaccccagctccgggcagcgtacaaaataaataagcctgaaagcaggcggtatgcttggggaattaattgatacggcgcgaggccaacaaaaattagaaaattaacaaagtaatcctgaagagggagcatagccccggacatgagatgggtctggctccaagctccaaacccctcgtagttatgattgggcgtctcctcatcccaaggaaggcggtggaaggtcccgga

SEQ ID NO: 406171 - DNA, 601 bp, Cannabis indica
agaccttcaccagaggtttctcccttcagttctgacttcctttttaattcctttgacatcaaggcactttgaacctcctccaatgtcaaagattctcttccatacatcatggtgtctaaaagtgttcgtaggactccattggaagagaattcagaacaataatggcctggtcctcatcctcaatctttatgtcaatgttctcaagatcgagaattatcttattgaaatcatccaaatgatcttcaatagattttccaggaagcatcttaaaagcatacagtttttgtttcaagaacaacctgtttgcgagtgatcttgtcatgtacaagctttctaacttcgtccataacccagcagctgaggattcctttgaaacctctctcaagactttgtccccaaggctgagaatgatagcactgtgtgctttgtcaagaatttctgccttttctttctctgttttatccttgatcttctcagctccaagtaatgcatcttgaataccctgctgtacgagtaaagctctcatcttcaccctccacaaaccaaaatcattcttccctgtaaacttttccaaatcgaacttcgcatttcccatgattcc

SEQ ID NO: 406172 - DNA, 613 bp, Cannabis indica
gtatatttttagttgtataataagttatttcttttttatgttatttaataagcaacatcattttttattaaaaaatagttaatgttatttatatacaaaataataataataataatcgaaaattatttttaattatattttagtttgactgtaatatttttcattattttagaaatatcttatattttagttaaaaaataataataaaaaaaatattttttaatatctgcttcacaatagtgaaaatataaacactttttctattttattatttttttatagaaagatattctttttaaatatatggattaggtaaaaaaaaaataataatagaaaaatataattttcaaatttttacatgaaaaatacaaattggctttttattacaaaattaccaccacatgctttgggcaacaattttgcctttattttttttatttattaaaataccacttacacatcttgcataccccatgcatgatttgatcgtgattgacacctatcatctttccttctcttttttttttcattttaattttcattttcgtttcaattttctttcagtttttttaattttattgttcaaagttttcatacctaaaacccatcccaa

SEQ ID NO: 406173 - DNA, 612 bp, Cannabis indica
ttatttttgttgtgagttttcttgtgacatgcttagagcatcttcaatataataagtatggtgaatatgtatatatttttgggaaattattccatataaactgttttttttaattttttttttaaatttactgtttgggtttctaaagtgattgtagcgctagttgcaataggagtttctatacgattttttgttgcaatttaagttgcagtgctaattgcaataagagtttctatatagaattccgtaaaaacaccaaataaactattttgaaatgtaaacatgaaaaagctcctatatttttttagctcatatttataaaatttaattttaacggtggtgtatgatttggactaaccaaatttagcacagaatgtaacatggaacaaattttacactataatataataagtatcacttttttatttactctttgtcattcattaatataattaatagttttttaatacttttattgacatatttaatatatttttaatcaaggtttaattttttaattgattgatttatttacaaatttctattaaaataaaatttattttacttttagtggattggagcataattgtaaaatttaggccaaatataata

SEQ ID NO: 406174 - DNA, 987 bp, Cannabis indica
acaaaacacacaactctaatcatgataaaaaaaaagccacacattattaaaaatcttatttagtttgaaaaaatacatgaagagaaaagaccgtagaaaaatctcagctagccggtgacgtaacaagtaaaaaatacatacaaagttatgtataattgaaaaaaaaaaagttaagattcaaactaaagtgaataaggatatgtacatatttaatattgtgtcatggatatgtacatattctaaaaattgtgtcaaatttgccacaaatataaaatggaccaaaatttagacacaataaatattacatttttatttactcttttgccactaattactttaattaatcattttttagattttatttgtatatttaatagaatatttatatacttttaatcaaaatttaatggttttattgacatttttttaccatatttctataaaaaaaaggaataatttcaacctaaatacattggagcattattataaaatttgagtcaaaattaatattggctcatcttttttagcttaaattatacattatctattggagatgataaagaaaattctaagggaggtggtaaacaccataaattacggcatatcgttattggtgtatttcaaatcgagtctcaaatttttttatttataatatgggaactgctaactaataattattgtcatatatttgtatagtattaggcatcttaaagtggcaaataataatattctattagcaataataaaaataattgaccaagaaaaaaaatattgtacaaaaattaaacataaataccaaaatagttgttagtaaaaaaattataaaaacaaaaattaacaaccattcgtaacaaaaaaaaattaacatcaagttttttaattatgtgcattggagcataatactaaaaattaatataaatatatatcacaaagttttctttcaccaaatataatacaatttttatatcacattggagatgttcttac

SEQ ID NO: 406175 - DNA, 706 bp, Cannabis indica
tattaaatatgaacacaataacacattaaaaaaaaacctttctgaagcatgacgcatattttatatcatgctatattatagcttaaatttaaattaccttttgttatgctacatacatatttacatcacaatttagcataccattaaagtaaatttttaagaagtgaactatattttatactcatatcacttattgcatctcatactccaagtattaaatcgctttcttagtgcatctgtactcaactagaagtcaaggacacttcattgagcttctttaaatcgattaactttacaagctaaactgaacttatttatcaggtaattaaatcttttgagacgtgtaatttccaatatgtgagagatagatcatttcagttttcatctctttcatttctcaaatgttttgacaaacatgatttgcacttctctccaacccaacaaccccaaacctttcaagtttcaacatctcagacgatgatgttttccttcaccttttaaaatctccatgtatcaaaaaatctcttgttgggcagccctgctttcaccctaggagaaaaacccatttaaattcccgacaactaaaatggaagtgagctcagcgtgtgaatctttccaaatatgaaacaatattgtatacattgattgaacgagaccacaaccaaactggtgaccataatcattgatcatatttattagtcattcc

SEQ ID NO: 406176 - DNA, 949 bp, Cannabis indica
catgaatagtgtatttaaaaaaaaaatgaataaagattttaaaatatttgttgtagcatgtttttagtacgatttttttaaaatttttttaaagtttctcaaagaaagctgttgtgagtactctaatattcatatatattatatatactagatagatgttacgtgtcaagtcacgtatgctaattttattttaatttttagttttttttttaatatcataattttaaaattaataatattcaatgtagtgataatcattgaaatttgaaagcatagtagtgatttaaataaaaacaaaattactattatactttgtaatagtaattaaaaaaaaaaattattattcgtcaaaattttatcttcgcaaatttaataaaaaatgctcatctagttaaattatgaaaacattcaattcaatttaaaataatatttaaaatttaactaattctaaatatcgaaatttgaataacaaatttattattaattgcaacactttaagtggattaaatatatatatatatattttttaaaagaattatatatatatttaggtttaactaactacatggatgctgaccatttacgtgacaacatctgataatttgttatttttttattttaaaaaaaagtcacctaatatttttcataaaccaaaaattctgttatatagccacattttatatagaatagatatatagggttgttatatttaaaatatatttgtagaatttatttaaaagaaatgtaattatgtaggggtgttcatcaaatctaattcgcacaattttgctcatagtgcatccgatccgcactaagtgcggattttattttttggatccaatccaatccacacaatagctcaaatccaatccaatccagtccacacaatagctcaaatccaatccaatccaatctgtaaaagtgcggatttgatcggttattttggatt

SEQ ID NO: 406177 - DNA, 756 bp, Cannabis indica
gtataaatagttaattagtaagataggtatatttttttttctttaaaaaaattgttaaaagtagtttatttagtaaaaatagcaaattttattttgtatttttttttttaaaaaaaatggtacacgtgatatataaattttgagtcatatctttcctattattaattagtaataataaataaatgtgtttgagaagtgcgtttagatagggggttaactaatcttacttggttgaatatgttcacttctgccaagctccataatcttgaaatttcaacttcagaccatgctccgattcttatggtcatggttcatactgttggccacaattttgtgaagcggttttggtttgaaaatgcgtggttgagggaatctctttattatcagattgttaaagatagttgggagatttgtggggctgatgacgtgatgtataaagttcagttttttggagaaaagttggccgattggggtaaggaggttactgggaactttatagaaagattaaaaaagtgtaaaaaaattgagtcgaggtgaagtctctgttgccaattacaaacaagcaaagagaaatttagccgaaggttatgtccaaaggaaagttttatggcatcaaagatcgaagcaattatggttgcaagaaggagacaataatagcaaacattttcatgcttctgcaactacaagacgaaaaaataattttgtggcaaaacttaaagaccattctggtacgtgggttgactgggatagtggttt

SEQ ID NO: 406178 - DNA, 533 bp, Cannabis indica
aataattttgaggaagcaattcaaaatactattagtcgatgcagcagaaaactcacctcctcttctaataataaacagaaaaggttttctaatcctaaggaaaataggtattttttttccttcagtgattttcatcatattttatcattttttagctataaaagaagtggacttcaataattttgaggaagcaattcagaatgaaataaacagagaatacatatacgaattttaaagatcaacaacaatactggaggcattcttcagagggtcttcaacattcttttcttctctattttcttctttttttcttaaattaatatgtgtgattttactgataaacatgagtagctaaatacttaattagagtctagatggagattatttgataatattttatggtattaatatgatttattttctcccagtttctatgtattctatttcattcatgcttacttacttttaattattgcctgatcactaattaactgtctatgattttaatgtgggatctgagaagtgagtgtcaa

SEQ ID NO: 406179 - DNA, 592 bp, Cannabis indica
catgttcttgctaggtgtgtcccatcttagctgtggtattgtttccttttgggaggtggatctccttgtgatcaccaggattttaaatcttctttaatgaatttgaggttttccagaaaaaaaaaaacaaataatagacacattattgatggttaagttaagatatgtctattttgtgacaattttttgaaaatgggtgatggatttcaaacggactaaatatgcaatatcattattaggctaactctataaccaatacatgtataatatatttaagttatcaatatcaagaatctaaataatccattaattttatataagctagtccttaataaaaaaaaatggctaattaggatttttttccccgaactttgatatttactaaatcatgctctttgagcttttaaggttgttaaaaatgcctcatgaactattgactatttagattgttggatttaaggacttttatctaatttcattcaaatttattagttactattttgtaccctttatgagcagggccggccctaaggtatatggggcctaaggcgaattaaattttgggtactcctatatatatagtttaactatt

SEQ ID NO: 406180 - DNA, 664 bp, Cannabis indica
agctggtcaaataaataaatatagtccaaataacaaaatttacacaaataccacttacacacaacttcaacccaagttccatgcttcctggacaatcacgcagcaacccaacgcaatcaaaataaaaattcaaccagaaagagaactaccattaatttcggcaacttcacctgtaaagacgactagaatcaatcaaaacaggggctgtttcgaattcatgaaaaaaaaattgtagaaaaatcactacaaactaaaattcaatcgaaaacccagtttaatttgtataaaactaatgtcctaactttaatttttcagatccattaaatgcatatctcaaaaagttgatctggagttcccaaacaatctaactcatgtataatccaaaagaaattacatcaatactatagtaaaatgtttatcctaatgtattttcgttgtttttcaaatttctaatggtaaatttgttcatattaaatcatgaaaagacatgtagatagagttacgtacgtagaaacactgttctggtttttaatgtttcataatagctgcacgaacattttgctaacaattattttgtctgattgaaactttcgtcagatgcaatcttcgaccaaccaccgagcaacctttgtctgatgcaacctttgaccaaccaccctgcaac

SEQ ID NO: 406181 - DNA, 463 bp, Cannabis indica
aactgcaaaaccacgtaaaatatactttgtgttcattcttttttcttgctatctttatttttctgtgcaagtttatcattcaggctcaaattttggttaacgaaaatctgcgttaacagcttggtgctttcattgagagccttcatgaaaagctcagaaaaaatccgccttccataaaaaataatattcctcttatggctcacaacgaagaaattaatctgtatgaagaaaccagtcatcatcctggaaaaaagccaatgacaccccaaggatcattcggcttatcatttgaatagactgccggcttcgagaaaacccagaatctgggaaccaaacttgtgttgggttttatgccctaaataaaactctttacaatctgattagttatcaatataagaaattagaagtgattgatgtttgcatgaattttacatgctaattgtttaatatgttaaatatgttt

SEQ ID NO: 406182 - DNA, 747 bp, Cannabis indica
ggcaaatggtacaaaacctaggaagttctctaaaggagggcaacacgtaaacatagagaagaattctgccatttttttctatagaaaaaaaagatagagtgaaagaagaggaagaagaaggggaaaagaggagaagaacaacaagattcaacatctacccttttggaaaacttctcatttattgttgtttgtcatttctttcttttctcttttattttctttaactctagcattcaaactccatggctgaattttatcttgtaatggtggttcttaagttagctatgagctaaactttttatggtttgaattgttgaagaaccctatgttttagtttagtaattttcttatgcaaatatttagtaagaattctcatgttcattcaagtgtgctttatgttagtttcttgatattgtttggccaccaatagcttgatattgagttatatttaattctggaaaggttaaatgtaatggacttagcttgaatgacacaagttcttaatctttttaggttagatttgaaataacataggaatatgttatatccttgtgtaacaattgagaactatgcttgaaatggtattcttgagcttgcttggcataggaatatgtttgaacaggtccaaggattgattgcataaaatttggaagagttttgtgcactttaatggagttcttgttaacctgagatttttgctaaagatttgctaactttttgctgcagcaaaacgcacagtttttgcta

SEQ ID NO: 406183 - DNA, 765 bp, Cannabis indica
cttttcatttgagaaagtaatttagagcaatagatgagtggtgatgaactaatgatttggctatgtgatttttgtgattttgaactattctggaggtgttttacaggtatggttggttctggttcgagctgggaagaaaacccagaatttttctagtctggcagatccattctaccggttggttctggtgcaccagaatcgttcgatcggttgccctataggggaaaaatctcgggttttcttcgagttccgttttggctcggggtggaatttggtacctgttttatgtcatttgggtattatataacctattttggagtttttaggggttaggttcttattcggttttgaattagggttttattttggaattttgatttaaagcatttattgagttttggttgtcgtgacaaggaccgggatcgcctagcttgttttccactcaggtcggcccgcatgcttgagttttgaattgaggtaagaaaagtggtaagcaccgtatgtggctaaattttaatggttaaatggttatggccttgattattatcaagactctgattaagtgttgttgagcctcgattatgacttagggttggaaacggttattaccgttaagggtaattactcttgaaactgcggataggtttattacttcttgtttgcttcatcaagcaacgatagtgacatattcagctcgtgtttaacgagtggtaaaaaggggtactttataaagtaccagaattgtgtttatgatattgtgtaaaa

SEQ ID NO: 406184 - DNA, 939 bp, Cannabis indica
gatgagagattcaacatttagtgaagttgaactttgtagttttttttcgtttttttttttttttgcttattcaaattgagattatcctgtgctttgagctccatctatgagagattattttaacataaagcatagtattaaacacaacatgtaaatctgtacaaacatgccacaacatgcatatagatcatgaagcaaatccaataaatccaatacaagtgaaggcttaagaaattccatgaaatgttgggtggcaaaataagaaggtaatcaaatatcccaatagcgccttccgcaactaatgacaagaattttctttactatgtctcatctttaccagagtaatagtgccggaaaacgcacgagaaatctttggtttcatgaccatcctggcatagatctgtatagctgcggaaaatagtcagttcatcaggtacaagaaactaaacatattctttcgagttggtaattataataataagagattacaccttaagagaagtaaaagccattttatgccctctaatgggatttgatgatatttccttggtttctaacaggcagtgtgacatattgtgacaaagataagaaatttgacagatactaaaattatatctaactccctaagctttcatgaataatagataagaaacaatgttatcattgttaaattagcaataacttatgacacaagtaagttgttgaagaattttaaaaccaacttgtaatgtgtaaattttgttcactacttcataagagatggaagtttgttctatgaatcaacatgtttagtttcgaattatgttcgctattatcgagctcagcaaatctaacactataaacgctatctgtacttaatagatattgttagatattagatgtatattagctgtaaaagaattaaatatttagtaaatatttagtctcctagctttgtat

SEQ ID NO: 406185 - DNA, 1155 bp, Cannabis indica
aatgcgatccatgaggaaaggttccaggtgtagaaattatactggctatctcgaaaaaaccctaatgtggtatgctcagccctaagcactgtgggtgaccatccacattgattacctttggatactccttcttcggcttcccgagggactgcgttctggaggtagtgcgcccgagccacataatcctaagtttcctcatcaacttgactggaacctgctgccacgacgcatacttgggatatttataatcaccagtatactcgttctcagcgaggaggcccacagacctcaggttgacctcgttcaagaggaactcggctgatcggagaccgtatggaagacccagcaggagcctgcatcgctcgaccatctcagggctaggatttggtcttttcgagactgctatcaaagtaatgaaaatcaagtcagcgaggctaacattaaaaacatggaataatctaaaaaccaagtttaagacaaatagtcatttacatattatgcgaaaggaggttgtattgattggggagaggccaattgtccaaaagaagtcctctttgaaatggattttgttttgcaacccaacaatgatcttaggatcgcttgtgtgagtcccaaggtaataaaaacctcctgcagcattcttcttcgcagggactaccttgactgagtagagatacactattttcaggggagtggggcactcccatcctaagattttgtacagaacttttacttgcaaggattctataggaaataagaaccaactggaatggggcaattccaagatggttaaggaagttcttaaagtaatctcgtagggggagaatcactccagccctaatgtgttcgaggctccaagcgcctattctagtagagccactcgtactcgccttgcaactagttccctcgggtgcttcgcgagtaagtcgttctggtgggtaacaactaaacttgccaggagctacggatctgacctgccattttcacttttgatcaatgtcatgagtccttaggatgctacctacgtaatccccgatggctcgaaccctcgactcgataagttcagcctcgaaagtaatgttggggtcttggggagtctttaatttttgaggcttggaagtcatgatttcaaaatctaggtcacctagtgaaaaa

SEQ ID NO: 406186 - DNA, 760 bp, Cannabis indica
gttcagcataccattccaccctcagatagatggctagtctgagaggacaatccagatattggaggacattttatgagcacgtgtggtggattttgaaggctcttagagcaagtatctgccattgatagacttttcataaacaaaaaaaaattactagagtacaataggatggctctctattagatgttgtatggtaggaagtgtcgatctccaattcacgtgggatgagagggagaaagaaaatacttaggtccagactcagttcaacaaaccagtgaggctatagagaagatcaaggcaagaatgcttacttcttagagcaggcaaaaaagttatgtagatacgaattgcaaaaagatagaatttcaagtagggatcatgccttcctatgagtatccccaatgaaaggggtgaagtgtttcaggaagaagggaaagttgtgccgtagaattacaaaaccttttaaaattcacaaaaaagttggattagtggcttatcgtctagccttgacaccagcattgtcagcagtgcacaacgtattccatgtttcaatgttaagaaaatatattttagagccgactcatatcttgagttatgaagccctagaacatcagccagacttatcttatgggatgcaacccgtgcaaatccacgataagaaagatgaaattcatcggaaaaagacaatagcattggtcaaagtactctggagaaatagtaaggtggaggaagccacatgggagttagagtctgatatgag

SEQ ID NO: 406187 - DNA, 673 bp, Cannabis indica
tctctctctctctctctctctctctctctctctctctctctctctctctctctctagatttctttctttctctctctaaaatttcggtcgcgggtttagggagggaaaggggttagggttggatagtatagtagtgagagaagtaaagctctccttttggcgggaacaaacttggcgggaaatgatgtggcctctggcacgtgcttttccgcttatctttttatttatttcctcagaatgactactcgataattttggattaatttaactaactatatcaaaataataataatattaaggaaatttcattatttgccattaataatactactcatatcaaaatttatactctccattaatttgtacaaatttagtccattgattacatgaacttcctattttaccctttttttaaaaaaaaataaataaaattgttaaaaactgaaattggatctttctctctcccttccctctctctcgttctcgtgcaccactctctctctctagaaaaaattgaaaaaacttctcaaaaatttccctctttctcgtcccactctctcttccctcttgaatgcttgtttctcggtgggtgttggtggaaaaccgaagcacaccccaatatcactgaagaatcttacaccattacaatgggtaagttgtgttttaagcattt

SEQ ID NO: 406188 - DNA, 1133 bp, Cannabis indica
actcaatttttatcctattgacgcgattcaacttaagttttcaagctatttaagcgctcgatcaagtcatgtctcacaccctagtcaaaattctgaatctatcattatccaaattcacccccaagggagttacgaaaataagcttcgcgtaactcgcagcggtacccgccaggcaccaaaaattagccattaccaccagaagctaatttttaccattagatcatcatgaacggtgaaaaacactatatttgtatttttttccctatttttgtgggcctccttcatctataaaaggagagctcccttagctcatttttcacatttagaaaactaccataaggtcagagcttctctctctcgactttctctctctagaatttgaagcttctgatatttaaaaactttctgtaattatcatctcatgagaaatataaactcgaagtagacatagccccattactatcgtgatataggggtgaactactataaattattgtgtctctcattaattattttacaaactcttcattcttgcagaagtctagtccagatttttgagtcaaaattttggtactttcattgagagccacaacttaagaaagtcaccaatcaagatggttgcgacacattctacaagtgccgacagatagactccagcagttggctaaacgactggggcacaccagttgacgaagttagaactgggactacttctgagcctcaggtgccaagagcaggcctcaaaactagctcatcaactcgtcctccaaggccaccactagcagctcttgagactggcatcaaggagtagatcccacctgaggagccacatgtggagatagaagacgttgaggagactgaacctcaggtagtttagctcagccaaattgtggctgacttgcaacaacagttgggagactctctcgataagcaacatgaacggttttaacactagttcgtggaaaattggaagaacattgaaagccaccgtgttgagcaggaataatggagagctaacctgtctcaacggattagagaagcttatcgctctaatcgtagaactactttccataggggtatttctgagttggtgagagacacactgttgggaatattttaccatgatctagatt

SEQ ID NO: 406189 - DNA, 869 bp, Cannabis indica
atagcaatagaatcatactcatatagacatgttattttcattttgtaatttagatcttcttagtcattatttagttcacttaaaccttttccgattatgctaactgaagttttgtttcttttaggtacttcattacaaagatctgtattacatgtattgtttatttttgactatgaggaggtggatttctttattgggaaacatatagcgtgacaaattattgttcatatatttaataattctttttgattaatgagattcatatatataaatgtgtatattgaattctttattcaaataattatttttgatttttacgtgattatttattgttctttattcaaataatctcacctaataactaataatgttttttctttaattttttattgtatcactttcaaataacatagaaaaaaactagcataaaatttagtatacgtgcctcgcacgtagtttttgctagtatatatatatatatatatatttttgtgtgaatagagttaaataatttattttaaaaattttatacttttatacataatttctataacggtgaatattttaaatgttaatttttctaccctagtttttttatttttaatattggtgaatatatctattcaaatttcaaaataatatctcataaatgtgtgtttagatagtactaccatcttacattttaaaaaatatataagaaatatataaaaaggttttaaggagttggtatgactatgacatgcttaaccttcttattttttttaatacatatttttctatttttttaatttctttttaaaaaatttagtatttgtaatcaataactaacactaaattaatacctattaattaaaagaaatcaaaacaaa

SEQ ID NO: 406190 - DNA, 623 bp, Cannabis indica
ctggcttgtaatgtattatttatgctctttgagttgttgttaaagctgaccatggattggcccaatacttacatcttaggaacatggtagtataattgagtgtgagcgctattatagatatggaatctatagcttctctaaacttctagaaaagaaacgataattttcttcaagcttggcttaacgcaagggcttaattgtgtagaaaataggttttagggtttatttgttaattaagagactttgtaaggtcaaattaataaatagatagaattgacatgtatagagttagaattaaaatatgacatttatgaaagaaagatgagttaaataaatggcaaaatttaaactagtgatgcccataatatggtcggcgacttaactccaataaagccattattttatcgtttttaattccatttaaattctaacctaaccctagaacaaatcttataaatagaataagatgactctagttttttcaattgacttcagactcttttgtcaggcaaattagaaaacaaaagagaacctctcttcttcttttattttcaaaattcattccttcttcttcttcattcaattcgaactatagtgaagagtacatgcccactcatatcaag

SEQ ID NO: 406191 - DNA, 1393 bp, Cannabis indica
tgcgtcacatgacatgtaataaaaattctagagagtatcagttatttttattgccgcctcaatccaaaaatattttttctacatccaaatcaaatggtgttaataatagtaagatattgttattcttctggttgggcctgctctcatcaatgtcactccaccatcaaacgtcgatttgaggtttgatatcgatcaaaaggcagagaaggcgaagtgggcagtgcaaattttgatggtataagcgaatatttaatatcagttcaaatattaataggatttgttttattattattttattatatataaataatattttattattttattaaataaaaataaaaagtcacccatgaatttctcataaaccaagaatttcagttatataggcacactaaatagatatatccgagtctgagctgccgagttcatttgcccttttaaaaaaatatattatttctatttaattttagatgagtgtaatatattagtgtatgtatgattgtatgtaattttgtgtaaattgtgagaaaaacatttgaaatattgttgcaaagttcaaattaaagttttcacctacatttttgttcgttttcctttaggtatattaaaagtttacatttatttgaagaaatgttttcaccagattgtccattgattaatttttgtttattcaattgtatacaaatagttatcattaaaattaaaattgtaacattcaattggttaggattacgtattattggtgtcctcgctacctagtgaaacaaaaactcataaataaataaagaaaagtaaataaaaatatcagttatataggatggtataagcgaatatttaatatcagttcaaatattaataggatttgttttattattattttattatatataaataatattttattattttactaaataaaaataaaaagtcaccatgaatttctcataaatcaagaatttcagttatataggcacactttatatagaatagatatagatatttatatagaatacttttttaataggtattactcattaatgggtactaaataaatttaactatatatattaattttaaaaatattaaactattagattttggtccgatagtgaataataaaagaaaaattttaattgttatatttaatttagttacttaattaaagaaaatatcaaaaataaatctttttatactatatcaaaaatatatttataaaaaaatatttaagtcaaatattattagaaaaatttgagtaacagtcaatatatatatatatggaacacttcttaatgtatatatttctaaagaatacatttgaattgtaaaaaagaggttttacaaaaaaaaattgtatttgggataaaaatttgcatttatactgcccataacaaaa

SEQ ID NO: 406192 - DNA, 542 bp, Cannabis indica
tcgtgagttagaccttttcattttcattttatcgttaccgtttattcactgagcttcttacattttcttttttttcaggtgttaactctttagtttggttttttttttttttttttgaaaagaatagcctcgctcaaataaattatttaggatttttttcagttttaattaaaaaaaataacaatattacaaaaaaaaatatttttaacttaccaaataaataaatatacagtcccaaaaaaaaaattacacaaatactacttacatactccttctactcaggatccaaaccacgcagtaacccaacgcaaccgaaacaaaaattcaaccagagagagaaccaccattaattctagggatttcacttgagaagacaaccagaatcaatcaaaacatgagctgttttgaattcatgaaaaaaaaaatatagaaaaattactacgaaactaaaatttaactagaaatccaatataatttgcataaaactaatgtcctgacttcaatttttagatccatcaaaaagttgaactgaagttcccaaa

SEQ ID NO: 406193 - DNA, 462 bp, Cannabis indica
gtcgtttgattgagagaaatgaaaacatatgaatagtactaggaatgaaaataaaaatatgaatggaatcaaacttaaaatacattaaaaaaaattgataaaaaattattaaaaattttatcattttaaaatggaattgtcattctatccatttcaaaataaaatggtcactccaccaaaataataaataagtctttccattagaatgacatttcaatattttaaaaatacaaccaaaaaataaaataaaaaattaagtttctttctgaccctccatttaagtgataagaataaacaaaattcaagattaagtacatgtaaaataaattactagtgaagaagtattactgtcaacttcctattacaatcttttaatcaattttcgtgcttgaaaatatactagaattttttttcatggcaatattcgttaaaatgatatacaacatcctctgtaaatttttt

SEQ ID NO: 406194 - DNA, 587 bp, Cannabis indica
tataaaattaccaaactatctaaatagataattattaaaagacttggtgccaacccacccagttaacaaaatcgactatactagataaattttattttttcaacaattgatgtgtacttttggcttaggtgtcaaaacttttgtcagtaaaaattaacatgtttcaaaatattatttaattttagttaattaatattatatatgagctattttagtgaatggacacgtaaattactatttgtgtgactaaatcgttaccttggatgaatatatataaaagaaagactaattagggttttttttcctaaattttgacatgtatcaaatcatgcctcctaaacttttttaagttgttaaaaattcccctgaactattgagattgttagatttaatgaattttgtctaatttcattcaattttactgttttaattgattggttatgtactacaccatgcttaatatttactaaatcatgcctcttgaactttcatctatgttaaattttttttacttaaaattaggtacaaaagtaccttaaatctaacaatcttaatagtctatgtaggaatttttaacgtacctaatt

SEQ ID NO: 406195 - DNA, 537 bp, Cannabis indica
tctctctctctctctctctctctacttctatgcttcctagcttcttcttgtttttttttaaatcttctgttcaaacatgcattaatttaatatcattcttttcaatacttcccgaatataagactagtatttagctttcccctctccacccagttactagatgacacgtggactaggagttggtaaagttacacttttctagttggtgagtcagtggtctaactcttcatccatccatcatagtctcaaaatgtgttacactataattataattatagagtattgttactaggtatttatgctgcttaagagcaattctaatacaggtattttaaaaataagttaacaatttatacattatcgtaaaatgttatatatatatatattttttttttttttcattcacattatttttgacaactttaatcttaaaattactcaattgttaaacaattttagaggtcaagagaatggacccacactctattatttaatatattattcaattacttttaatattttaaatattatattaat

SEQ ID NO: 406196 - DNA, 517 bp, Cannabis indica
aaaactaaaagtgttaaagtaagagtgttactatatatactagtggaaaaatctatgcttctctaatttttattaaccattacataaatacatcatatgtcattttttacaaataaactcctaattaattggttatgaataccttaattttttatttcacatctatatttttaatatttgttcatgctcactgctattctttgagacggaaaataattaaaaaaagaaaatcgatacgacgatacataacatatatatccggcatccaagtaattttttcttccaataatactgcattgagcattctagaatttttgttttaatgctgtgacaatttttttttaccatcaatgctttaattttagtttgactataaaggggacatgtactaacaaatgaatatataatctacctatataactaaaaattataaaagacaatatgtacatgcattttggactaaaacaaatcaaacaaaagaaagaaaaacatgattaaaaaaaactaaaaaaatatt

SEQ ID NO: 406197 - DNA, 1306 bp, Cannabis indica
aattttgaatttcatgggtgtcagcagaaatgactgagtgacttgtgccactttctagttccagaaagacgcactcgtgtggtgggagatggtatccctaaccccggtacgtcactactatgatttgggaagaattttgggatttatttagtgccaaatattacaatgaggttgtttgcagtgttaagagaaaatagttcattgatctggttaagggagaggccatgttagtgatagaatacactacaaagtttgaccgacttgctaagcttgctttgggtattgtgcccatggacttcagtaagaaggaaattagacatgatctggttattacaaaaaatgacataaccacctacgctgagatggttcaaaaggctctacgagctgagggactccaagtgctggtgagaccaccatgttgggattttatgccctaaataaaatccattttaatacaatcaaatttactaattaataaaggatcaaaaatcattttatgttgcatggttcacatgatttctttcatggttataagtttaatgtataaattttattaaatctagaacatatagatattcatgattttagtattgtcaacaatggaacgtaatcatgattatatatttcaaagttaatgtcccataatttgttagcacattggatttagactaacatgataatcagcgataaagccaacttacaccttggataagtgttatgtcatttcgaggacattgacaaagtatgctaggatcggatgtatggagtatacatcgaactggaccgatattaaacttggataagatatcataaatttaccgttatatctatctaaattaatattagttaaatgatcttaggttaatagatcttaatcctgatatggttaggttcgatcttaatggtattatttatgttcttagaattgttcgttaaagctgaccaatggatcgaccccatacttacatcttgggaacatggtaatttaattgagtgggagcgctaatcatggatatagaatctatagcttctataaattcatagaagtgaaatgatgattttcttcgaacttggcttaatagagataaaggattgaggcctcattttaataaggctaattaggatttttgccccctgaactttgacatgtaccaaatcacgccccttgaacttttaaggtcgttaaaaatgctccttgaactattgggattgttagatttaaggacttttgtctaatttcattcaattttactatttcagtaattgtttatgtactaaaccatactccccagactttgatatctac

SEQ ID NO: 406198 - DNA, 525 bp, Cannabis indica
aaacccaagttccatttgcaaataaagcatttatctcttttatcattgcagcaaaccaacctggatgagacattgcttcacgtacagttttaggaatagtgacagaatcaagagaagcaataaaagagcaagaagaagaggagagatgaatataagaaacaaaagaagaaataggaaaagtacattggcgattacctttacgtagtgcaatgggaaaatcatctttgagttctggatctgatgacaaagatgcaggtgcaagacatgaaacatgaggtggaggagggggacgcttgctgtacactataggaggccgagggagtggtggaggtggtggcaatgtgggagttatgactgagataggtgaaggaacaagagacttgtcataacatgtattaggcgcaaaggatgtgaaataatataccaacaaatcatcatcctccccctaccatgtaggagtagttgaagattaaaaataaggtgtattttccacaaaggtaacatcaatagaaataagatatttgt

SEQ ID NO: 406199 - DNA, 513 bp, Cannabis indica
gaggcccagcgcgcgcgtgtgctgatcctgcttcccgcacacgtaaccctgctgcgtcgcacgtctgaggctaaaagtgaccgagaaatctcggccatcccccctgcaatgcccctcctgcgcgcgtaaggcctctattgcagcctgctttgggttgcacgtgcagccttgctggcagcagtcccaaaacccgatttttgtgagatttttccccaaaaatctgattttttgatgggatttttcccaaaatctgatttttccaattttaaaaacccaaaattaaaataaaatattctttttaaatatatttgaacttaaatatcatattttaaattaataatatttatttttcaataaattattattaatcatgatattttgaggattaaatttaaaaatagattattttattttttaaattattgtcagatttaaaaatttgttaatttctttagtatttatatattatttaattataagattagatattttgatatttaacatattttaaat

SEQ ID NO: 406200 - DNA, 670 bp, Cannabis indica
ttaatgaacaagatgatgagattggacggttgagacaacagggtgctcgtgcagtgcctattccagaatcctagtggcacctgcccctactgtccaggccaaactattggtggcagtgaatcggatggaactcctgtatgaaaggttccacatgcgagcacctcaagttttttagggaggtcttgatgtcatgaaagccaaatgtggcgtgctgccccatggcacacccacaatggggccattttgtaacatgagcatgccttggtgcttgatcattagtcaagtcttgcaccaagcacctcattggggttgggagtcttttgttgtttagctttctttctttgtatttccactcacatatgtatggagagctaaaatcatctatgttcctggaaatcccttaaaaccccaataagctctttaaggggggtgaccaggtgacttatgaagcaccttgtcactagcatgataggggcccagctgtgtactcccttgccctatcaaggccatatattaataaaacgatgtttatccatgcttcttgtgtatgcttctatatggtctttgtgatgcctgtttgttgcctttgttgggccattgcgtgccatttgtctacatgtttgcttgtgggttgtgtgagattggtccttggggacgctttgtgtttgct

SEQ ID NO: 406201 - DNA, 1542 bp, Cannabis indica
agatcaatataaacaaatatcttttaccaatgtgtcgtttatcataaaacaattatttatatcacaaagatgatcattagtagatctatctaaatcctgagtattcttaaaattatgtttgtgtttattagattctttatttactcattaaagtttctcaagagatgattcttataatttctgttttggaaacttaataatatagatgactgagtacatgttatacaataagtggaatccagactttctaaaaagatcgaatattagttcccttaaagtgttaattcttagagtgaattcagttgggccaaaatctataattgaatttatagattaattgttcattatgaatcaacgatacttaaggattcaagagataaataggatggaaaaacattaattttagactaactctaattatgaaataataaattgtaaggatgaactagttatattgattatatcattggcctacaagaaataaactctataagtataattttatactatttaagagtgtcaatttctacattttatagtagagtaagtaatgaaattaataaacttcaatatttattgatgagattaatggtaatctcgagtttattagagcttaaaaatataggtccatggtccctaaattgttgggattcatgtcctttagtcttgagatttatcagtgcactgaatttatactgacatgataatcaatgatgtggtctacttacactatgacaaaaagtatatctttttcagtgtcttggtaaaataaacttgtatctaatgtataaatttacattagactggaccgatattgacagcacaaaagatattacagatttaccattatatatattctaagtcaatatcactttgttgatcatcatttaatttgatctgaatcctgacatgattaagctttaagctaattgtgctatttgagttctttaacttgtttattaccttactgttagttttatggtactaaattaggtacacaatagaagagttgtttttgattatcattgtacaatatgcctaagatcaccatatgtatatatatatatattaaacgaaaagtgaatagttgaaaataatatttacctcttgaagcctattagggtatccttgattcttttcatttgttgtatccttggaacggtgatgacaaaactcacatcttgatcttccagaccttccaccacatacaaggactagtatgggctaataggataatagtgtatatgaagttattgattaaatcttcacacatgatgtaatgccctaatgctaaggcacattacaatgctttttcaattatagtgcaatctttgctaatcaaagaattttcccaaaaaacgtgtcaaattaaaacttttgcattaatattaaactttgtaatataataaaatatttataagtgccgggaacccgtttttcaaacttttgaaaatttacattccaaaatatacatttagttcaggtcgcacagcgactatcaaaatataatccccagatgtcccgagaccgaacactccaggt

SEQ ID NO: 406202 - DNA, 695 bp, Cannabis indica
ctcatacgccccccatgagaattggatgtaattacactgtgtaattactaaaaactttccatataaatattagctactaaaaatattatttttccatgtaattactaactattttgccaaacaagatataaggaattcatatgtaattaccacctcatatctaaacacaccttgcattttaaaatatagtgtaattactaaactgtgtaattaccaccctagtaattactatacctagtaattacacagttacttccaaatacaccctaagtgaaacaacaacatattgtaatccttttaaaataaaaaaatatatattttgtaatattttatatctcacatttaattaataaataataatttatctttctacaaaattacttaaaattatattatttataaaaaaattatgtcagttggtgaaaataatttgcttattatatgttattaaatgaaaaataataataaaaaacacaatcttacttaaataagtatatatatatataataattacctttctctttatcgccttagattattaaaacaatatatttgtaaatttttaaaaatgttgaaatttttatacattcacttatatttttagggatatgattttgtcccgttattgtactttcacggattctaatccgtgatgtacggcagccgtcagatgagggagttatttgatctgacgg

SEQ ID NO: 406203 - DNA, 563 bp, Cannabis indica
cttatatacattctattttatttcacatattattatttgtcactgtaaatttatattttttcaacaataaaatgtttttttattaatgctcttatgtataaatatatatatatatataattatataatatttaagttctttaccatgtagatgtgtatgtacatgtcatcacgaataggtgatcaattagagttataaatttcatccctgcccaaataaaatggttaacaatacacaacaatgtatacatatatagattactagtaaaaagctacgtgcgaggcacgtacactaacttttatgatagttattttctattttatttaaaagtgatacacttaaaaattaaagaaaaattattattagttattaggtgagattattattattacgtatataaatctaaataatataatttataattttgacaattaaaagtaaatactggatgcaatatattagtgtttaagaaagcttgataatttaaatatgttcttaagataatccaaaaataaattaaaaattgatgttaaaatcttaaggaaacacaacttaaatgtgtg

SEQ ID NO: 406204 - DNA, 577 bp, Cannabis indica
caaatgcaagattcaccacagcaaggagctcctcctaatcatgatgcaaggtattagtatgaccttgcatgagtcccagagcagcatggaggttctggatcttggtgtcatctccagcggttgttcaaaaatttgttgctagcagaactccaatattgggaataccctgagtggctgctgaactggtatttcaagtctcctgcacactaggcgcaattccactcaaaggagttgttacaccctgacctacgattggctgttgttcaggatttgtggctcgtggaacccttgcgtttcctagattctgcagtgcgggatccactgctggtggatttgctggatcgattacacctctacgagtttgtaccaccatcgcgtagatggttaaattgttggaaatattttaccagtatcttagatttacttacaagtatgttgtttaacatcctaaatatgaacttctaaaacaatatgaaataaacacatataaagtataagaaaccttacagtggttgcagtggaatataatgtctccttccactcagatctttaacccttgtatcctttctgtcgctga

SEQ ID NO: 406205 - DNA, 575 bp, Cannabis indica
aattctttcagatctaatatatcatcagtttcacattcatttgctaaaaaagaactaaactaaactattcattaattaatcagggatactctttcccccaaagattttaatctcatgcgtgtgtattcatcgtatcttgccccacaaaagttactctcaaccaatcacaaactataaaattgtccatatcggtgtttccctttttcaagagtctattgtagaatttcccataattatatatcttcaattattaagttttttttacaaattatatataatttttctttgtttctagttttctttaaaattaacacacctatatatataaatataataaaatattttttataatacaatatgaactataattaatttaatattgtttatctattctatataaagtgtgcctatataacagaattcttggtttatgaaaaattcatgggtgactttttatttatattaaaaataaaatagtttattaataaaaataaaatagtttatgagaaattcatggatcactttttatttatatataataaaataaataaaataaatctcattaaatctaaaaa

SEQ ID NO: 406206 - DNA, 973 bp, Cannabis indica
tcttcttagtttcttaatttatgactcacataataggagatcacctattaaaataaagcactaagtatatctctcttcatcttctttttttcttatctattttatataattaggttaattaggatttttaccccttaaactttaacatgtatcaaattatgcctctgaacttttaaggtgttaaaaatgctcatgaactattgagattgttggatttaaggtttttttttcttctaattttagtaaaaaagcctgaaagtggtttagtataaaccatcactgaaatagtaaaattgaataaaatataatatatttttgtctatttattttaattaaatcattaatgaaaattacttgatttaagttgatataaaattaattattaaattaattttcaactttaatctaattttcaaaatttcgaaatatctaatttatataataaatgcatttcaaaaaaaatttatatataaaaatgattattaaaataaaataaaatatactttaaaaattattctaatttaagtttatctgaaattgaaatttttttaacttaaatataattttctatttaattaaatttattaaaggaattattacatagaaaatataaaataacattttatttacaaaaatacctccataaggttaagtcaacatttatacattttatgtaattttaattaccaaaataccacttacactatcaccacttacacaatcaaacgatggttgtagagtggttgttgcgtggttgtgcggtggttgcatcagacgatggttgcagggggttgctaggtggttggccgaaggttgcatcagacgaatgtttcaatcagacgaaagtttttgggtggttgttgggtggctggccgaaggttgtatcagatgaaggtttcaatcagacgaaataactgttagcaaaatgtttatgcaactgtaatgcaactgttgtgaaacattaaaaatcaga

SEQ ID NO: 406207 - DNA, 630 bp, Cannabis indica
accttatcccatagggatgtctccctgataatggaaccaagttaactttaatggcgagcagttgcttgtcatctgacttcccaagactaatattgttttaactctgataactatattttctggtgtcgagatgatcttcctcgcatgcatgccatcctctagcgaaataaactcctcgctatttgttatcttgtctcgccaaactatctacacttagtttgtatatcgtataatataccctaagtgtttttaacgtttatcgtttctcttccatacaatgaggttgaggcctcgtcatgcacacgtgtactcacatggtttctcgttaatacataagtttgcagtttgtatgtttttgtctcacagaaggctattcagccagccgagttataatcatactctgcgaattatgtttccaatgagttgttccatgctaagtgtactttcgtttgcgtgtttgagttcttcgttctacccagctcgacacgtgtcttcctctgatgtgcttactgaattttgggtataacaatatgttatcgccaatcatcatgtcagtttaaatctagtcaactgacatatcatgggaattaaacttatgaacatataatcatgattatattccactgtgct

SEQ ID NO: 406208 - DNA, 822 bp, Cannabis indica
ctctaatatcatagtaaatttgatatttagttgtaataatagcaatataacaccttaagtggtgtggtagttgaaactactaatacttcttagtatttctctaattttattgcaagtaaattgatgtatatatattcatattataatatttattttttagttaaattcaataattttaatattttttgaacaaataatgaaattttattaatgtaataaacaataataataattcgcaacccaattgggacatcatcctgctggagacacgataagaaatagaattagaaaaacgagccaaataatcaaccgcctaattctcaaattgtttgacaaaaaaatttaaataaaatcaaataaaaaatattgcaacatcacaattaacctttgaacacatttattcaatttcatccactactcagaagacagaacagaagaaactattgcaacaggttcattcaatctcgtagcttattgagcatttaactattgtgtaagttacgtaactgcactactaacaacctcttcagtcacaaagaactttttattcccgaccactaacaacgatttgatggcgagtcattgaagaacaaagaagaaccaataacgaaacaaagcagcagaaaaaccatgacacacagaaaagactatgttggaagctgttttactaagatctagatttactaacatgtatattttattataaaaatataatctaacatcctaaatatgaatttcctaaaataatgaaataaacacataagagattatagaaaatcttacattggttgcagcagatttaatgactccttccgttcagat

SEQ ID NO: 406209 - DNA, 805 bp, Cannabis indica
gattatttggctcaaggccctaattggcgtgagattggcctgtccaaacataacttgtattttaaactatagtgtaattattaatttaagtaattactactttaatagttacacagcaactttcgaatacgtactaacaactttaattagggtgtgctttcttttgattttgagataatagttgaattagctcattgttttaagattttaattaagaataaatgtgtattaattattgtatttaattttatataactttttgttatatttatgttatttttttttctatttttctagttaattacatttttttattactgaatttattctttttaataaatttctaatatttttatttttatatataaagtatggttatcggaaattgttattttgatatatttttaaatttaacaattaaaattaacactattaaattaattaattaattatttttctcaaaatatctaaattaatttttttatttcataatttattaaaataaaatttatataattatttaaaagtgttaacaaaattagatagacactttttatatcaatccaatttaaatttcaattaattatttaattttaaatttattaattattttgcttaaaacatctaaatttaatttttattttattgtttattaaaatataacttacattttttttgaataaacttacaaaattatttaaaagtattaaaattaagtacatattttatagctctaaaaaaataaattttataatttaaaaaaggggaaatttcaatttttggccttaataatacaagccatatc

SEQ ID NO: 406210 - DNA, 474 bp, Cannabis indica
gctgttaaaaactctttaaaataatcttcaacgacacccggtaagcctttttcccaatccacccaaatcccacttcaatttttaagagagaaaatcttattatttttttgcctagtacttgcacaagcatgaaagtacttagtgatttggtcactagattgcagccacaattgtttggatctctgcttccaaaagacctccttttgagcgaggacttcgaataaacaattttgagcctccttgtacctgttaaccgaatcaacatcccttctatttttcaaaagcttcaggattttatgacaactatttattcgctgctagaaattaccagtgatatccttcccccattcggctaaagcagtactacaacatttgatttttgagctcaaagaacttgactcatgaacatcccaattatcatgcacaatttggcgacacataggctcacgcacccaagcattttcaaaccaaaat

SEQ ID NO: 406211 - DNA, 603 bp, Cannabis indica
ggtattcgtcacataaataggttgaataattaaaagttacatttcaattacttccatcacaactagtcctgttaaattctgtttgagtagaaaactatttattagagttagtctcacattaacaatgtgtaggaaataaattatcatatttaaaataaatggacaactcatattattgtcaattagttttgagatgaaatctcattcatcttaacctctttcattccaaattctaacatagtattagagccgcttgtgatctattattggtctaaaaagacgagccaaaactaaaaaacttttgttgtctcccttcaacctctatttgggacctttcggccaatgtgtgccaattttcttgtgatctttgacttattttaaaattcacaaatttcatgacgtgtacacccataaattctatgatttggtcttgtgagattctttcaaatgtcccgttttgactatgttgtctcttaaaagtagtttgttatacccacacttttcaggcccaaacgtgaggagggtattatacaattagtttcacattgttaatgtatgaaaataaattatcatatataagatgaatgagctactcctcttatt

SEQ ID NO: 406212 - DNA, 932 bp, Cannabis indica
gagaaagatagtaaaaagataaaatgagctgggtacaaaaaatactaataattttatatcgctgtcattcaactatagtgaaaatatattcatattattttcttttaaaaaatttctttcttatcctaaattaatttcacctttaactagaaagtattttaattgcttaatgatgtcctttttgaattattacaaaactaatctaatcgtttatcagatttataattttccttcatttatcaagcattttcaatttcttgagagattataaaagtgtcaaagtccaaattggagttccgcaatataaatttgttcttagagtattctaatattttataattttttttatcgtttttatatttaattttattacattaagtattagagtagtgctatgaagagttggagatcatctatagttaaaaatgtaaagttaacatattattttatacttgtatgaaagcagaaagttgaatagtttagttttttttttttttttttcgtacctcccttaaattaacaaaaaaattaattttataatttacctaatttatatattatcacaatttaagataataatactcggtaggtaataattatttgatttttaatttactattattattactctagatattataattaccaagcaatactaattaaaaattaggctaattaggatttttgccccctgaactttgacattaccaaattatgcaccctgaacttttaaggacattgaaaatgccccctgaactattgagattgttggatttaaggatttttgtctaattttattcagttttactattaatgattgtttatgtactaaaccatgtttcccagactttactatctaccaaatcatgcccttcgaactttgacatgcactaaattatgtcccctgaactttcatccatgttagattattt

SEQ ID NO: 406213 - DNA, 971 bp, Cannabis indica
aattattagaaataaaaattgacatttttttacttaaaaaaaatactttttgtagtttacattataaattaaaaacaaaaatataaactttaaaatgatttatgtggcatcctatgttaattttaattcatattttttttatccattttctcattgtttatgaataaaataaaaccatcaatatcaatatatttaaaataattttaatattatgtttaaattcatggttgaataacttaaattattataacaataaataggtttatttttcctaaattattactaaaaaaatcacatctttgaactattatcgatactaaatattctccaaaactattcaggtaactaagttgtgaccattctcttactttttgtcctacatgaattttattttatttttaaaaggagtccaaagaatgactaattataatgatattttaaatttaaattttaattatttttttcaattgttcattttaccaaatatttaattgagtaagattgagttaatcattcgttgattcaatgaaaagaaggatgagtgatatatttataagttacaagtctaacattaatcacatttttaagccgtgggactttttttaaaaaataaaataaaaattctataataaatatctatattatatggaaatataaaaaaatacaaataattaaagatgactaaaaatatctaaaatcttagaaaaaatttagttgttttttttttatttatttaactaaatatcaaagatgttgtcacatcataaaaatgtatcaatcacccatttagtgaaaaaaagaatgagtgatatatttataggttacaagtctaacattgatcacatttctaagctgtgtgggacttttatagcatcataaaaattatacttttataataaaagaaaaaatatgcactaatcacattttctaaagaatataatataaggtgtaatataatatttaagagaaaa

SEQ ID NO: 406214 - DNA, 1727 bp, Cannabis indica
gttttagatgatgaatcaactcaaaagccattaaaatattgtctatgatgagtctatttgaaagaaaactactctgagttttggagatgacaaatggaagaacctccttaaatttgattgccaaatttttcgatatgatcttgtaaataacattacacaaattaaacaggcaaaaatttcccataccatgtggcaatttaatttttggaataagagtaatgattgatttattaatcaattccatgttttgattttcattcaaaacaccaagaacaactctagttacaacatcgccaacaatattctaataattctggtaaaacattgcatacataccatcactttttggcctcttatctaggctcatgaatttcagagcaactaggacttcattgctcgagaatggcttaattagagtcattcattttaggtgttacagtgacatgtatagttgcaagagtgtaatgcaaggcttcagcatcaatctcagatatgagaacaagtcattaaataagcagtggtgataatctcagtcataccctcttttgaggagactacttggccattagtaccaatcaaggatttgatggaattttgttgtcttcgtgaggatgcatatgttagggtttatgccctaaaaagccaataaagacatttctgattattaataaacagttgaacattttgatatatgcttgaatgttaaattattaatatttattattggataatttatataaattttggaaaattctttatttatatgtgaggttgtgacttgtaactgtacagagaactaagatcacttagatatgaataaaacagtcagcaacatattaaagttatggaatttttaatcaatagttgctagtacgattcactgaagcccgttcttcaatgtaaataatcttggttcggattactaatatagtatgacatctaagtgaaagtattgtatataatagagattatatatgataacgaccgatatggataaagctgtctttatcaaacttatcgtttactataaagacctaaataatatcataatgatgatcaatagtagatcggtctaaatcttaagtaatcacgaactcatgttcatgttattagtttctttgattcactcgttaaaatttctcaaagagatgattcttacaacttattttaggaatctaataatatggatggctgggaacatgatctataattatgaaatcatgacttttccaacgaatcaaatgttggttccttttatgtgttaattctagtactggaaggttgcacgcaaatttaaatgggatatgaattatactaccactagtagattaatggtataaaaaagggttttgagtttttaaaatacttgaacccgaacctaaccccctatttttaaacccgtttttttgggtttttcgggtgggtgggttttcgggtgtaaatgtgatgtcctaatttagtgggatatttagtataaatcattaaagttgttgcaccaaaagtagacaattctacaccaattaagtgtaacccttggagatggtctaagtactattgttatgtttggttgggaaaatgaaagcataagtataggaaaaggaatggggaataagaataggaatgtgatagaataaaattgagtaatttgcagcataaatacctaagtttaactcccagttgcaaataaatacctaagtttaatttttggcggtaataatacctaagtt

SEQ ID NO: 406215 - DNA, 779 bp, Cannabis indica
ttaattccaaaaacacttaagaaaatacaacaaacttgagactaataaaagttataacaacaacaataagttaataatctttttaaagtttcaacaacacacctaaattaaaataataaacttgaaactaattaaattccaacaacaatataaatgtacaaacacaaacttctaactctaaatttcaatacacatgtatgggcttgggtttgttgctaagaagagagggtttgtgaagagttatggattttatcctaagatttatgggcttaattaaataaatataaaaattaaaattttaaaacatgcggtgcggtgcggtttgaatcgcggtttaataattccaaactgcaaaccgcaccgcaccgcgcggtttgggaaaaattcaaaccgcaaccgcaccgcgaagaatttcaaaccgtattttttttgcggtgtgatacggtgcgggcggtttgagcggtttgaacggtttgatgtacacccctagtacttatagctaaattccttctgaataagctatactctagggttcaaatgaacagttgccaaatatagacaattatgttgataaaaggaaaaatttataacaatatatatgtgcaaaaaaaaaaaaaaaattaaattacaaaaaagttgtacatttctttaactatgagaaataatattctcatctttatgtacaaactatatataagataataaatttgtatatactaatttaatttagtagtcttgttattaattagttaattttgttataattaagtcacgatttt

SEQ ID NO: 406216 - DNA, 570 bp, Cannabis indica
agtttagaggacacaattcaatacttgtcaaaatttagggccacacttggaagcacgatttaatacctgaacaatcgttatattagtaaaattaaacagaattggtatatgtttttaatccaataattttaatagttcagaaaaaattttaacaccaacaatttgaatgagtgataaaatttttaggctaattaagatttttgcccactgaactttgacatgtaccaaatcatgtcctttgaacttttaatatcgttaaaaatgcctctaactattgagattgttggatttaaggatttttgtctaatttcattcaattttactaggggtgttcataaaaaccgataaaccgaaaccgaccatcaaaccgactagaccgtaaccgaatttttggttccacgtcatcaccgaatttggcggtcggtttcggtttttgaaataaaaaaatggttcaaccaaaaaactgccaaaaccgctaaaaaccgcaataaaccatctaaaaccgcccaaaaccaccaaaaaccgtccaaaactgcaaaaccgaaaaaccgccaaaaaccttacggtcag

SEQ ID NO: 406217 - DNA, 954 bp, Cannabis indica
atcaagtggacaagaagaaacaatatctgatggagaagaacaaacgatatcggatggagaagaacaagcagaattggatggagaagaacaagcagaatctaattaatggagatgaacaagtagaatccgatggagaaaaataattagagccttcatcagtgtcacgagacaggtattttttgaatttgttcattttattttattattatttttcttatgtcattcatatagtagaaaagattatgtttattttatggcaggtcgaaaaaattctcgattggtgcctatattaaagaaaatgaacattttgagtgaaaaataagtataaaaagtcgaatggacgagatcacaaggaacattaatgatgtactaaagaatgatccgactcacttaaaattgttcaaagaatctttgtttggccactttctcgatatttctgactactatagatattttagccaagtgatgtggctattactcattcaagaagtatattgtcacagagattcagagatgtggtttgttgtgaatgggataccaatccgattctcattgatggagtatgcattaatatccggactgaaatgctcaaagtaccctaaaggttgggaatctcaagctgagtcaaaatcattcaaagatagacactttcgtgtaagaccttcatgcatcaccattgacgccttaaagaaccaaactaaaaaattagtctgaccaaaaccaaaagaaaaaatcacggaagaataatgtaagttaacaatagaaatattaaagatggcttctaatcttgttcatctttggagccttaatgcaaggagacaaaaaaacaagctaacattgacccaaaattattgggattggttgatgatttggaaatgttcaacaaatcccttgggggactcattcttatgagtatcgttaaaagcaacttcgaaagccactaaaagaaaaagc

SEQ ID NO: 406218 - DNA, 1210 bp, Cannabis indica
ttgagattttagttgctgtagtttctgttagtctttgaaatgtgtttcgtagttagaatatgtttagatatattgaattaagcatgttttcatggctggtttgttgtttgagcaagctttgagttttagaactcaagcttggctctttaatggtgattttcgattctgagcttgggtagttgtgttgttgcttggaatatgtctattggagtataatatgcaggtctagaaggtttggtaaggattgaaatcgatttggttgagttttggaattgtttgggatttctggtataaactggctaaccggttttacaggacctgtaaaaccggttacccggatttgctgcgggttccccgaaaaattcatgttgtcgattcgtgttagtttcagagctttggttggttaattccctattagtttagggtatttccatgttaagttacagagatagggctttggtttaaaacctaagtcctcgattgtgatttagcgtgtcgcttatccatgttgtctttgatgtgatttaggagcctgtaatttgccgagcagttgttccactcaggttgaccaacacacctgaattcgaaatcaaggtaagattagtaaaatatcatgcatatgttattacatgtttagtatacatgttgtttatgtctgttagaatacattgatagcagtaatattatacttagagttgtactaattattgataaatgtatgttggctgaaataccgatcgatgctgtcacaccaatatggctagagtatgactagcatattgagtataggctaatattatggtcgatagtattgtcgtatgaacgttctagactcagtaccgtgtgggacacgggcataggattatgatcgggtgtatgggccacaggttataacccggaatatttctatgttttatgttatgcttttattactgagtctgtcaactcacagtgctattttcatgtgtaggtaagggcaaggctaaagctgaggagccgtgagagcgagcaggtgaagattgtacatgtcggggcagttaggcctggagcatacgatctttgggacatcagggcttttgctgtatagtcgctaggcgacaaaacttttataaatgtattttgtaaacgggatcctagaattttataaatatgttactttatgtttttaattaagcaaattttaattaatcacgattttcgataacctcgt

SEQ ID NO: 406219 - DNA, 416 bp, Cannabis indica
acaataagagtggtattacaatagaattatgctggactagttaagaatattgggttgttagttcattcagagaagttggaaaaggccaaaatgcccctaggttatacttaagtttaattttatgtaagggtaaaatagtcattttaccataatagtcattcgaatattggctgaattcgaattatgattaggttataatatttatctaaggattatttagatcacaaaaagaaaggaaattaggagataactacatcaaaagagcctacaaccttccttctacctcttccattcgaagccctagaatccagtagcaacaaaggactttttcagcaatttcaccatttccctagttaagctacaaggtctagatttgttcaagtgttgaggtaagttctgttgggttttgtgcccta

SEQ ID NO: 406220 - DNA, 1045 bp, Cannabis indica
cgcgttttcatggctgaaaattcttgtcagtgaggattggagttgcaagtgcaagaccggggtgatctgctgtgctgagaaaatatggggatcgaatatcttcatatgcaggccgattgttgagttcttgattcgaacttggagctgggatgtcaactcgattgggatcagttgcaggttgttgttgtggtggcggagctgtggaggcatcgatcacaggatcaggatcttgatctgtggtagtagccgaagatgtagcacgagttctcaccattgttgattgaatctttaggttgaagcttgaagatgagggttgttattcatctgataccatattagagcagaaagcagagaaaaaggaattctgtttttttaatgattattagaactgaatggttacaaatgagaaaatgccttttatatacaagtagataaaacacagcagcactaactaacataaccgactgaagtgtaatcataaactaacttaaccgactttagggtaaactaggaaagtctaataacccgagttgggctgagatttcatgagaaagagggaaagagcaagggagcgattgtgcgagagagtaaaatgggagaaagatagagtgtgaagggtcgtgtttgaaacacgagattggactgaaaatgacttgattggacaggactggacaagattggattatgctgaacgtaattctgtatttggtttaagagtagactgaactattttatttatttcttttttattcttttttttaaaaaaaaattaaattaaaataaaaaaatacaataataaataaaaaataaataattcctagcaaaaaaataaagacgaataataaaataatatatcatatataattaaatatatatcataaatatataataaaataatgggtaaatagcgacaaaacctctaaaagttttattttggttttatttaacccccaaaacttaaatttgtgtgataaaactcttaatactcgtgttttgttagcaatttaatattttgtccattttaggtgttaagtgtcatgttaga

SEQ ID NO: 406221 - DNA, 823 bp, Cannabis indica
atggcgaactccatatcttgcaattagagcttcaaatttcttgttgcaaaagtggcttccttcatcgctaataatcactctaggagttccgaacctggtgaaaatatatttctgaaaaagtttagcactgttttactgtcattcaaatgtgttgctgctacttctacccatttggagacataatccacagctaacaatatgtacgcattattgtatgatgacgggaaaggtcccacgaaatcaatgccccacacatcgaacagttccacttccagtattccagtcaaaggcatttcattccttctcgagatattcctagttctttgacaacgatcacatgcttggacaaattggtgagcatctttaaataaagtaggtcaaaagaatccactttgtaataccttcgcagtagtacgattcccactaaaatgtcccccacattgtaagttatggcagtgagttaatatggagaacatctcctcttctggcacacatcttctgataatctgatcagcacaatgcttatacagaataggctcttcccaatagtagtgtttgaccttggagtagaatttcttcaactgttgcctcgtcaagtctggtggtataatgtctgcagccaagtaattcacatattctgcaaaccaaggtacagtagaatccaagagaaatagttgctcatcaggaaagtcctcattgatctgaacctcccttgtattctgactctcttcaagttccaatcttgatagatgatctgccactaaattctccgtacccttcttatcttttatttctaaatcaaattcttgtagaagaagaaccc

SEQ ID NO: 406222 - DNA, 616 bp, Cannabis indica
gaagtaaatttactaaatgacaataaaaagatacaaagtttcatatagtacaaaattaaagttaaacattacaatctaacaaaaacttcaatttttaaaatacatagaaagtatgagagataagtaagactgacatagttatgattttcaaaaatttttcccataccttaagtaatatataacaaatgtgttcaagcacttaaatcgattagatgacaagaattgagacttttttggtaagttttttcaaaaatttaagcaaaaacaacatatgtaccaaaattagttttatgcatccttcttgaaacattatttttgtattagcttaaatatgattgatatgatgaagtgtacaatctgaaacaaaaaaagcttcaaaaatgagagattttggcaagttttactcgtttttatcattttaagcaacttacttaccaaaaattgattttatgcaaaattttcatgcaaaatctttttcaaaagatgatatgtgataacaaccaacatgctcaaacaagaaaataagaaaaatgtccaaaatcctaacttttcggtaaacttttcgatttgcttgaaaactagaaatctaccaaaaatgagttctatgcaaccaaat

SEQ ID NO: 406223 - DNA, 444 bp, Cannabis indica
agtggatttggccttgagaacttctgcacctctgaaacctactaatgataccactgaaaaagatagaaagtcctatgaggattgggagcattccaattgttgttgtttgatgcttatgagatatcacatggatgagtccattcgtgatagtattccccaaactaagattgcaaaagattttgtcaatgcgatcaagaagaagtacaagaaattctcaaagagtgagaaaaacgaatgccttcttgaatggtgacctatctaaggatatacatgactcaacctgtaggttttgagaaaggcgaagaacagatggtttgcaaactcaagaagtatatatatgggcttaaacaagcatcaaggcagtggtatctcaagtttgatatgattgtcagtgggagaacatggtggatcaatgtatatacatgaaggtcagtgggagcagtt

SEQ ID NO: 406224 - DNA, 691 bp, Cannabis indica
tttcatttagtcatttcatgaatgatgatatcatgagtggtagttatataatatatgtataatttgaatttttactatgccggcttttttatgctttcttactagacacgtacataatgaccaagctttgattgtacatatacaaataaattttacatgttttagatttttatttattattaattatttgcgatgaatttcatatatagtttcattagcaagtatgagaatttaataattgtaagtaatttagtaaaacaaattaatataatttgttaatttaaaaaaattaatttacaatgaatatatataggtacacgattgcgtatgcatgtatccgtgatcttttgttctttctagtctaatcaagaattggtgtactggtttcactcatatttatttgtgtttttttaaaaaatgggttgtgttgtactgtgctaacaaaaaaatatgagtcgtgtcttgttctagtaacattttttaagagtaggcccgacacagctcggacccgtaagccctgtattttcatgacgtgttttgcttgtactggcctgtatttcttaaataagcggccaacccgttttgatacccgggcttaaattcatgctttactttttcatatcatttttacaattattaaattgtatgtgtattttatagctttaattatatttatataatttttgaacaa

SEQ ID NO: 406225 - DNA, 713 bp, Cannabis indica
aagaggagagtaggtaaacaacaagttacccatgcaatacaaaagaaagtcccgtataaataaaagtgacccacgtaaagaaaaggggattaggaactaaaaaagagagaactcacagaaaaacaatgatgactgttcttgaccaaaataatgctagcttctgattttggtaaataattacatatttgtatattttgttaataaatggtattttagttaaatttcatgtaaaaaatatttgtatgagttcatgttttacattaaaaatgttcatttgagtacatcatatgtgttggtgtgggtcataatgataaatgattgtgtttgatgtgtcatgcaagtgaaattgaccaatgtgttgtgtagtttgacgtaagatttcattgttaatattaggttatgcttgaatatgttttaagcgttattgtgttattggatttaggatcttgttctcaacaaagaaactgaggtaagaagagtggacatatgtgcacagggtgtatgttgaaacatatgactgtattgtgggtttgatgttcatgtgcttatgagattttatatcataaatcggtatatatattagtattgtaagcatgtgatattgataaaggcttttgactgttcgtgtgagaataacactcataggataggttttttgttgcttgtatgagcatagcactggcaggatatatttttggctgcttgtatgggtt

SEQ ID NO: 406226 - DNA, 562 bp, Cannabis indica
tttacatatgtaaggatgatataattccgtttacaaatatggagaagattggacaagtagttgtcatatgctacctgagttatatatattgtaatatattatatttaaaaatatttatatattttatttatttaacaatattcatatattatatattttattaggttgttacacaaaaagaaaggcctcacttaattaaggataaactacaaatcataaaacctactgtaaataacaaaattttaattattttatttttattaattcatataatgtttatttttacagagttattaatttaaactttttaaataactagtgtccacatcaagaagacgatgtggtgtgtggatacttcatgttaaggatgatgaaagacttaattgaatgtgaccaaagtccaaaagcttacttcaatcagatatatataataatttatcatttatatattaaattatattatacacatttttataatcaactaataaattaagtttattttgtatttttttttgtagctaaaaacttaagccatatacacaaaagcaaattgatgacatgc

SEQ ID NO: 406227 - DNA, 515 bp, Cannabis indica
taatctataataaaagtgatataaaaggaatggtgaccagaacacattaaataacatacaaaaataaatgagaaaattacattgtatacccactttactttatctgttttaatttttaccttcattttcatattctttgagatatacccactttcacttttatagatgatgtccctattataccccttacataaatgtaaatcatatgctacatttaagtagagggtaagaatatattagacaactcactcataaaagtggatagattttaatgaaataaaatataaatgtatttttaattaatggatataaaaaagaagtatagctaaacttatcccaaaacaaattaactagttacaacagctaccgtactggcgcatgactttatatcctatattggtgatggagtagcacgatgattcaaaattatgttaattactagtcggaggcacacgtgctccgcacgtatatacatgatttttttttattttgaagggactcatttattataaaaa

SEQ ID NO: 406228 - DNA, 656 bp, Cannabis indica
tatacccaaactcagactcgcacatgcacctagacatagaccccgaatgcaaacccagacgccgaccttggacctagaccctagacctagaccccctacccgcacctggacatggacccatatgccgaccctagactcagacctcggacttggtcctcggccccagaccctggcccggatctcagatctcgaacctagacctagacttggaccctgactcaaaatgcgaacccagtccccctcagaatgtggacctaaaccccgaccttagacctcggaccctacgacccactccccaaatccgatgtcggagtccgagttggggttcggggttgctctagggtccggggtccaagttctgtggtctgggcttcggggtccgattttgggtctcggtccaaggtttgggtcttggttggggtcgagtccgacttatataaaagcaaaaaacaaatatgaaagataaaatttctagaacacatttttatttttaaaattaaaaaccaaaagtagttacagaacatatttttattttcaaaaataaaaataaaacaaaattctactttcacttttataatttaaaaattaaaaaagggatattggcaaaaaaaaaccacctgaacttacattttttaatacttaaccacaaaaattaa

SEQ ID NO: 406229 - DNA, 659 bp, Cannabis indica
aaaaaaaaatcccaaataggtgtctacccctcgtgatttattctatggttatagtggaaaacttcgggattaagaagaaagagaggatgagctaagtctctcaacgaccttcgttcaaatgagagaggatgttcctgagttcatcagaaatacgatcgtctctccatttttcaacggcgacaagcttaccccgccaacccgaaacatcaccctgaagaagggaaactagagaacataaatattccactgtttctttagatgaggaaagctcctcagttaaccttaagagctcagcacgaagctcctccatagttttcgtgccagtatcatggaaacacgaacgttgctttttggtaggaacaggaatgatagttgtgtccttcaaagtatgtttgccagatgtggaagacgacatatttggaagagaaataagcagataatagaacacagagtacgataaatgaaccaagcagttagtcttatttatagaaaaaaaaacaggaaggtgttaaggagatacaaggaaatatgtcaggaattatgataatgatatgtaggctctgaatatagccttatcacgaggagtagcttcttccatctagcctgacataaaagcagtatacctattttagtaaacaagttatattatattatattat

SEQ ID NO: 406230 - DNA, 511 bp, Cannabis indica
ggcgacctcaaccccccaagccggcaccactcctttcgccaccattagcccaagatcgccaaagtttgaggctcaaattttgaacggattttcgagcacctccggtgtccgtttgatgagtcgtcttcaccactagacttagctcctcgaggagaacaacttacaccaaaccattttgcccaactcacaactttttctggtgaaactttgtagcttcgcccctttctggtaactttctgacgatatcgtgtaccgttttatcaaatagttatctactcgtcgaggtggtcgttttgatataaactactcctatttttggcaacgtttccggtacaccaatttttactgccaccgataattaatgtgcactgcttaggtgatgttttggaactccaaattttaagtataggcatattatatgtcgttagactcgattttgaatgtagaatgcaatgatgataattatttggccatttgatggtataggtgaaagtaatatctaagattggac

SEQ ID NO: 406231 - DNA, 532 bp, Cannabis indica
ggcgaaaaggtccatcaagattaatatagatactctcatgggataatccgaattaggggaattgaagagacattcgaaagcctctaaatatcatcctacgcggcatcctccagacgtagggccctactatgttaggggtttgtccccaatgtcaggcccaaggagtgagcgcaccactaaaaggaaactatctttttgtccaacgccatattctccaacattctcagtaccaacacaatacgcatgacacctgacatcactaaatggtccccactcgtatgggtggccgttatcttgtgaattgggcctcactcaattggctcaaaatcaatatatattgtattttaccccataagtggacctagttgacacctttaaatcctaccgggtccaagttcatccatacccggttctagcctataaatagaacattatcccttcatgcaaagggttgaaaaatcatttctactatcaagagctaagaattagggttcttaagctagggcaaaaacacttgtgtaagaatactttg

SEQ ID NO: 406232 - DNA, 527 bp, Cannabis indica
tttatttttttttaaaatgaattaaaagagttggttttatctaaaataaccagccaaataatttctataaaatcaaattaaaacttaacttaatctcacaaaaagacaaacacacaaaagccaaaatgactattttgccccttcatactaaaaaccacttaaagtcactaagggataacttgggaaattctaaaatcccaactattctcgacattcccaatgtccaactatatcaccccgctatactaaaaatactaagatgtgattctaatagccaaacaccgcgttccattgttgtcggacactgaacatgcaaaattatgaaatttctatttatgacatataaaatgcattctgaattcaaataaatcactataaattaataatttagaattaataaataattttcattattaaaccctaattatttgctaatttctaaattagtttaccagtatcggatgtatgaagtatacattggaagagaccgatattgaacttggattagatatgataaatttaccgta

SEQ ID NO: 406233 - DNA, 1326 bp, Cannabis indica
ctttatagaatgatatttaaatattctaaatgtacaattaaatttgttatatattaaaatatgtgtacaattcacattctatcctatagtacaaatattatttttacctttattaaaaatgtgtttgttctacaggtatgtatgtgaccattttattttttttacacataaaatatttattccatgcactttgattatgtgtgtattttattttaattttaatttcttctaaaaatattttaagagtaaatagtatctttgattatctaaaattattaaatttacttcaaaaaaaaaatgacgttgaacaaatagaacataattataactttcttaaaaatttgtttatccataaaaatataagaaattatttagaattttttttacaatatttcaaagaatatatagaatataatttttgcataatcgtcaagatgtatgcaaaagttgatattgaataatatatattcaatatgtcatcatacaatataaatttttacagtttctaatatataaatattgtaaagtaataacaatacacatatataataacataaataatatatataatagaacactctttaaaattaaatgaattcaactcctatcattctctccagtaaatgatgaacaagaaatacatgtcttatgtttttaaataagattaatcatgttcatcgtaattccataaatataatatttttgacaaatataaaatatttaaacaaggaaatatttgctcaattctatatcgatattagattatttttcattgtcatcaaagaatataaaaatatatatataaatatatgtattcatctcttttattattttcagtcaattatatgacatgtttacaagatttttaggatatatgcaagattttattgagaatgcataatcttctggatatatgtataatttatatatattttctctattatatcataggcacaaaatatattgtaaataatgtaaataataagaatacataatgtatataaattcaataatagacatatgagaagaagaatatatgcatacatatataatatatggatatagataaaaaagaaaaagaaaaaagtgttcttaaaattatttcagtcaaatgagtatatatatattgttatattattttataatataataagtatagattaaaatgtgataaatatattattatgtgaatagtatatattataagtgtatggtaaataaataattaacctacacttctgtaacctacatgttgtaacttggagaggagttacaatttgttatcacttgtaactcatgtattgatcacacattattagtgtaata

SEQ ID NO: 406234 - DNA, 647 bp, Cannabis indica
aaggtactagaacaaagcctttggaagtcagatacagtttcctcagcagatcaagttgcagattgtatgacaagccttcttctcattcaagatttcaattagtctggtcgtaccgaaactcggtgtgagactattccacctcgtcgttgaggggtggtgttaagaagttaattaatctctaattagtgttaatactctgttttgtgtaattgtcagagtcggttagcatagttttctgcactttatttgctgcagcattagggccacttgtcaccttgctattagtgcttgtaatacctatgagagtataaatggaaaatgatcttctcagcctctctttgagctgagttttgtgcaaaccaattctgtgtattctttaactgtgccaacaatcgtagaggacatcgacgaagagaggatggtagtggaattagcccttctaatttccattttggatgtattggtcgttgtgccttcaattgtttggaaatctcatacaaagcaacgtcataaaaaaaaaataaactaaagaaatgtgcaaaaacacaaaagtattaagaaaatggaaattacattgtgacataaattcaaatcttcatcgtaataaagatgagagtcaaattcagatgagagtcctgcaagaaaac

SEQ ID NO: 406235 - DNA, 693 bp, Cannabis indica
tttttaaatattattttaaattaaatttgaatgttttgatagtttaaccaaatgaacattttcattaattctgaagataaatttaggatacgaataataacttttttttaattactattacaaaatataatagtaattttttttatttaaatcttttaaatttcaatgattatcactacattgaatattattaattttaaaattatgatattaaaaaaaaaactaaaagatttattattaatatttatataaaaataataatattacaaataatatatttatatttatatatatttaaattagggatttttttaatttttacactttaaaatagtttttttttacattttttacggaattctacgtaaaaactcttattgcaactagcgctgcaacttaaattgcaacaaaaaattgtataaaaatctctattgcaactagcgctgcaaccactttagaaacctaaatcgtaaatttgaaaaaaaaagttaaaaaaaaattatatgaagtaatatttcccctttaaattattttaaaattagtataaattgagttattctaaaataaatagtattaatatttatatatttataccatattaatataattaaatttaatttattcaaaaaatatataattaaatttaatagaatattttaatattttttaaaaaatattctgttaaactaataa

SEQ ID NO: 406236 - DNA, 693 bp, Cannabis indica
tgtctaggctgtccaccatggacaactttattacgatcagtccattatttttttgaccttaaatcatagcattatataagtaaatactttttaccatataaaaaaatcaattaattttttttttgtattttttttaaaattaagagtgaattacttaaagaacatggtatatttatatattttgattattaattaacttagtattattataaattttttatggtatataattttattattacgatatattaattctcagtaatacaatatatcaaagtaatagtaatacaatatatcaaattgtatatatttaattatctaatatatttattcgtttttgttataatatattgatattttatagtaaaaaaattatataacttaatttaattattttttttgaataaattaatgtaaagtaaatgtattttttttataatttttattagttaatttattatatttgaccattttattaatttttaaaaaaaaatgaacatttactaattaatttagtttttaaatttaagctcattttgcatctcaaccctacaaaatatgattaccatagaatatatatttacaccatatactaacttttatttaaagtttacatttatactttgacaaaataacttttacatttatgctttctctattttttttttgtttttttattttttactttttact

SEQ ID NO: 406237 - DNA, 695 bp, Cannabis indica
ggtagagagaagaacacgatatgtttttttttttcttgggatttaggttttatttgagtttttcttttatttatttttgattggttgattaggatttttatcctcgaaatttcatatatacaaaatgatgtctcttgaacttttaaaatcgttaaaaatactttttaaactattgagatcgttcaatttaaggaattttatccaattttaatttaaaaaaaaagtccaatatagttggagttatgatttggtaaatattaaaatccgaggaacatgatttaatacataaataatcacttaaatagtaaaatgaaataaaattagacaaaagtcattaaatttaacattctgaataatttaggggaatttttaacggccagaaaaattcaaagggcgtgatttggtacatgttaaaatttaagaggcaaaaatcttaattaacctttttaattaatatgggtatggtaaaaccatagtcttttcatttaaaagaaggtcctcttttccaaatctataaggatctttattaaaacatatgagatatttacagtaaaatgactttaattttatattttttaactagaatttaaatcgcgtttcacatgctgttgtatttatttttagcaataattaatttataaaattatattaaatatcaaatttgatattttttatttaatatatataaaataaaa

SEQ ID NO: 406238 - DNA, 821 bp, Cannabis indica
gctaactaacagccattatttaatatataattaaactaaataacagccataaatagcttaatctgaccacaagtatttattaataaattattccagtagaattaaaaaatatataattataaattaagcatcatccttaatcttcatcatcttgtagtaccatagtaataaaataacaaaaaaacaccagacagtaactgtttgtgaaacctatcactcagcagaagagaaaacaaaatgttatttacaaaagaaaaaaaaaacaaaaagtctcaatcatacaaaattgagccaataatgtaaagatgattcccatgtggactacggctacgaggaatgttaagattggttcgtacataaattatttgagttgatttcaaaaaaaaataataatatattatttgagttaacaacaaaattgatctccagcaacagaggtagagactacatatagaacagaccactcactcactaatgccatcacacgtgggatttcattttttattcaaaataaaattgtaagaatattattttttttgttctaaatttttacatttattgaaatttaattattttattagatttgtcctattactcagtttattgaaatttttacatgtctttgtacattaataattttattcttaaaatttaacaactgtcaaaccgtactcttttcgaataaaaacaaaaaagattcaatatttttctttcattaaatcttaaaaagttaatttagatcttaaaaaaaaattattttaaataattaagaaaattaaaaataaattaaaattttaaaataaattaagcgatttaaaaaa

SEQ ID NO: 406239 - DNA, 692 bp, Cannabis indica
agtttttaagttaataccaaaaattaaatacaaaaatcaatgttacaaaaaataaagctagcatacaatttaaatttaagttaaataaaaaagatattaaaatttaatctctaaattgttgataggtgaagataacacatgtaaaagttgtaaaaaaaaaataaataaggatactcttaatggttgggttttaattttcttttgcgagacaacagtgtaatatttgtattttgtattttttcattctagttgaatctgctcgacaaagttattatttttcatgtaattaagatgataagatatagtataaataattaatttaataaataaaatctacttatacacaagtacaatatttattttatttatttaaaactatatctatgaaattcatcaaacctgaattggtggcagggagtattgatgaaatagagaaagaggaagaagaatcgcaacagaagaattgttgtcatagaagaaaataatcgcaatgttctatttctatattagtaaataaaaaaaaaatacacaaaataatacttacaatttagaaaacaaatgacctcttccaatgggtaacttttggtcaccaataatagattagaaggagagtctcatgtgtttagtaattagtttatttttaaattttgttttaaatcaagatatttttaattagtatatttttaaaaagt

SEQ ID NO: 406240 - DNA, 511 bp, Cannabis indica
gtagacctgtatggacctgggtggacctgaatggacttgggtagacccaaatggacctaaatgggtctgggtatacctgaatgggcctgagtggactttgaggtccaattgagtagacttgatgtttatgtcttcttggtaactcttcgatatcttggtcatggcacctggggaactcagtcgtggtacttggagaacttggtcatgggacccgcggagtgtgatcattatgagacctgcggagtgtctttacaatgtccatttttcttaggaacgtccttgatatgttgaagagagtacatgcatacttacttggagaacttttttagaagtgaatgccatgttggtgagagagcctttacatatatgttgagtgaagaggttataaatatagccaaaagaaaagataaaaataaaaaataactcgaataaattggatttggggtaaatactattttggatcttgcgttttccaaaagttaataattggatcatctgttttgttaaatga

SEQ ID NO: 406241 - DNA, 442 bp, Cannabis indica
ctcggaatccaatcattaacttaccaatttttttgttataagaatcctagaattttggcaacaagtgagaagttgagaagagaggaaaaatccatagaaccctagctttgttttcgagtcagaaggaagaataagaagaagaagagaaacttttttgaaccacctaacctaagcatgactgagatgagacaaaagatatagttaaatatcaaattaccattgttaaactatgctcctcactaaacttctccctttttggggtacataaagcctccgttttgcaagcgacaaacaagagagcagtaatggcggctatgttacagaagaacgatggagacaactcggttcttgttggaattattttaccagtataatcaagatctgagcccgaatttccttttttgttgactctgaattctacacagtcttcctcactatcatt

SEQ ID NO: 406242 - DNA, 851 bp, Cannabis indica
atatattttcaaacataaaaaattaatatataaattataataaaaagttaatagtgacacactatcactcctaattatatataatgaaataatccaaatccaactaaacattaaacatggaaggaaaaaatattaaccaaaaaattaaggaattaggtaattgtatttttatatatagggtagtactggtactactaccactccctactttcatagcttcataaatccaggtgtcggactctgctgagaatcttgagctacgtgtcatggtctcatggggcgtagagttttcctatatgatatatatatatatatgggttaattatatgtaattgaatttagaacctagtatatgcttttgtgtgtattaaggttggtagtgcacacgggccggggaggggaatctctaatgttatatgtttaattgaaagtgctgcaatatctaagatatttgaagaaaagaaatggtcaaataattaattatatatataattaagttgatatttgttaagatttccacttacttattacatctatatacggtcattatatatgttaaataatattataatttatcttccaactatttataagtttaagactttaatcacgtttgcttttggcaccatcaattattgcatggataagggttcgttacatctacattttcaagctagcgtttttacactcatttgattaattaggggcgttttgtatgtggtgtccaaaatatttaattatatggaatattatgaaagagaatataattgtaaagaaatgtgtaaactgtattatttggttgtgtagggtaatatgtaatttcctgttaattaaattatactttacaagaa

SEQ ID NO: 406243 - DNA, 655 bp, Cannabis indica
ttatttaaaaataacattaaattaacttatagtttgatttgatttatgtacagaataaacctatacaagtgaaataaggttatgagtcatgacaacaagtctaagtgtaatggtgattataagtgagatatggtatgacaaaagttttaaaacatgtgaatgagttttttttttattatttatttatcaattatccttttttttagatctttaatttgtggaaggactctcataattttctttttttgatgttattaagagtaaaaaaataaaaatttaacagaataaaaacctactccaaactccatagaagtgcccatttggggtctgtatcagttatgtctttaactaactcccttttgcattttaactgctaattacatctatcttttttcaagtttgtcaatctcaaccgttccctccttcctctttcccatgcttccctaccgccggtcacccacaccctcctctgtcttctctgtttcccatggatccactgctgaaagatatgagtaacaccctttctctcactgaggaagagcgttcaatagtttcactgtctgagtactgtcccaatctgatcgacagcagcccacatactcttctggctcgagttcttacccaccaaacggtatacatgttggaaattatttta

SEQ ID NO: 406244 - DNA, 508 bp, Cannabis indica
ttcttgagggccctatggcacttttagagggctcaaaaatatcaaccaaccatttggcgccgagactcacacacccaagtgtgcccaaactagggttcatgggcccgcgcgagagttttcaccgtagagacctcaagtcaccaaggaaaacaataagaacttggcttgtttgggcatgccaatgacttgggtttatgtataaagttaaaatagcactaaaaccacaagagaagaggaataagtgaccactaccacaagaaaatggcagtgctctcaagttttggagaccagtgccatagtagaatggcacaggtcactcctcgcagaccatggaaggaaatttgttcaaacgggttccctcgacatcaaggagcaagggccaagtgagaaaaatcattttctacctaggaatcgccttaggtgacctttgccacaagagaatggcacatgtcactccttgcaaactatgaaagaaaatttgttcgaacgggttccctcgacatcaagg

SEQ ID NO: 406245 - DNA, 1254 bp, Cannabis indica
tattatcttaaaaatcaccctggtgacgtggtatggaatgatgtgacatgtgttgggcagacaagtatatgtcaagtatcaaagatacttgacagaggtcagacaatcaagaagactgcctaaaagatgttgggcagggtatatgccaaacgaagtcgtccaaaattaaatatattcttgacggggcatgctaaccaacattctgaacaaccaagaaggcacttcccggacgaatattcgaccaacaacctcacgggagaaatgtccaaattcattctaattgcccaatccttgcagaataggttaatcaaaatgcctaaaagagtgggatttctaaaaatcaatgggaactaaggatatcaggttcatgtgatcttgttattgttgggattttaggttaatataatcatatttactaattaataaaagatcagaaattattttatgttacatggttcacatgattacattcatgattatatgtttaatgtataaattttattaaatcctaaacatatagttattcatgattatagtgttgtctacatagtggaaaataatcatgattatatacttcaaaatacttagtcctatgatttatcaatgcattggatttacactgacgtgataatcagtgataaagtttacttacacttgtataagtggtatgtccttttcaaggcattagtaaagtatactagtattggatgtatggagtatacatcggactagaccaatataaatattggataagatatcataaacttaccattatatctttctaagtcaatatcacttaattgatcttaggtcaatagatcttaatcatgagatggttaggttctggcttaagtgtattattcgtgttctttgacttgtttgttaaagttgaccaagtggatctttccaatactgacatcttggaaacatggtagtacaattgagtggaagcgctaatcatagatatgaaatctatagcttttataattatagaagtgaaacgataatttccttcgagcttggcttaacgcgataaatggttgagcgctcattttagtaattatattagtttactgaaatatcatttacaagtagctaagcgttttaaggataaaatacattaaagggtagaatggtaaatttgtccctacgatgtagatcatctatagaggatctttgattatttggattgaaataatgggtaattcaaaagcgtatctatttttggtatatagagctgtaaagcccgcttag

SEQ ID NO: 406246 - DNA, 618 bp, Cannabis indica
ttcaataaggtctgatctctacaagatatgtgaagacaggagaataattatgaaatatttttacgaaggttttgaatggagtacatattgattatctttgtaacaagctcaacatgattaacatctatgccccaatttaaaagtgagtgttaaaatattaactatatattagttgtaaaaattagggttaatagtatacatgattctattcattattctctataaatataaatgtaataataataaaaaagaaaatatgaaatcccatatacacggtaatttctcataattaaattcaaaactaaaaaatgattaattaaaatttttaaatagccaaggaaaaaaaaaattacctcatatattatttttttttttttaaatttacagtttggtttctaaggtagtttccaataacaatactctatttaaaattattattagttaaggtaccaaacactatataccgatatgacacgcgttacttgtggttagcggtttttaactatattatctagggtaaatatcattttggaccctgtgttttacaaaagttaacaatttgaccctctgtcttgttaaatgacaaaatagaccctgtattttctaaaatagtacaaa

SEQ ID NO: 406247 - DNA, 926 bp, Cannabis indica
tcaaagcttgcgatgagctttacgatataatgtacgttttagagccaaaatataagttttattttagtgtatttataccacggagtttggtaaaaaatcctagattgtcttacgcgagtgttaagtggtgttttgtgataaacacttattgatttataattgttatgacatatggcccaagattatcgatcattctttaagcaggttagccaacatacctcattcggaacttgaggtaagaaaagtataatgtaccacatggcatgacaggttctgaaattatctgattaggcaatgataatgtaatgatactatggacacaatatatggttttacctgattaggtaatacaatatatctggcgacgtaccaggcaaaggtacgggcgtcagtggcatatgatgagtaccgagcgtaggtacgagattgtttgattagacgatgctttatattagtgtcaagttgtcacacaggctcacctgattaggtggtgcaatgatattatatatgatattgcattatgacacaggcttgcctgattaggcaatgcaactatatgagcatatctatttctatgcgtatggctgattatattacctactattgaatgttatagtttaatcattttgtgatgataaaatgtataattagctatttaagtatccttctttattatgctgagtctatgtgactcacgggtgctttgtggtacaggtaagggcaaggcaaagttagaacaaccatgagatggcggtcttctcaagcaatgtacatattgatcccaccagcttccgtgttgagttgtcaggagttgttttagactagttgtgtctgctgtattttgaattgttgtgacagtcagtagtcccgcgatccgtaaggggaaataccaagtaagttgtgcaatcccacatcgcctggggaag

SEQ ID NO: 406248 - DNA, 813 bp, Cannabis indica
ggaaaaatttcgggaggaaaaagagtgtcattaatgtttgtctaaattaggtcagtaatacaattatggtcactaggccaccaaacatagtgccgatcgatagaaaaagcaaattgagcaagagcatgcgccacactattgttagtttagaaacacgaacaagagaaataacaataaatttattgcaataatataatatctctaataatgcaaacgaaaaatgaatgatcaataataagattgttgagggcagcaataactataagacaatttgattccacaatcaacttgccataccttgctcaaacttgaaccgcaagagcttaagacacaacaggttggaaaaggccatcaaaaaccatatcgtagaagccttaatcaaaccaaaaaaagtctcccaaaacagatcaaataccttttttagttatctcaatgacaaaccagtatcacaattaaccttaaagacattccaaataggtcatttgtacacagggaggtaaagccaccccttcaactagggtagcacattttccccatggggatggagccctgcggggacccgctcctaacggggcgggaattctccgtctaaatggggaacagggagggaacgaggattactttttgtccccgaatgttaaatagggcggggacagggatcacactctccgtctcgatagggccgcgcatttagtttttattttatatttctagtaatattttatattttataatttatatttgtatttttttaatatattagtaatctttttatgaattttaagttaagtattttagataataattagttta

SEQ ID NO: 406249 - DNA, 844 bp, Cannabis indica
caagtataatgcactttggctatacaactgtatagacagtagcttttcctttgaataaattcatctcttctagcaagccttgtatccatatcccttccttaatagcctctgttgcagctaatactcagattcagtggaagataaagctaccacaggttgaatttgagatttccaacttacaaagttgcctgaaataagaaatgtttaagctgtagtagatttctttgagtctttatcccctgcaaaatctgcatctacaaaaccttccacctcaatgttgtcttgacttttcttgaaacatagtccaaccttggtagtgatgttgatgtacctgagcatccatttcattgcagcccaatggagtttcccaagatttcctatatatttactcagtacacttgttgcatatgctaggtctggccttgtacagaccatagcatacatcacagaccccatagcatttgaatatggtacttccttcatttcttgcctttctttatcagtacttggacattgcttgttagacaattgaaactggcttgacaggggcatagttgcctttttagaaccattcatttgaaatttgtcaattactttttccaaatagtctttttgactgagaaatagctgattttggctcctatttctcttaatgttgattcctagaattttacttgcagcccctagatctttcatgtcaaatttagattttagaattttcttcattctttcaacctttgatttttctttgctaattagtagcatatcatctacatagagtagaagatattcatcttgcaatatctcagtgtctttgtagtacaagcatgtatcatgcatactc

SEQ ID NO: 406250 - DNA, 644 bp, Cannabis indica
agagcttgatccaagcaataagcactcttcatagagaacttcccattactattatccttccatatgatgtgatcatgatgagaagatggaattctatgaatatctagtaatttacttccccattccctctaccaaaaacttaaagtacaaccttcctattccactcgttgcccctagacaaatttgccaatgatttaattgtgtagcccctcgtacttaagctgtctattagactacaaaaactcaaaatctaaccaatgtatccaagattgcttaccaaactacaaaaatataactcattagttattttttttttttggatagtgtgtagatatcattacaaaaaaatatatatctataatttatatttataacctttataaaagtgacaatctttttgttcttcctatattaaattaccaaaaaattcttatttctcactcttagtttattctgttgaggttgattttatacaaaacatcctattattttttttaactaaattatctattatattgaataatttaatttgattcattaatgaactaaattttattcgaaacatatatataggggggctattatggtagagattgggtattttacctattaatagggatattgatttatagccctgatttaat

SEQ ID NO: 406251 - DNA, 716 bp, Cannabis indica
atgccttgtacttttcaagtactcagaatatgcttaactggcgtccaatgttcctctcctggatttgtctaatacctgctcacaattcctactgcatagcaaatgtcaggtttagtgcataacattgcatacattagacttccaactattgaagcataagaaacccttcttatgttctctatctcttgagaatcaatgggagacagttccttagatagacggataccagggtcagaaggcatcactccctttggtatttgtcattaagagtctctctagcaccttatcaatgtaagctatttgagagagaccaagaacataagctgcttcacttaaatatttcatttcgaattgagtgtcaagccattccttgatgtcagtcattctcttgatattgttgccaataatcaaaatatcatcaacataaaagactaggaatactaccacttgattatccttgagttggtaaacacaaggtttgtcatcgttttggtgaaagccataagtcttgattatttcatcaaaccttttgttccaagagcgagaagcttgcttaagtccataaatggacctattgagtttgcaaactttctcttcctgctctggaagctcataaccttttggttgctccataaagatgatttctttaagaatttcgtcaaggaaagttgtcttgacatccatttgtcaaatttcataatcgaaagcagcagcta

SEQ ID NO: 406252 - DNA, 613 bp, Cannabis indica
atgtatatgtgccacttatttgaataaaataaattatctgaattgaattgtatggagtattgaattttctgtattattattttaataatgacacgtgagagctacacttagtaattttgccaagtttctttaccttaattttttttagcattgaaaatattggtcgtacctaacgccttttagaagtgttgttttataattggttattgatactttttaaatgttattaataaattaaattatataagatttaatatttaattgtaaaatataatatataaaaaagtactaaacactgctaatacatattaatatttttaatttttattgatcatggagtatttattaataattaatagtatttataaaatataattataattaattctatatatatacatataagagttttttcattttatttatgaaagtgatgttatatatatgtaatgtaacgatgtatggaaagattttggccatatatgatagataggattagagttgttaaatatgtgtcgtatttttgacatagtacaaatttaacatgagtatgagtatgatgataggatttataaaacactcaaagaaatatataaatcacagatccaaacat

SEQ ID NO: 406253 - DNA, 1127 bp, Cannabis indica
atcaactcgaagaggagaaaatactccacgagctaatgatccagaatgtatgggaaccagtaaatccgcgagccactgaaggacgaagtccatgagcagaacaaggtccatgagtaagacacaatctacgagtaaaacgatgtctgtcaggaactactccgaaccagatctgcgagagcacttgaatcgaaagaaacctgaccttcgccaacaactcggtccaaagcaagaggatcccatccaattgcgaatagacgagttggaggacaagttcaagagatatcaagtgggggaactagggagacgatcttgatacgactcagacgaggagcttgagccgtatcacctatatatcatgaatacccctcttccttcgggatttaaaacctgcatgtctaattgtatgatggaaccactgatccggtcgcacatttgaacaactttaatacaataatgcgagcaagtaatgtaacgaacaatttacgttgtatcttgttccccacctcacttgttggagcagcaagcagttggtttaacaagtttactcaccattcaataacttcctaggaatagttgtctagggatttcaagaaacagttccatgctgctagggatagacgacctgaagcggcctcgctaaccaatgtaaagcaatagcccggcgagacacttaaggcatacttaagttgatttagcatggctgctgctaaggttagaaatttggatgatagtacacaacttacaacccttcaggcggggatctcaactgatccatcaatcgctgggggtgagctgtgggacgacttacaaggtcgtccaataaggaacatcactgagttcaatgaaagggctcaggaattcattcgaaaagagaagccgaaaaagaattgaatttgttgaaaacaggctcgggaggcaaacccagcaacgtttcgacaagtattgtctcaatgagaatcgataactcgggggcttctggctcgaagagaaaggacggttctaaggaaccatcaaaggataaaaagaaacagaagaagcatgataagtatgtgccagtgtatactatttataccgagcttaatgaaactcgggagaatatttacctcgcgcatgagcaaaaggttgcc

SEQ ID NO: 406254 - DNA, 695 bp, Cannabis indica
ctgccatcttcgtcatagatcgagtcgacattaattgcgatctacttagatcggatccagctgaaatgtccctgccgacaagatcgagagccttctccgatggtgcctgagccgagggagccatagatgtctctgttgatgagcaatattgctcaactctaacatctaattcctccatgagatgcactttaaatgccttcaattaagcatcgaagaatcgatcaatacgaagatccaactccatcaacatcttcgcaagctctgttttcttcatggctgagagttcttacagtgaatctttcattgtaattgctctcaatgaaagcaccaattgttagataatagtcctcttcgagacaggagaaatctcttaaatgcactcttcgtcagtgccaaactcccaattgaaccaaagttctatttactcaattcatatcccataatagctatacaattacatatttatagtaattcacaccatttgcaaattattaataaacccctacactattcactaaagggtcacatgacagaaatagacttttgttttaggaaaattcacacctatatacattatgttaaaaactaaggatttttttcatttttacactttaaaacagtttttttatatatatattgttgtcctcaaaagtgagtgttttaatatttatactcgcaagtgcacgaatcgtttc

SEQ ID NO: 406255 - DNA, 532 bp, Cannabis indica
aagcatagtcagcatccacgaatcttttgaactccagttctctttttgctttctcataggttagaccataatccttggtggaatttagacaaccttacattgattgcagcggaataatatgactccttccgtttagatctctagcccttgattcctttctgtcacagagaattataaagttttaaatctagatcaatttttctccttcaggtttggttaccaccgtcttctgcactatgattgaatacttgacttgctatgtgtgggcatggcactctattactataggctcgagtatgaagaacaatgaaggaggcaaagtcactatagaaggaactctcatctattagttgtctgacagagaaaactaggtttggtaggttgaattaggttaagttggatgagatgagagcctcatgttcttttcatagtattttgactagggcttaggtttaaattatatggactgaaaaagaataaaatattgggcaaaaaaatcacataatggatggccacttaagggaccattctc

SEQ ID NO: 406256 - DNA, 934 bp, Cannabis indica
taaaaactaaaaaaaaaaaaaaaaacttactaaatacttatgcaatatgagtatgattaaatgaagaagtctaacacttgaatatttaggaaccacatataatttctaccaaataagtggtgcgtatcaagtttggaatatttttaatttatacaaaaagcaatgtatttcattccaacacaagtcgtaataagttattattagacagcaacagcaatgacataaatataggttcttgaattaagatctccaataaaaattagtgttgtcctattttgttaaatttaatttaaatttaactactttaattaatttaatttacaattaaatatgctaactattttattgattcaacttaaaatttaattttttaataaataaaatattaattacgtgtaaaacttaaatttatttaacaaaaatatgagatatctattttttattagggatcttgattccttatgttttcttatattatgtagtttttgtattttgcagtccttttcttttcttgctttagctttagtttcttattgcgcttggagacaaaagaccctgttattgtttctttatttaaacatctataagtaaagatcacttaacctataaaaatgtttcccacgtattggacaacatcagggtgtggttttttttttttttcttaatttatttatcttgacaaaatgacgtgctaattaaacaaatatttcataaatacagctgataataatgtggaaaacgcataagtacatccacttattcatttcttacactacaagctctttttttgttttttttgaaaatcttatacttaagcatgttcatccgatccaatccgcacttttttggtcaaacaacattcaatccgcactacgtgcggatttcatattttggatccaatccgatccgcataagagtttaaatccaatccaat

SEQ ID NO: 406257 - DNA, 762 bp, Cannabis indica
gtaaaagtgtgtagtgaactactgtacacaatttcgtcaatatatatagatgcacttttaaagagtattacccatgaatgtgtaaaattagaaaaaaaaattaaatttttatgcttaatttttctatataattagaaaaatctctcacttttatctcatatgggctgagatggtctcatcggttgaaaaaaaaaataaaaaaaaagtttttagtaaaaaaaaataagtaaaagttagtttcacttaaatattttatatgaacatatttttgatataacataaaaagagatatttgttgatattttttttttaattaagtagttaaactaagcatagaaattcaaatttctcttttattatttattattagatcaaaatttgatgatttaatattttaaaattaatatttatagttaaattttttagtaaccattcatggtacgtaatactcattaagtagacttccaattatttttaaaagtacacttacgatttggtatatttttttattattaattaatataaattataaaaatccataaaattaaatatatgaagttgatgcattttgtttaaagaatattaatgaagtgaattatatttttatatataaattataaaaaattaataaaacaaaaaaaaattaaggaaaaaatagattgaggtatttaaaaaattaataaaaggagagaatcgaagagaaaatagattaattttaattattaattattatttattaagatttttttgaataattataat

SEQ ID NO: 406258 - DNA, 994 bp, Cannabis indica
atttattttgttatggaaccagttctgtttatatttatgcctcggtatttttggaattgatccccatgtttttctcaaaaaattataactggttttataaggtattacgtgttattcatttttactcattttgttatggaactagtttttgttttttatttatgtttcagtgttttaagaactgattttctatttgttttttagctataaccgatttgagttattatgtgttatttatttttatttactatgttatagaataagttctattttaattataaccagtttctgagtagttgtttgttgtatatttttagttattttttgtagaatcaattctatttaatttatgcttcaatgttgttagaacccgatttcccctttcttttttttttttaattataactgatttgagttattctatattatttgagcataataataatcagtggcataaaaacaaaacaatgattattcaccctataatctagtaatctcagcatgaaacccacttccatatctctcgaccacttaaaaatgaatgtcagttctccgtgtaaaataaaaacctcctaccatacccatagaagagatacaacaaacattcacaaacactaattaagccataacttgcttcataaactctcaatccatctttatttctaaaagaaaaatacatctacatcttctcttctaattaggccctgaagagccttctctgttgcctcctgccaaagctgttttgaaaattatatacgcaagtatacgcagtcaaacaagtaataaagtgataagtaagatcgtctccgcagggatcgcaaacaaagtttgatgtaaaatcaactaattaaaacttaaagtaagaggaaataatacgcaaatggttgagtaatgattcaaaattaaaaatgacatgaattaaacttgctaaaattaaaactactgctgctagaaaaattgtttgcaagataaaaaatataatatggcaaaaatg

SEQ ID NO: 406259 - DNA, 936 bp, Cannabis indica
tttcatctatttattatgtatgcttttcttgacaaagagccgtaacttttcgtttgaatgttatttattaatgcatgcgttatttaattgttcactattataattcatgcaaatacaactagtcaatatatattaacaataaaaattataagacttcccaccacgataattgtagcttagaaatataatttttccatacattattgttacaaaataagtaattttaaaataaataaattaaatttaaaaagttaaattaataataaataaaaataaaataaaagcatgtctttgcaaggtagcaattcgatcgtttaaaatgtctttgtacgctcttcataattatctaaagttgtaatagaccatcaaatttgaacgagatcgacagtaaatcgagatcgttctaaatatttttttagttggattttttttatctatttatagtatatatatatatatattatttggaaaaattttattatttcaatttttttagatattattattattattattgcatgggcctattttattgttcactattatattttatttaatacaaccattaatatatattaacaaataaaaatttaagactttctaccacaataattacaaactttattatttttttatagaataagaattgttccatattagtaaatattaaagaaatttaaattattgtttggaaaaaaaataaagaaattaaaattattaaattaatgtaaaagcttaaattaagaaaaaaaaagccccatgtcttttgaaaggaatgaactcatgtcattacacttaatataatataagtttaccacttataccataattatattattagttgtattgattattgtaggattaaataacttgaatattttgtacttttctagctacaattattgtgttaagtagaaaataaaattaattaaaaat

SEQ ID NO: 406260 - DNA, 792 bp, Cannabis indica
ttatgtatgttaagccaagcttataggaaattatcgtttcacttttatatagttatagaagctatatattccatatatatgattatcgctcccactcaattgcactaccatagttccaagatataagcattaggttgatccaagtggtcagctttaacgaacaagtcaaagaacacaaataatacagttaagtgaaacctaactatcttatgattaagatctattgatctaagatcaactaagtgatattgacttagaaaatctataacggtaatgatatctttttcactgtcaatatcggtccaatgtatacccaatatatctgatactagtatactttgctaataccctagaatgaacattctacttaaataagtgtaagtgaactttatcgttgattatcacgtcagtataaattcagtgcactaataaatcatcggactaagtactttaaaacatataatcacaattactttctactgtgatgacatcactgtaattgtgaataactatatattctggatttaacagaaattttatattaatatggattggtttaccatcgttctttcacattacattttttcattatattgtgtggtaatagagttttatttttttattattttttaggttgctttgtggagggtctacacttatagagaatttatcgataagtttaattttaaatataatctgtttgatattgattttcaacagttttaaattagggtgctagcacattgttactagccaaagggtaatacctttagttagttatacttagaaatt

SEQ ID NO: 406261 - DNA, 707 bp, Cannabis indica
taactattgctacattagtgtgttatttagatatcattatatgtacgtattttttaaatttttaaaattttcttaattagttaatgtatttgataatgcaaatgtggtaataaactatattcttaaccaaaactcacataattgtgtctgtatataggttggattcgtaaatttgatataaacgttttttattcctaaactttacgaaaaatatagtgtgtaaatcggtttaccataataaaatggaaagcaatcaattccttattacaaccattttaattaaaaatataaaataaataatagtaaagttaaaaatatagttaaaatatttataactagtaaacatcccgcgtttcgcagtggatatataaaatattttaaattatatatataaaaaaataaattgtggattttaattaataataattacttaataaaattatatcaaaattttaactttactgttaaaaaatttgtgacataaatagttaaaatattaaatttgttgctaataaataccgaaatttgaaaaatagtaacataaatctacatttacggtttaatttttattcagatgtgtgtgttaagttctgggttcgaattttatttgagtgtctatatataggctgattcgtaaatttgatataaacgttttttattcctaaactttacgaaaaatatagcgtgtgaatcgatttaccataact

SEQ ID NO: 406262 - DNA, 619 bp, Cannabis indica
tttaaaatgattacccctttttgctactttcctataaataccaacatgcatttgtacgcaaactcattttcaccattcttctttgctaagtgagttcagagcgaaaagagaggtttttggcttcaactttgttggagtgccttcatcgaaactgcttgttggtttgacattgcttgaatccaaacacctgactcttgagtaagttctcgatttcctttatgtttatttttgcatgtttacttttttgaatgcaccttcgactttgctgtagaaaatacataggaaaccctaagtttagaaactctgcgattcttatttgtcatgggttcatgcgattttacagtccataatgcttgctttctcaattgcataatgcctgtctttcatcttgcttattgttatccaaaattttgcactctgacgtggcaccacgagaatgatgacacgtggagtccacttagaacatctgctcgggaaaataggccgagcaggatgcctcgctgacagggccagagcaagatatccagcaacccgcgcagagcaatcaacacttagtgaattcagcttttgcatcatgagtcatcagctcaatccctataactcagggatcaatttacgt

SEQ ID NO: 406263 - DNA, 1363 bp, Cannabis indica
ttggggtggcagaccaaagcaatctgcttggctgaattggttcgcaacatagagaagaagaaggtgaatgtgtttctaaggcaggtctaatctattgtgtgtgcagcgttagtgtaccaactacggagagctcaaaatgaaaaaatttggcagcaaacaaatgatgtcccgagtattattgtacagaaagttaaaaatgtatgtaagactagaatccaaagtgtatggcctagcaaagtgtcgatagaagattcattatggtttagtgaattgtaaaaattagaaagaaatatcagtcctttatattaaaggtgttgtacaagttgtaaaaaaattattggagttatgaattacactgctgatttcccaaaaaaataaaaaataaaaaagtaataaggcaaatatcgtccatcagatcagactttagaactacttggatacgatgatattatttttgtgggtgatttcaggttatataaaaccttcaataattattatatacattttgttaataaagatcatagtttttagattatttatgactactctttaaagggagaatctatttcggttgtttaattttagatattgtaagcaaatggcatccctaattatgaatcactacaacaacgtgttgtgtggtgtagtggtaggtgttaacgcagatttttgttaatcaaatttaagcctcacggtaataatttcacacagaaaaaataaaagctatagaaaaataaaatatgaacacattatttttttacgtggttttgcagttaaaattctgcatagtccacaagtcaatcttattcacatttctgagtattcttttagagcctctttcatatgagttttttggttccccctcttgatctcgtctgccaccatttataattacatagtggacagtaatttactaaagttggcaataatcgttacagcgattattccctcaaatgaggggatttgattacaaatcaagctatataaatgaggtttttacatagctgtgaatatcccacttttattgggccgagatgaacgcgtaattaaagatatacgttaagccttatctcatagggatgcctcgctgagaatggagccaagttaactttgatagcgagcagttgcttgtcatttggcttcttgagactaatattgttttaactttgataacaatattttttggtgtcgagatgaccttccttgcatacataccttcttctagcgagataaatgcctcgttgtctgttatcttgactcgccacactatctacgctcagtttgtatatcgtataatatacgctaagtgtttttagtgttatcgtttctcttccacgcaagaggttgaggcctcatcatgcac

SEQ ID NO: 406264 - DNA, 551 bp, Cannabis indica
tgataagtggtggtagagctaacttcattatacattgtagagatgactatataccttaattttttatagttcatatatacttttgttactctaatcttaattaataaagcaaattgtgttctctttttatttagtttgatatgatcatagtcaatgaagggttggtttaagagctaaataagtttttttaaccaaacgttttaattaagtggatatacatagactgtggtttgagctatataaatataaatatatatattaataaaaaaaaaaaaaaaaatgtagatggggccaacaagatgtcatacggcttatcccacagtgtaattgccaaactaaattgttataatgaagccattaatgcttatagctagctttgaagcactacaataatttagaaaaaaaaataattaaaaaaaaccaaaacaaaatgctagtggaatgtaaatattgtggatgcacataaattagttgtgcacaggggcggacccacattgtagcgagggggggcagtcgcccccctgaaaaaaaaatcgagaaaaaaatgtata

SEQ ID NO: 406265 - DNA, 398 bp, Cannabis indica
gaagcaagttctattgtcaatcactgacattttaacctctacccccttttgcatccaagtctatgggattccatttcttcacaaaccttacagtgggtgcaacagaattaaatgactcattccactcagatatctaacccttgtatcctttctgtagcagagtatcaccaagatctgagcccgatactccttccttgttccttgtgtttggattcttcacagtcttacatactatgattgaggaccaacttgatgtgtgtgggcacttactcaatcactaatggctgaatattatttggtaaagaaagactaagtgtttcgaattgaagaagaaagaagaaggaagaggtctcatcaaaattaagctaggttattagctttggaggcattagtttgga

SEQ ID NO: 406266 - DNA, 917 bp, Cannabis indica
atattaatccaattactattgtattaaaaaccttaagatttttatgttataacactgattcttaaatttctttttatctttaagaataaaaaaactaaattaacttgatttaaatatattaaaaagtaaaattatgaataaattgttaacttttattttatttgaaaactttaatttctcatcaaaacatggaacaattaattaaattaccctaagtaattagaggcaagcaaaaaaaaaaaatagacgcaacagccttaaaacacatttaagccagcaaaattatggcgcaacaaatcctcacaatatataaaagtttgattcattaaatatttgactaataacaataagaattacactagacgatcaaccaattaacaatgaagtccactttcgaccttttaatcaaagactgccaacttttattatctaccctcccaaatgttaattatttttcattatacgatcagtaaaccgagtagtacattatgttgctagacattctcagtatcaatctgatcgtaccatttctgatatttctaattctggtgaactcttacatcttttgtattcagaatgctaaatagtagcataaatctttatttatggtttaatttttattctgatgtgtgtgttaagttctaagttcgaattttattgtgtatttttaatgtttgaattttagtgttttactaaggttctaatatttgagtttgtatttctgggatctatttttatttatttatttatttttatagattttgagaactttaaatttgatgttgtttctatttattattgaattaaagtttgccttttcgttttattgattgaaaaatattagtagaaagtttatggaataagaattttgaatatatgaaaatagaattgaaaaatagcattttaatcgagaatca

SEQ ID NO: 406267 - DNA, 909 bp, Cannabis indica
tcgaaagaaatcacaatatcattaataaagacagctacggagccattgaatataaaaaaaactaatttaggagtatccttcctccgaaccttcaactggtaataaccagatcgaagaccgatcttagagaagatggtcctttaaaattaaccaacataacatctatccttaacaaaggatactcgttcttcaccgttaattggtttagtctcccagcagtcaatactcactcatatgatttcatccctcttcctcataaataaaacccactcaaacttgatatttcaaacctaatatttcctgtaacggaatattcaccccttttcaatcttacagttaccattcaatttaaaactttggattcaggttttactcttagtatcaatttaattcaaaattaatttcctatttcatcaataatcttggtagctcttctaataaggcatctagaagcccttgagccacaaaattgtgtcccaattacaccgatgttttctttgcaacatttgccacactaactgaagggttggtacatccatcccataataaatcttcaaccttaagcgtcatgaccaatggatttcgagacctttgatccttgctcaagaacacgaaggtcctcactttctgattcaaaagttaccatcttccctttctaatcaatatttgtaatacactttacaaattaatccaacactaggcatttactttcatgaatctctttctcttcatattatttcctttgtgatctaatccatgtaccctcaacagtaagggttagctcaaccacctgagcataaaactagaaaactcctagttatttagccataatatctacattctgaacaatatactcgttccatcttaaagccttcctagcggccttagcagccgctacattttaacaaa

SEQ ID NO: 406268 - DNA, 637 bp, Cannabis indica
tagatttcgggaacaaaatccttggtacaaactggttaaccagtttcacaggccctataaaaccgattaaccggatcaaaaaccaatttcctgaatttttcgtgttgtcgattcgtgttagtttcagagctttggctggttgattccttgacttttagggtattgccatgtttttttatcgatagcaatagcgaaacttttagtttcaagtttaagtccccggaaagttatttagcatgtcgcgcactcaccagttttacaaataatgtgatttaggggcctgtaattcgtcgagcagctgttccactcaggttggccagcacacctgaattcgaaaacgaggtaagattagtataatggctgcatatatgtatacatgtttagcgtacatgttagttgatgtcagaataggcaaatttatagccatcagattaacatatcacggcatcggtgaggtgtacatagagttgcacagagatgccaacaaatatatgctaggctatcagataatatgagttatctgctaccacattagtacgactagagtactgagtataggctggattcgcagttagtcatactttgtctagaatgttcttgactcagttagggtatgattgggtgtatgggcacctga

SEQ ID NO: 406269 - DNA, 480 bp, Cannabis indica
aacggactagaagttgcataaaaattgaagcttagacttgacttgaaaagatcaaaaggagaaaggatcacggggagtatgatagacttcaagtagtcctttcattttgggaaaggaggggttgaagatgtgccacaccccaagtgatctttcttgcacgaaaaaaatagtgcacacaagagtcatgatgaatttttatgtagtaaccttctacttctaggaaggaaggttgaagttgcataaaaattaaagcatagactttgcatgaaaagatcaaaagaaggtagcatcacggagagtaagatagactccaagcagtccttccatttttgggatggaagcttaaagacgtgccacacccccagtgatctttcttgcacgaaaaacatcgtgcacgcgagagtcttattgaatctttatgtagaaagcttcggcttccaggaaggaaggctaaagttgcataaaaattcaaggttagac

SEQ ID NO: 406270 - DNA, 539 bp, Cannabis indica
gtccttagcatacaatgaacaaaactaagttaaaaagtcagatcggcttaagaacaagtaagcaaggtgctcatctcgctatgggaagacttcttataagcttcatccaattagcgttagcaaggacctacaatcctggcgaaccagagtataacattcaaatgagcctcgaagaactctttaagaactgcgatcgacattagatatgcatcgtcaacttcagaaggaaaaatggccctagcttgctatttagatcactaaaaccaagcttctgtcgagacatctccaaaaacgatagttaaagacgtgatctaaaacacgatcattttgacccagtaaaagcgagaaaatcacagctatacaattttcaaatcataaaccgcatttacactgcatgatatggaatcaaatcccacgattttaaggatgattattgtaaacatattacaatcaactttataatttactgaccactatgtaattataaatagtggtagacaagatcaaaaaaatgacaaaaaaactcatacaagagaagc

SEQ ID NO: 406271 - DNA, 706 bp, Cannabis indica
gagtgtactagtaaatgacacataaaagcttaatgaaatgctatttcagtgtcttctaagtactagttctagttctaactattgggtttcttagttattggctgatatgactctgtttgtttatgaatgtatttccaaataataataataataataataataataataataataaaaatgttagcccgtataaattctttaagtttttagtttaatacttatatattatatatttttttaatggattaaatattatatgttaatgttatgtttttttgttgcagttattattacaaactccactctaagtgttgatttaattaagtaaaatgccacgtatcaatatattagtgcttcaacttatttttatgtttaaaaaatcattaaataatcttaaataaatacaataagggggtgtttagaatgggttaatgctaacaagggaatggtaatgtgaaacattaccttgtttgttttgagtcttagtattataactactcttgaggagggtaatgttgatactttaaaaaatggtaggattgaatcattaccttctattatattaatttgaatagaattttttaattaataaataaatttaaataccaatattattatcatttattataaataaaatattacggtatatatttagtttgtgagatcggttttttttaactgagttatttttatattattagcaata

SEQ ID NO: 406272 - DNA, 787 bp, Cannabis indica
gcacttgggctcatgcatgaccataataacactttgcatcatgattaggaggacctctaggcagccataaaccttgcattcgacgagcaatgacgtcaatttatagaatggagggactgggagatggaaattatgagggcattacaggcagccattgatgatcgtactagtcaggccaccttgctgatatgaagggcctaccaagtcaccaattaacaactggctactgcatttagtattcctttaaacagataaaaaaggtgtgtagctaggcatactgcacaaactcacaatgatcaacagtccaatttaaggccacaagtccaaactataggccaaatggtagacggtcagatcttgccagacaatcttttaggaggaatcacacattccaacaacttcaccactaccgaagtctcatgccaacttgtatgccaaacaagtcagacaccaagtgttggattatgttttaccaggatctagatttactaccatgtatgttatttaacatcctaaacatgaatttctaaaacaatgttatttaaacacatataaagtttgagaaaccttacagtggttgcagcggaattaaaatggctccttccgctcagatctctaacccttgaatcttttctgtagcagagtatcaccaagatctgagcccgattctccttctcttgaatttggattcttcacagccttacacactatgattgaggaccacttgatgtgtgtgggcacttactctatcaccatagggttcgaaattatgaagagaggaagagag

SEQ ID NO: 406273 - DNA, 687 bp, Cannabis indica
ttttttatcactactaaatgtatgtttagttacaaacttgttacgactataattaattaggaaacaaaccgcgcgcttgcgagcgattgtattttatttaaggataattaagttaacgatcaacaaatgtagcggctcattcctttgcaaaggcttctatatctcaccctgatcgccttttcaacttggacactgttctaattaagctgttaccgagtttgttaacggagttattcatttaataaataatgacttcaattttttttaaaaaaaaaaattataaaactgtacacgtcaaaaaaaaaggttatatataaaattgtatataattttaaattttaattttttacatatatatgtatatttttaatagcataagtaactattttactaaactttcacttttttactcacataaaaattcatcatacaatgataatcatcgtacaaaaaagagatttaaaaaataataaatgtatagaaaattcattatatgattttaaagcccttgtcatcaccgcatcgtaattatatatagtcaccactacattcaaaatctactatcattatcgtatctcatttatatagtcaatacgctttgcttcgaactcaccatataactcttaatctaaaaaatagtttatagaaaatttaacttatattaccattacctaatccaaaaaaaaa

SEQ ID NO: 406274 - DNA, 767 bp, Cannabis indica
ttcatgttcaacttctaaagtcgttgtaggaattttaagataggattttactatcctgcccctacaccaacaaaacaaacaaatcaagtattaaggtcaattttgacctttccctgttcaaagacttttcaaagtctgaatacccaaaacgactccgttttgtatttgaacaaaacccaaagactcgagaatcttctcagtcactttctctctttctctgtcttctcttcgaaaccctagcagagagtttctctctgagaaactcgaagctaggtttcaatcaacccagaaaaacccagattaaacacaaaccagagatcagatctagaatgatctgatctaaacacacccacacacacaaaaccagaaagattagggttagagaacaccaatatttttcccgaagttcaccaataaattggctacgtctccgtttgagctgctcctcgaatttgagagctcgattccactatcaaaatgtttcagacatacaacaatgaagattccaagtcacaggtaacaattttagactggtaatctctatttaatacatgtatttagtgtttaatccctctctctctctagatctaactttctgttgtgtttctgtgcatgtacgagcttggattcttccttcttcaagtcttctcaccctggatcttgaagaactcactcaaccacccagatctggttgttgcttgaggtatatatagatctagggtttctatttttgcttctgaatgcattagttaggtagttacagaaat

SEQ ID NO: 406275 - DNA, 506 bp, Cannabis indica
tgtgttgtagctgtgttcattgtattattgaacattaatgagatttttgatatttgttcactgtattattgattgtagggtgattatgattcattagttttcattagtttgtaactttttaaatttactttattattattttctatataaattttaggattagttttgtaattacatgtagattgaatagatagcagaaacagatagtgaagtagttattattgataatagcgaagcttctgtttggcctgaaaaacatgaagaaatttttattgaacttatggaagaagaagttgtgaagggaaataggaatactacaacttttacaaagcaatcgtggaagcgtataaaggaggagctttgtgcacaagcaaagagaagttatactgataagcaactaaggaacaaatataatttgttaagacaaaagcacaaggatttcaagtctttactaaaagagactggcataggatttagtgtagcgactggacaagttactgcgccag

SEQ ID NO: 406276 - DNA, 528 bp, Cannabis indica
tattaacagttttacacatatttattcgtgtaggaaaatatttcatgggatgcttgtactcatccacgtgggatacttggattcaggcaacgacgacataccggatgatttgaaattcatcatattcacgtaagttctatatccaacatcccaatatttaagtgtgttctatatttataaatttatatatatatgctaacattactttttgtgtatatggttcactatatataattaaatgataagacggcctgatcgacctatctagtggatgactcctatataacctgaacaaccggacgacaaatagtgtggatactacgtcatgaaattcattgaaagtttcatgaccgttgaagatccaatacacgtgttgacacaagatgataggttctccattgcgtacacaaatgacgagattaatgtaatgcgtgatcggcggattcattacatgaaagcaaaagcggagcaacaacagttgtcgtacgtgctaataagtgtgtgtatatctcgatttattgttactat

SEQ ID NO: 406277 - DNA, 847 bp, Cannabis indica
ggtttattgtttagggttgctattggggttggggttttggggttagaggttagaggttagggtttggggtaggggtagggtaggggtttgggatcaggggttcaggggttagggttctgggttcagggtttagggtttaggggaatgggaatgagaattgaataaaatgaaatttaaaatgcataaaaaagttgataaaaatcattaaactttttttcatgttacatgataattgttgttccttccattatgaaatagaatattcattccaccaaaatggtggaaagggcattctattgggatgacattctaatactttaaaaaaaaaaccaaacaaaagaatagaatgaaacttatttctttttcattccattttcttacctctaacaaaatgccacctaagggtctgtgttcaggcattagggttcagggtgttggggttaggatttggggtttgggttttggcgtttaggatttagggtttagtgttttgcggtttaagggtttgagggtttacgggtttaggggttttttgtttagggtacagggttcatggttcagggaatgggaattggaatgaaaataatattaaatttcaaatgcataagttattgataaaaatcattaaatgttttctcatgttagtctggaatggtatttccttctattataccttcaaattcggctggcactatagaggatgacgcatgttaaccttagagaatacgtatcaacgaatgtaatggcagatattaattttactctaagacttgaatatgaagattggtttcgtgttaaattttgttaaaaatggccccctaattcaaaattgaaaatattcttctat

SEQ ID NO: 406278 - DNA, 688 bp, Cannabis indica
  modified_base (663)..(663): a, c, t, g, unknown or other
accccatttcctagatcctcctagatgggtaaaaacaagttcagattgttagatatgataccaaatgcatggttttacaagttcaaagacatgagcaaaacaattctcgtcccaccacaaagaaaaagctcactccattcaattgtaaaacccagccagcaaaaaccccaactttctcacccaacaacacaccctttctttaccgacaacacatcattctcttcctccaactcaacaccccatttcctagatcctcctataaaatcatccaagaaaatagctagaaggaaagcaatctccataccccacaaacacccgagcccgaaccgatttgtctcaacccgagcccggttcaatctctagactactctgttttcggaacagagagttgttccgagacaaaatttcactgtgatgactatgttaggtccgacccttttgtaggcttagcctcttggtcaagctcctgtaactgtagctagagctagagcttcctccaatcttaacaaagcccataaatttcaacaacaccatctttcaagccactaagtacagaccgaaagtcaaagaagaaagctttagggtttgtttatttttttgaaggaattgggtttgtttattgggctgggagggtttttgtagaaaaagaagaagaaagatganagagaagaagaagagagagagagag

SEQ ID NO: 406279 - DNA, 775 bp, Cannabis indica
tttatgagaaaaaattattacaaactataagtataattacctattttaaaaatatatgaatatatacatataaatatatacaaaaaaattgggagccctgcctgttgaagtttctagacataattatcagaatcaaagaaaatcaaagagaagaaaagaaagagattggcagaaaataccactacaagaaatgtcacttttattaatacagtttgttactacattggtaaaagtaattttaccagtgcatttcacaaactgcgttggcaaaaaggtcaaagttttaccaatgcatatttacagtggctaaaatctaacttttaccaacacatttatgcgttggtataagtataagtgttctatatgggtgcactcttaatgggtattacccataaatgcgtaaaattagaaaattttgaatttttatgcttgatttctctatctaattaaaaagaaaaaatctcttatttttatatcatataggctgagattgttccatcggtaaaaaaaaattaataaaagttttttagcaagaaaaataacaaaaaaaaaaaacgttaagtttgagtttaaataatttttgtatgaacatattttttgatatagtgtaaaaagaaatatttttttaaaaaaaattaaataagtagttaaattaagcatagaaattgaaatttgtgatttcattattcgctattagatcaaaatttgatggtttgatatttttaaaattaatattttacagttaaatttgcttagtaactattcatgggtaata

SEQ ID NO: 406280 - DNA, 506 bp, Cannabis indica
aatgatgggtaaatttgttaaaccatttgcttgctgccccaactagcaaggtagagaatataatgcaccgtaagttattcattagattgctgggtcgcatgatagtattaaaattatcgtatgatgagacaagggggtttagatatccttggggtaatttagcactcatatatctgggtggaaaggctcaggctcctcgtttgagtcgtaaagtttcccgaattgcccatcttggtatctcctgaactagtcctctaactcaatgatttgtaattggacaggatcctcttgcgtttgatcgagttgttggcgtaagtcaggtttcttttgatttagcaaattaggaagattcggcttttgtggatcatagttacttacaggcctcgtccttgagtaacttttagttctagttgtgcccatactctctccatcggtactgcgatgagttctatcccctcctcgcgtagattgactatgagttcttgttgttggttttatgccctaaa

SEQ ID NO: 406281 - DNA, 542 bp, Cannabis indica
ggtaaaataatttccaacagttaggaacgacattagtttggagttaggcctttatgctgttccgaaggatacccccattgcagaggagtttgtggacaagcttcccactcaaaaaaaaggtaaataactggttattttttatcctatgacttccgtgattttttatttgtttatttttgcttaaataacgggttctgtatttttatttgtttttgttttgttttcagtgactgcggtgtatttgtgattaagtatgctaatctattcatgcagggcaagattaatgagattcctcctaatatggatgacatgattacgacctatagggatgacctcgctgtgtcattgtataactatgcccaaaaaaaagattaatgaaggatattcgactgaagataggccgaagggaaagaagtccaagaagaagaagttagattcttgttaaatatttgtattgttttttggacggatacggtgtttgtagttttgtttagttttttttttattttttggaacaatacattatgttatgtttatatttt

SEQ ID NO: 406282 - DNA, 592 bp, Cannabis indica
aaattgtgccacgttgtttgttgtgttcacgtggacaatccaatctgacagttaactactaaatttgaatggaagtgttaaattgctaacagtttctaggttttggggtttacccagagtaaatttgggttttgggggtttaatgaaaccaaaacgaaagtatagaaattttgctgccatttacatattttaaatacatatatggtggagtgttttattaccgctggctttggtgaacagtcatattttgtaaatttgtaggcttgtaaattgtaattaattttagtcattttgtttctaaaagtcggttgctttttctttaatttttttttactttaatttttattttgtaaagtaaactaataaatatttgtgatattctatttgacaatatcgttttttttattattatttattcgtgtgaagtgactaatatatatattatatgggtgattctacaagtactctcttaaaagagatgtactggtgcacccttaatttgtttcggcatccacaaaaattttttagtctaattttttttcatattcatgtacgttatagcaatttaagatatcctacaaaattttgaaaa

SEQ ID NO: 406283 - DNA, 737 bp, Cannabis indica
gatcataggtctctccatcttcaattttctacttctcctaacggtttggcacctgttttgaagttaaattagtccccttttcaccttgtgaatgcttgggccgtagggagattaattgtttgccggtcttcgcatgattgttcaggtacaagtgttgactcattaataaaactaaatttaatgttttatttttaatatatttatttattaattaattcactataaaaaagaaaaaaattgtgtctaaacatgtaaatcatcatttttatattatcactaaaaagtttatggttaaaaatattaattagtcacaaaaattacaattcgttctcactaaatgtgtttttaactgcaacacttataactaaaacgaaattaataatatcttatatttaaatactagtttttagtgacaagtaatatttattgtgactaaattaaagtgataacaaaaattctatatgaactaaaaaattatcaaaatgtagctattttttatagtgattatcatatacgattaaatagtttaattaattagtgatctcctaaattaaataaaagttagaaaaaaaaaaatagaaaaaaagtagagaatttaaagtagtcttaaaaaaaaatttataatgtataaaggagatatatgaagtggtgaagtggcaatttacaatctctctaattagtattatttattttttctttaatttttcttatttttttaattttttattagtttttat

SEQ ID NO: 406284 - DNA, 753 bp, Cannabis indica
acccctcgaacccacagccacccacacgacccagacgaccagtcgaacccacggcgaccgaggagacccgcgaacccacccacgactggaaaaacctacacagacgtcgaacccaatacccaggtttgttctttatttttttttaactttaaattcacaatctgcgaaaaacctgaaatgtatttgtttggatttatgaattttagagtttggggaagaaactgagtttagggagatagattttggggggttttttgattttgtgcgacattgtgcgatgtgtatgcgatatgtgtgcgattagtgatacaatttaaggtctgtttcgttgtgggattgtgtgtgcgatttctgtgcgattatgtgcgattatgtgcgataaatgactactgtatctgcaattgttgaatttgtgcgattttgctcgatgtcttgtgcgagtttgtgcgatttatgactactgtgtctgcaattgttaaatttgtgcgattttggtcgatgtcttgtgcgattttgtgcaatttatattcaaatatgttgccagccagcaaacataattaaattatttctggtagtgcgatttatgtgcgatttatgtgcgagtttgtgcgatatagtatgttattcagtggctgttatgtgatttctgtgcgatttctatgcgacgtatatgcgatttataatctttctgtttgtatttgcagatggctccagaactcattctccccttggctgagcattttcctgagcgta

SEQ ID NO: 406285 - DNA, 623 bp, Cannabis indica
actcgaaaggaattgaagcgcacgccggggccgtcaaacacagcgaggtttgggaagttactcagctcccagctcagaggccccgactcatggatcaaccgattacgttcacagaagaagacgcaaagacggtgcgttttcctcaccatgaccctctggtcatagagactcccatcgccaacaagattgtggctagaatcctaatcgacaatgggagttctgtgaatttgttattttaagaagccttcacagcgataggcctcacagaccgggatcttttgccaagtggttcccaactcacgggattcaatggaacaacacttatcccaataggaaaagtaaggctgccagtcactttgtgcccggacacaccccaaagcacttttaaatactacacattcgtggtggtagactgcccgactgcttacaacgcaatcctcggccaaccgaccctggtggacttcggcgcagttacgtcgatcaagcacttgtgtctaaagttctctaataaggaagctggggtagggatagtgaggggtaaacagggagaggccaggcagtgttataatgttgccgcccacctaccaatattgatggtccgtgaagttattgagccgggaacg

SEQ ID NO: 406286 - DNA, 272 bp, Cannabis indica
taattttgatattttcttatattcacctgcaccttaatttcatctgagaaaactatcgtaagaggactaaaataagcataaaatttagggtgtgttcgcttaagtacattgtcacattaagtatatagttatataatgaatatatcgaaatacatggaagataatatttgacgtataatgatgaattatcactatgattcatatatttattatgtaatgaggaatgttgggtttaagagataaatctaaatacggaccaagtgagagaatat

SEQ ID NO: 406287 - DNA, 1290 bp, Cannabis indica
taccgttttttttaagcaagttaggtggagcactttgattggtatttttagggatttatttatataattacatgattacattttaattaatacatgttttatgtagtgttgaccttttcagtgttataaaaatctcaaaaataataatccaataacaatttctcataatttatgtataaaaattaaatagtatcaccactatactatatacgtggtttgactaaattgaattgcataatataaattcatattagcatctattagatcaattttgatttaaatatattatttctcatattttggaaactaaatattttaatatatcaagaatattactagttatatattttgacaaaaaaataaaaaaaaacaaaaaaattgagtttgtgtttgcttccattttataaaatactattttatgtaaaaaaaaaaatttacatatttacattcaaagaattttttttttttttccttctttttttacattgttctataaagttaacatgaaaacaacaaaacaagaatactacataaaaataatataaaaataaaataaaaaaatataaaaataacaaaaaattaataataaatcaacaataaattagtaagagtacatcataaatatatataaaaagaccatattttccgtaaattaaatcataaaaaatataaataaatatttaaaatttcatacaaccctattttatatatcatttttattatttttatgtatttataaaacattctctttgttttaatgtggatttataacatcaaagtaaaaacaattggtaaatgatttatttattaataagtcaaagtttcatagcaatattgcaatgagttgagaaaatggtataattcaatacaataatatatatttcaaactaaataatagtctattaatttataattagggatgcacacgggacagagaatttgcgaggagtgctcccccgtcctcatccacgttaagaattttaatcctcattcttgcttattccccatcgaggatggggcgggagatccccctaatgggagcggagacgggacggaaaatctcctaataaaaataaaatttataataaaaattttaatatataaaaatattaaactacataaaaattaaaatattacacattaattattatttaataaactaattattatccaaaacacaacttaaaaattcataaaaaaaaatattaatatacgaaaaaaatgcaaacataaattataatatattactaaaaatataagataaaatactaaacgagtctccatcggtac

SEQ ID NO: 406288 - DNA, 559 bp, Cannabis indica
cccggaaggtcttctctgcggcctgaacccttacattcgagcagataaccttagaaaggttggactcctccactgactgatgccccaggatcagcttggccttccgacaattctctgtcatgaccaacccctcgacttcaaggtccttcttgtcatatgtggcgaaggtcttggcccgtaggaggaagagctgaataggcgcggtccgctcatacgaagggatcctaacccactctgtgagaagctccggatgttcaacagccaggaacccggaggagaagaagaagcggtgacgatactccttgacatgtttttgctggttgaaggggaccgggccctcattcaaagggtgggcccggaagccatgaaagtcgtccttaagtttgtcccccttcttagggacagaaacgagttcataaaaatacaatatctctgccggactgggagagccccagccccggacagagtaaaaaataaataagcctgaaagcaggaggtaagcttgtggaataagttggtatggcgcaaggccgacaaatacaaggaaattaatgaaata

SEQ ID NO: 406289 - DNA, 636 bp, Cannabis indica
aaaagattcttatatagtaataaattgtaaaaattattaataattaaaattaatttaattttaaatattattaatcttaattaaagtttataaggaaataaattattacgttattttcaaggtacaagttatttattattttatttttatttaattttcaaattaattacaaccatttaataataattcaatagcttaaaaaaatgtaaccatgatggttataaccattgaaacctctttcataatatatgtatatataataaacttatctgataagtttatataaaaaaaatataatattaatattaataatataataatattaataaaaactttattattcataattatcttatcatttcttagacactaagaaatttatatttttagcgcgctaagttaaatcccacatactcctaattatccaaatacctatattatcaccttattataatattcccatcaattctatcaattaaacctgttatgatatttttggcccccgatcgagtctccaaggtcgccaaatctgaaaatattttattacaccagtaactcttattacattcacatataccatataaatcttcgtaatttataaatttacacttatttatccacttatagcaaaattta

SEQ ID NO: 406290 - DNA, 450 bp, Cannabis indica
ataagtattgctctggttgaatctaaaagaattggacatgaattcttgcatattgtgaaacatcaaaatttgcaaaacataaaaataacataaaaaacatccaaaataaagtaaatgggaatgggttcacttaaaatataatcaataatagcaacaatgaaaaagttgtattggtgagtaaagatgtgaattgctaaatggaagagttggccctaattccttgatcgtcgcatatggtgaatatatagatcactcaagttgaagaggaaaaaaaaacccttatttaaaaaaaaaaaatcaaaaaatattctaatgtgtacggttaaggaagatatatactgtatatattttatatgtttaataaactctttttttttattattaatataatgatataaataattaaatatcttctaattaattattaatattttataaacataataaaaa

SEQ ID NO: 406291 - DNA, 537 bp, Cannabis indica
gggatgttaatccaagaattgttggggattgttcggtcaattacttttttaacgacgggggcactgtctagaagacacaagtgataatggacatcttcatgcatgctgctgcaagcaagatcacctcctgtacaatcagagatctccctagcaaggattctcttctctggaaatcggccactaatggttcttttactctaaagtcggcctattatgatttgatcaaggggcagttttccactaataatacatgcactaccctatggaagtccccctacatgaacgacttgaagatgtttttgtggagaattgtgaaagattgcctcctgtttggctctcgcttggcagtgatctttaactaggggtgttcatcaaacagctcaaacccgcccgcaccgcaccacatcgcaaaaaaaatgcggtttgaaattctttgcggtgcggtcgcggtttgaatttttcctaaacctcgcggtgcgatgcggtttgcggttttagattgttaatatgcggttcaaaccgcaccgcaccgcatat

SEQ ID NO: 406292 - DNA, 506 bp, Cannabis indica
gatggacattgcagagggctatcggtcaaaaatctcccatgtcctgaggtttgcttctttttgggaatcaaaaccagttggtagcatttaaaccagtaggaaaacactagattcgaaaaaaagcttgacaggttaaaaatatcattaccaactacagtccaacatcttttggaaaaatcttgggggtcagtaccgtcgggtgccggagatttatctgggtgcatttagaaaagagccttacgaacctcctcaaccgaaataggctgcatcaaatcttcattctgaacatctgttacacgagattgaacgaaaagaaattgactacttattttgacagggtacgatttgataattgttaaagtttaggggcagagttgctaatttacaaagtcacgttagcatttcaacagaatatgggacagaacctaatagaaggactaaattataagaatatttttttattttaggaaatatatttctatttaaggaaatatatttctatttaa

SEQ ID NO: 406293 - DNA, 528 bp, Cannabis indica
actgtgttaatcaactcagtcctactaacaattcatatgtattggagccaaattttattctaccaaagaaagtaattaaagagattgagagtatatgtagaagctttctctggtcagggagaagtaatatgaatggcctaggcaacattgcttgggaacatctgtgcaagtcaaaaaaagctggaggaattggctttcaagatatttgttgggttttatgccctaaataaaactcttattcaatgtaatctctattcttctaaatatcaataaagaaacaaaagtatttatcactcattttgttcatgttatcatttacttgtctaattgatttttaaattcatcaaaaccctttccaaattaatattcttgtttattgtgtcgtcagtacagtggaaagcaatcaagattatgtgattgaatgtataatcctagatttatcagaacacagggtttaactgatatgaaaatctacaacatatagtttacatgcaccgtggataagtgctatgttctttccaaagcatt

SEQ ID NO: 406294 - DNA, 623 bp, Cannabis indica
ataattataataatatatggactataatttttctattttctcctttgagagctatttattgtctaaaggttatttaagctataagtgagagtcaagactgtttatattattttattgggtccctattttattttacatgaagaaaataaagtgacttattctttgataaaacttaattaaagagaataattatttttatttaactaatgaataattatattgctcccatcctcattcctattaagtattttaatctccatctctatttattttctatcggaaagaagacgggaaatctcttaatataaaaataaaaaaaagaattactctatatactattctttattttttttttcaaatttacggtttgaattatttaagtagtttctacgcggattgctatgtagatgttacacactttagtaattacactatattttaaatgcaaggtatatttggatatgaggtggtaattacatatgaattcttaatatcttgtttgacaaaatagttagtaattacatgagaaaataatattttttagtagctaatgtttattatggaaagtttttaataattacacagtgtaattacattcaattctcatgggggccatgagaatt

SEQ ID NO: 406295 - DNA, 800 bp, Cannabis indica
tttttaccattttgtttaaatacatatactattattattaaaatttttacaaaaatacaattttacttatgtcacttaactgcctgcacgtttccctccattctgtcaaatatcaatcacttctcgtgacagttatcactctctaacccactctctccttattctctttttatttttgaatttcttcttcatcatcattctcatcatcatcttcttcttcatctttttttttctttctttttttttgtttctgtagtgttcaatcttcgtttcatctttatttttgagtaatgactgttactcgatctcgttcaagttcattgtccctttctcctgagaaaccaaaaaaaaaaaacatattaaacaatctaaacccaaatctgttgctcaaaaaattttgaaaccccctgatcagaaatccaaagttgttgttgatgttggtgagccatcatctaagcttcctgattatacatctggtgatgctaggaaagctaacaagaagagaaatgataatgacgatgattttgttgttgttcgtcatagaaaggtatttctgaattattattttttttgttgttttattgttttctttttgttgttcatttttaattcaaataatttattatctatttattttttgtttatttgattaatttttcgggtttagagtttttttctttgtttattttttgtttatttgattaatttttcggggttaattcaaaataaagagaaaaatattaatacataataaatatttaataaaaaaaagaaatttcccttacaaaaataaaataaaa

SEQ ID NO: 406296 - DNA, 506 bp, Cannabis indica
atgaatacctctctgactataaacagtcagccatgaaatccccggtcacaggttccacctttgggccaagtggtaggcgggcagaccctgtctagtaattcatcaggagaagtcatacccaataactccaaccaagttaatggtgccactcagcaaattggccaaaccaaccagtcactaagacagccaggcgtttccgtatttgagaggttggggacgactcatgatctcaaaaacgatctaaacaggaggagaggagtggacgatcagcttgatacgccaatcgtgtcacccagaacccgcgctccaattcgcgctcaaaaagatactgatgtgactcaaaccagccaagaggccaaacaggttagtctagccgtgcaggcacagttggacgaactaaaaagtatgttccaaggcatggccggtcagaggaacaacgatctcgaattagaccgagcacgtggaacccctttctcccccgagatcaatattctggagttacccca

SEQ ID NO: 406297 - DNA, 519 bp, Cannabis indica
acacaaatgaagaattgctaaatggcactcaatctaagaaatatcaaaaaccttaaccacacaattgtaagaaatatatacagtacagaataatataaaaaaagaaaattatgaactctgtttctatttagtattttgttaaagtgtaaattctccccttttttggttcttatttatatgaatactattgctaataaatcaaaaaaaaaataagaactgttttttcctaatattaattaatacaggcccctacgcaatctctgtttagattataaatagtcacttaatataattattttattgaagaatgagcaaatatcatatgttttctctaacacaaggtgccgcggtccgcgtcatcgatcacttccaatacgccatgttttgttctcttggttttgtatgtgctttggtagacaaactcgaagaatcaaagatcaaagaaatcaaaactatgcaacgtcgcatgatgagggccttctccggcttcacttactcaatatctgcccaactcttacc

SEQ ID NO: 406298 - DNA, 675 bp, Cannabis indica
tttttatgttgtttatcatactaatttaagtttttgttttttttttcgtattgtatataataagaggatgtatatatatcgggagcatggtcatatgtttgtcgttggcagtgacagaccttaaaattttttaccttttagaactttatttattaatttaaaaaaattatttatacttacattataatttaattttactagattttatttaattttgtgagatacttttttactattttagtctataattatcaaattaaataatttacatttaattttttaaaagataatatttttttagtagggactatagtattagtgggtccgtctctagccatgaatgtggctttgccccagaactgatcagtattgtctagccaaagggtgtatccatgagccacaaagggcatgtagattatattgtctagtaaaaaagcatgcttattgtctagccaaaaggcatgctaagctcatatttttcatggcattttattaaataatagcatgaaatccaattggaccttattggaaacacgattaagattagaattaaaaaaatgaactaaataattagtcgcctaattcccagatgattttacaaaaaataaaatagatgaaaaagattctaacatcacagtcagggacggacctagtagtgttgatatggggctatag

SEQ ID NO: 406299 - DNA, 1246 bp, Cannabis indica
attataaaaaaattataatattacttaaattttaacaacataacatttgatttttaacataacaaaaaaaaaaaatataaatcaaatccaataatattcacatattctattttactttaacaaataataataaaaaacatacatttcatagtaaacaccttttccaaactgctaaaaatctaacttaaattcttttacccaacttaaaaaataaacagaaactaatgtaaaaataatatatatacacatatgaaaaaaaatactatatatacatacagaaataaaattaaaaatataaaaaataataaaataataaacaataaatctatatatatagtcacaaaccacttgtctatacataaaaactaatttagatatacatatgtatatatataaatcgaaattaatatatatacacagatacaaaaaactaaatatatatatatacaaaaattaagttatatgtatacatatatacacacctatatatatataggttaaaaattcttaaaaaaacaatatttacaattttccctaaaaattaaatataaaaatacaatacagaaaacaaagaaataaaaaaaaaaaaaggggtttttttcattagtgtacaacaaaaacaattatattacaaaaaatgtgcaaaaaaacacaattttaaaaatgtacacatttgaaaatatatttacaaaaattcatacatatttttaattaaattataatagatatattaatgattcaactttctatatttagatttgtataactattttttatgactaattgatatggtattaatgagtaagcctactaattaacaaaatttatatattaataattaaaaaacataataagattctaattataaacaataatatttaaaatatacagatgtaatattttaaatataagataaaaaaataattaacgattaaaaataataaacagttttaaattaataataaaaagtgaaaaaaatacattaaaaaaataaacaaaaacaacccatcaagtttaacaaaaacatatataaattaaaaaaaaatactaaaaacaaataaacaatattaaaaaaatattacaacacgatacacaacaaaacataataaaaaaaccacaaaacaacaaaagaaaaaaaaaacaactaacaaagataaaaataccaaagaaaggacatttatagatggagcatgaataattcttccaccaaaaaaatacattaaaaaaataaacaaaaacaacccat

SEQ ID NO: 406300 - DNA, 841 bp, Cannabis indica
tgttacaagtaatataatttaattaatcataaagattcaataatgattcaatggtcaaaattagtgtaactatagtgattatatatttttattttttatatattacaatatctttatctttatatattaaatgtggctatttaacgatttttgttggtttaacggaatattttaagaatataaaaacatcccgttaaatttaacagtattagtagagttagttttataaatatatataaatattaatattatttattttagattaatttatatatataaatattaatattatttgcttaaggtttattaaacttataccaattttaaattataaatattaatatattatttgtaacattattaatttattattactatttttaatattaagagtatgttctttaatattttttaattttatatttaattttcttaaaaaatttaaaactttaaatatttaaaaaaacatttccgttaatttataagattttaaaaatacacataacaaaactaaaaactaaaaatataactaagtattgtaacattattattatttttaatattgggagtatgttatttaatatttttttaatttatatatattttctttaaatttttaaaattttaaatatttttttttaaaaaacaaaattaaataataaataagtagtttcctttaatttataagattttaaaaaggctaattaggatttttgccccttaaactttgacatataacaaatcatgttccctgaacttttaaggtcgttaaaaatggcctctgaactattgagattgttagatttaatgacttttgtctaattttattcaattttactat

SEQ ID NO: 406301 - DNA, 596 bp, Cannabis indica
tgttaattatgattaatttaattataaaaaagaattttttacctattggtaatctgctattacaggtaaaaaaaataaaaaaataataaccatcatggttacaataaaaatgtaaccattgagtagtcacccaatatacaaatagtattctaacactctccctcaagttggagcatagatgttaatcatgcccaacttgttacaaagataatcaaccagcaccccattcaaagtctgtaaaaatatcttctaattgttctccgatcttcacattattggtttttatagttcatatcaaagttataaaagcggaaacaaaattttgataaaaatagttttatccaatatgaaccataagcccaaaaatttcaacataatgaatatagattaaatctaatctactgaaagaaattcaattacctcttgatgcctatcaaggtattcttgattattttcatgtccattatgtgatattgatccacttgatatatataattttatataattaaggatgttgtggctactccctaattatttaaaattatgtgatccattagacactaaaatataaactgaaaataaaaattttactaaat

SEQ ID NO: 406302 - DNA, 577 bp, Cannabis indica
cttttcattcatactctctcttctctcttctctctcctgtcactaataaatataaatggttctttgtgcgaggtttgtctcatgtaggaaaaacagtagtagtaggaggcactgtacaaataaaaaaaaaaaaatgggttgagagaatacctttccctaattgagacttgagatgaatttcatctgttaacaattcaaaaactattgattcaaccgaagaaagcagagaacgatgcaatataaaacaacggagtccctcaaaatcactataaagagccattaaaaattcaaccaaccattgttcctttctacgagcaatatacagtgcaaaagcacgtagctctactgattcggtgagtgccaattacaaaatagaactcttgaatgtttatatttttctgttcaatagctctaatatcaattcccaactgaaactgctttgcaaaattaagattgtgtatacaatctcgaaagatagtcctaaatttcttttgttgtatcgtactttgctaattgggtaccaataaattattcaactgagttatttgtccaagtgagaatttttgaattgtctact

SEQ ID NO: 406303 - DNA, 788 bp, Cannabis indica
aagggtgtgatgacgattgtattatattattttatataaatttatcttttcacggcaattttctgtcaaaaataattctacattatgcatgcattacatacagccaccgaccaatcgagaatcgagatacaattctacccatgtggctacaattatgtagcttttcactttctcacttaatataccataatatattctaatatcatgaaataactaatagggcccctcatcctcactctttctagtagagggacccgatcaatttcattattcattaaaatgccaaactactaccagaaattacaaacccccattatcgaaagagttatctagaagggtaccccagatttgttataagcaacaacataaagaatgccaaataataaatccctatttgttttctgtacagtacatctcagctatcatttaaacagaagaaaacagttacgtacaaattttcttaagagaaagttgaaagggtaataactgtgaccgtatgaagataagtacaacttttgccacccctcgtgtcatccaaacgagacatgtgaatgtgtggcccgtacatcctataattggttagtgatatatattccttaaaagttatcaaaattaaattatatgaaacttaatatagtaaggtgcctgtggttttatcttaaaactaattgattacaggtggctcttttggctctggaacaatgttagaatttggtaaagatacataaaattttatctcaaaactaattgacaatgagaaaagtcatcttatatatgatatttagttt

SEQ ID NO: 406304 - DNA, 967 bp, Cannabis indica
tttatttttattatttgatctaatcttgcttaattagttataattttttgtttattattttgtcaaaatctcaatattaagaaaagtgtgtaagacactaagaagaaaaatctatatttatatttatatatttatataaagaaaaagcacaaaataaattatacgaaattttatatgattttcatttctattttttactcatttgtgagactttctcattttgtgaaaaaaagtttgacgatacatattttagaaatagtcccacaatgtttaggaactattttgagtgttatactgtatatagtataaataaaatctattaatcttcacttttattttaatttttgtcaactatttcatataaaatattttcttaaaatttttatttaaaataattttaaaattatcaattacataacataattaaaagatattatatatgtatatcatttttatgagaaactatattgtaaatgttaaacttaaaggttatatatcattagtactatttacttctaagtgagtgattagtaaacttagcaatattggtaaaaaaaattacaagttcaaataaattagaaatcgagttacaattattattgagacttaggaagagaaagttttaagattagaataaaaatacttaattatagaaatttttacatcaaaaatataaaatgataattttattaccaaaataccactacacggtaaactaaatatttatacccttcatctttattctaaaaattcagtaacctccattacactcttcccatgcatcaaacatgtgtgtgaccactatcaatcaatcaaccatccatcatttttctttcttttttttcttttgtttccttttattttccatttcttttcagttttttttttaaatttaataacctccattgctgaacattccctctccacgatcccaccattttccctcctctttgtgttcttcaatttt

SEQ ID NO: 406305 - DNA, 512 bp, Cannabis indica
aaataaaatcttccaacaaatattctgacaatattgttttgggattctttcactttagtttttagttttaccttttaaaaacgttaaccacacagcaactttaaaaaaaacattattcaaactaaaaaataataataataagaaaaagttgaataataaaaaaaattaattgtgacattatgtacattttctaaaacattacttattaaacttggtccatatatcaaaaatagaaatatataaatatatatataatgtaaaacgctattaaatgaatttacttcaagatcttaaacatatcttcttatttttgatgattattttgccttagtgccattttaaaaatattaagagtaatatatcttcatattccatattgtattcacatttttttttcacattaattctttaactttgttttttccttaacacaatagttaccacatacttgtctaaatatatttataaaattcattctcacaaaaataatataagattatatatatatatat

SEQ ID NO: 406306 - DNA, 620 bp, Cannabis indica
gagtttcctgccaccctctcagaagccgcccagcaaggtatttcaagttagcgcccgaaaagttcaactcatggaaggctttctcctcggagttccatgcacaattatcctcctctcgccaacttccgttgcacctaggagatttagtcgaagtaaagcaaagaccagaagagcctctctgagcctacatcagtagattcatgacagaggcaactaaggttgcacgagtaaccgaagacgtaaaagttgtctgtgatacttggggggaattgaagtccttggctaaactttggaaggccataaggaagaacagaccagtagactcgatgcgtgattttcttgaccgtgcagaagcttttatcaaacttgaagaagccattcagtgagcaaagggtgaacaaaaacctagccagtcaaaagctccttctactgggacatccgtccagctcccccattaccgaagcaattcaagctcaagtggtaaacggtatagcaacaataatagacaagggaatgggaaaagggaaagttcactggaaaacctgaacaagcttcccgggaaaatcttcccaagtatactacatttaccgtcctgacggaagacatggaaagtgtttata

SEQ ID NO: 406307 - DNA, 717 bp, Cannabis indica
aacaccaactattattgctggtgtttttcgaaaccttcattttaagacactacaaaaaacgattacttttagtgataactttttagtcacaacataatttttttgtaactaaatataatttttagtcacaacaaaatgttacttataactaaaacatagtatttagttacaagttattactaatttaattttagtcacaacaaatatgtgaccaaaaatatatttagtcacaacgaatcgtaatttttgtgactaatacatttatccacagaccttttagtcacaacataggaataataatttataattagtcacaattttttcacttttagtcacaagttttattatgactaaaagtaagattttttgtagtgagtgagacattcattttaaattaaaaaaaaaaaaaaaaaaaaaaaaacaaaataaaaatgctgaaatcatgtcaagcgaatacttattaattttttaattaaaatattttgaaggagagagacaaaaaattagagatctataatagcgaaatgtgtactaaaatggtcatgtaactttttataaacacatggtaatataatatagaggaaattacacttagtatgggattttaaaagttcttatgataaatatggcacatttaagtttggccaatttatatggtatttttttgtttttaggtttttgtatgatatttgatatgccatatatatgtaattaggt

SEQ ID NO: 406308 - DNA, 616 bp, Cannabis indica
ctctctctctctcttttaattttgttcttcaaacaatttttttttatcttcgtatatttatatatattgttgacctcactcttagccaacgacattgagtctattttagtaagtgacaagtagtttataacgattgaaacatagtaagcaatgtaaagacgtaattttatacaggttcagccccgcgcagttcggtaatagtctaatcctcgttatttgtattaactcaagaacaaggaaaaaggatccttttcttatagctcttacaacagtatctctgaatatcaattcttaaacaatatctctcaagaaaaatgtttgcgaccctttgcccagtgaatatgcatcactatttatagggctatgagcttggagaggaagtatttcccttctggttacaatggctataagtagaaagattgcatagtaaatacagaatacactgatcgtgggatttggacagcttgccatatctttgtaatctgatccccaagttatagcgattatcttgatgactcacgatgcgaaagctgaattcgttaagtgtttgtcgtcctgtgcatgttgctgattgcttcgtctcgagcatgcatatgaggttgttgggttttatgcc

SEQ ID NO: 406309 - DNA, 778 bp, Cannabis indica
ctagatctgcttagttggaagctcggttatataggcccatggtccccacactagttcagacaaactgcttgtaagagtcagttaatcaattttaattataaatttagactatgtcttgtttctgaattttcactatgttatggcttgattgtgaagaaataggagtttagggttaatttattaattaagagactttgtaaagtctaattaataaatattataaatgacattttatttgataattattttaattattaaataaatagtttttaaatttatagggttgcaattgcaaaaagtggtatttatgaaaaaaatagaataaatggttgagaaaaatggaaaaaaatctaactagtgatggacccactaatggccggtcacttcggttattttgctccatttttgtcattttttattccaaataaatcaactagttcttacaagattaaattgaagagataatctgatgagaaaagtttgacctgtacaagaaaaatttagaacctaatccccgagcgaatagggaaaacaataaaaaagatgcgagtggctccagagccccctacaacatctttgaccatcattggtcgacccgcatgtttgtggagactcctgttgcgaataattttgcacacgcaagtgtacgtaccgtttcaagtagtagactcaccaggagtgaggtacgatcccacagggagttgtagttaagtacgttaaaattgaacttttacttctatttggttaaataaaaataaagaaagaattaagaatgaga

SEQ ID NO: 406310 - DNA, 796 bp, Cannabis indica
gatatttttcagtgcacgaccctttaggtcatcccacagttcgccttcagtagtggagagattagtagtgatccctgcctgaagggcagtatgctgggtactatcatccaaattccttactctcacagtagccgtgctaaaacgacttaactatgccttaagagtctcgccaggcttttactttatggttgtgagtgaggatgcttcggatcgcctatcccttgcggcctggaactgccttttgaagtccttagacaactgttcctaggaagtgatggaatgatgagtaaacttattgaaccagctgcttgctactccaactagtgaggtgggaaacaaaatacaacgtagattgttcgtaacattgctagctcgcattatagtattgaaattattcaaatgcgagaccggataagtggtcccgtcagatgaagagacgtgggggtttttaaatccttggggaaaaggagtattcatgatgtctggatggtatggctcaagttcctcgtctgagtcatatccagattgttttccttgctccccgacttgatatcttctgaacttatcctccaactcatctattcacaattggattggatccccttgctctggaccgagttgttggcgaagattaggttttttctggttcaagtattcttgcagatctggtttgttataatttcaagctggcctcgttctactcacggactttgtcctactcatggactgtgtccttgagtgattatttaatgttaaattaatttaatttaatttataaatttcaaaaaaaaaaaaa

SEQ ID NO: 406311 - DNA, 699 bp, Cannabis indica
caaaaggtgagttgccccaagaaagggcactgtctcgaaagattcagtatcaggctcatcgttatgtaatgatggatcaaattctctaccgaagaggactcagcatgccttatttaaggtgtgtatcggaccctgaagctagacaaattatgctagaggtccacgaagggttctgtggagatcatacaggaggacccagtctctcaaagaaaatattgagacagggatacttctggccaacaatgaaaaaagattgcatagactacgtccaaaaatgtgattcgtgccaaaggttcgcgaacataccgagagctcctcccaatgaaattaccctgatgactagtccctggcccttcgcggtctggggaatagatcttattgggtccctgccaacaggaaagggaggagtaaagtatgcaatagtagcagtagactacttcaccaaatggacggaggctgagcccatgaagtgcattccctcgcaaagcatcatctctacatcgtaatcatccaaaaaaaaataatataatatcatcatcgtatctcttttgatgtaagactattgtttaaccctctatattatattatcttgtaacatatcttttgtggtcctttgcgacaaacttatttatccttattaattaacaaaagaaaaaaaaaacaacacacatacattaaacaaattataaatcaaacaaa

SEQ ID NO: 406312 - DNA, 555 bp, Cannabis indica
tgcttttggaggatattaccctaccggttgcccatggtatgttcctgaaatgcagtttctaggaattaccccacctgtcacgccacaggcaagtggaatgcccatcatatagtttttaacaacaccaggatatacccacaaccttgctcttaccccgacttagtctagtgttagagtgctaggggtaacctggctctcagagtgagctcgcaatatctcgctcaatcagcaccatctgtagcaagtgcagcggaagctctttaaaccttctaaagtaagaggtcgttgaaaggaagcacgctgacttagaacaagaggcaaaagaaaggctacatctcccaatatacccattataccgatttagtggacacccaagaaagtgtatacttggcctgtaacgtccccgcttcaagcctccattgggcccttacacccacagactaatggctcttatacacgagtacgtcactttggctgcttcttggattgatgactgaccctacagaccaacacaagtgtttccagcgtgctttgtcctcattcacacgcatcctg

SEQ ID NO: 406313 - DNA, 809 bp, Cannabis indica
ttgagtacaatccaagctctaggtatagctcttgctctttctctctttagtttcttgaaaattaagtaagaaaatggttgcatgcttagtttttggtgttgtggttgctgttaattgttgtggttgttttcagaatttttgatgtgtttaattgagtgaattcaagctagctttgttgttagttgatgggatttaaccttgtgtaatggtttaaactcaaaactatgatttttatggtaaaatgaggaattagttgctgtgattgttatttgtgcttgggtttgttttctgtagtttatttatgtttaaattgattagattaaggcacgtttgatgcatgttagtagatttagccaagcttgagttttgaactcaaagcttggagctttaatggtggtttttaattctgtgcatggtgggttgttttattgctttggaattgttatttggggtatttagagcaggtctggaaacttcgaattggtttggggttgatttggtcgagttatgaaattttgaaaaattcctgcactgaactagaattctggttcagggaggccattagcaaccggtcgaccggttggggcttccaggaatttttccagaaccggaattccggttgtagaaccagtctaccggttggggaaaaattgggaaccctagttgtaaagcccgcttagttaatttggaaactatcagttaattatgattattcatgaaattatttatagctataaatataatttattgtactgttatttatggaattcagaaatgcatggttatgttattcagtagttttcatattt

SEQ ID NO: 406314 - DNA, 424 bp, Cannabis indica
acttaattcaagtcatgggaggttctacaatcacagataagtctctctcgggtagggtggtgggctgctaactgctaaaagccaaaataaaatgctgtgatctctccctatttatacacatatatatttatactccgatttgacacaggttaataagtcactaaaattaacctaatagtgaaagagaaatgggaaaaaagtagaggtcttggtcacctttaaactattaagttaatatataattataaaatactattacgctacactacaaaaaaaaaaaaaaagaatttgacacaacttaattaaataattattataaaatattattaattagagtatttttaatagtatttttttttttaattaaaatagttaaaatattaaactatatttttattgtagttagtattttataatttaaatt

SEQ ID NO: 406315 - DNA, 649 bp, Cannabis indica
attgacgaccgacctctgaagtccatttcaccattagatcatcatatacggtaaaaatagcctaaatgtattttttatatgttttggattatttcattacgattttaataggacctccttccctataaaaggagagctccataagctcatttaaaaagttcaaaaagtagccataaggtcagagcatctctctctagtttctctctatagaaattaaagcatccaaacatagctatttttctgtaatccatctcatgagaaataaaaatcgaactagacatagatccattattgtcgcgatatagggagtgaactactatatattgttgcgtctctctatttatacttaactcataaatacattctcgctagtcgagcgagtgggtgtggcgcatatatttgtgtctagattcctatgtcaaaattttggtgctttcattaagagccaaaactcaagaatgtcacatataagatggttgtaacatactcttcaaatgttgaaagaagatccacaacaactggccaatagattgggggcatgccagtcgttgaagctggtgatgggactacacctgcttctcagatgttaggtgtgttggaaatattttaccaggatctagattttactaccaagtatgtttcattaaca

SEQ ID NO: 406316 - DNA, 735 bp, Cannabis indica
attaaaaaaggggtaaaaactttacacccaacatgaatttgaatatgaatttttcccatgattacctcgtaaaaatttgtctgaataagaggacgacccaatcgtttagcgatctccttcttgtgctccaaagctttcttttctgaggtcgcattctgttctccgattgaggtgatgatgttctgaggtgatgatgtaccagcagttaaccgaaccatgcttgcggcgatggtgagaagacgaaggagtgagagaacgaatgagttagtcggtcgagactggttgacgactgagagatagactaaatggaatcgcaatagggttttgttaaagaagaaagaggaatcgcagaatttattttggttttctccgttaaaattaacagaatattcttttatttttaaggtatattctgttaaaccaagaaatgccgttagataggcacttttaatatataaagatatatatattagttttttttttttcaattaacctttttttttctttttttttttttatgatatgttcttttttaaaaaagaaaatttacctgataatttttttgtgaatatttttttttaaaggacacattagtggttttgttgttattgtaggaagtttcacgatcatattcaagtagtagagttaagaggaaattagactctataatctttttatattgtcttcttttatttttattctctttttttgaagtctatcatttttacttttttt

SEQ ID NO: 406317 - DNA, 650 bp, Cannabis indica
actattatatacaagaactcaatcaagggtataaacttattccaaaaacctttaaaatctatcacacatgctcatgacataccttcaaatgtctgaatagatctacatcaaatagggataaatttactgtcctacccttcaatgtattttatctttgaaatacttagctacctataaatgatatttaagtaaactaatataattactgaaataagatctcaatcatttatctatattaagccaagctcgaagaaaatcatcgttttacttttaaatacttatagaagctatagattccatatccatgattagcgctcccactcaattatactatcatatttccaagatgtaagtattcgcctgaaccattggttagctttcacgaacaactctaagatcataaataatacaattaagatcgaacctaactataggattaagatctattgacctaagatcaaccagtgatattgacttagaaagatttaacagtaagtttacgatatcttatctaagttcaatatcgattcaatctgatgtatactccatacatccgatactagcatactttaccaatactctggaaaggacatacatttatccaagtgtaagtatactttattgctgattatcatgtcagtttaaaatcc

SEQ ID NO: 406318 - DNA, 526 bp, Cannabis indica
ccactaaggattgaggatatggagtagccgccaagcttgttggccaacatcactgattgaaagccttcattgaacgaaaaccaagtccaccatggaattttgataagcaaagagatgaccaggttttccaatgagttttccgattgtttccattggcaccccaccaaaatcgagccattaaagattcaattttagaatgaaaagatgcagggagcttgaagcaagccatggcatatgaaggaatggcttgtaccaccgattttaacaggatttcttttcctcctttggagaagaatttcgagttccatcggttcaagtggacccatacgcgatcattgatgtaattgaaggcatccttttttgatcggccaaaggcttgaggaagacccaaatatttatccatcgtgtcaagaactgggatgcctaggagcgtagctatttcttgcttaatcgcttgggttgtgtttggggagaagtataaggccgatttagtgaaattaaccatttgtccagatgcttggctgta

SEQ ID NO: 406319 - DNA, 831 bp, Cannabis indica
tttaacagttcttaaaaaaaaattcaaatagtttatagggataattttaaaaaaaaaacaataaaaaaaattagaaaaatacaatttgtacagaatttttaatattttttacaattttttagattttatttacataaattaccgtcttttatgtatttttatgttgtactcttattattttgttgttaattttttgttatttgtatattatattttatgttgttttgttattgttttgatgctattttcttattactttcatgtgattttttgttgttttcttatgtttttataaaataccgtaaaaatataaaaacaaaactttcaatgtaaaaaataatttttttacacaaaatttgtgttcttatccctagttatattgttaaaaatagagtttgaaataattaattacattcgttaagaaaaaaagccaataataaaaaaaaaaacaaatgagtaaccgaatgtttgaagcctattactctaaataatttaaaatttttaaaatatgaataaaacatttgctatagctatattatacactgttatataaaaaaaaatataaatattactttcccttataataatgtacataacaattgttacaaaaaaaaaaatatacataattacatttacaactacttccacaactaagtatttttcatttttagaagaaataagatcagggacaaaattgtaactttacatctcctttactccaatctaattaatttttgggaacttttatttgtaccctataaaattataaatacaccccattattaaaaaaaatataaacttaaaaaaattttaaaaactactcttaatatt

SEQ ID NO: 406320 - DNA, 916 bp, Cannabis indica
gttttctccctaatttatgtgagcctcactactttctccctttccaatgtctacagaaatatacacatgacaaaattctattgatccacctaaaatcaactatttacttattgtaaaaaatttatttaaaaataaaaaaattattaaaatctggaataataatttaaaaaataattaatttctttttactctttttctattttcctttcctttttttttcttttctattagagttagtcacacattgctaatgtgtggaaataaattgtcatatataagatgaatgggctactcctcccattgccaattggttttgagatggaaccccattcatcttatctcaaattctaagatggtatcagagtcacttgtgatccgttgtgagcctaaattgccactggtctagaaaactaattgtgatcagttgtgagccaaagtgttgtcggtccagaaaagatacttctggtgtctcccctttaacctccattttggacctttcggccaatgtgttctagtttctagtgttgggtctttggcctgtttcaaaaatccacaaatttctcgacgtgtacacccacaaatttctcaatatttggccttgtgggattctttcaaatgtcacgtttggccctgtggtctcttaaatggttgttcgttatacccacacttttaggcccaaacgtgagaagggtgtattagagttagtctcacattgctaatgtgtagaaataaattgtcatacataagatgaataagctactcttgctattgccaattggttttgagatgaaatctcaatcatcttattctaaattttagattttgtaacgtccccattcaagcctccattgggtccttacacccacggaataatggctcttatacacgagtacgccactctaactgcttcatggaa

SEQ ID NO: 406321 - DNA, 1110 bp, Cannabis indica
gattagtagccaaataacaatggcaatcattaaggtatgatggcctttttatctctctacctaacctgttaacaggaacagtaggtgtggaatttaaactagaatgatcatgagtaggagaaggacaaattgaatcagcaacatcagtaacaacatgatcatgcacaatatttggaggcacacgaaatgagctggctggagtatgagaatgctgagtacattcagcatttgaaggttgaaaagaaataccagtaggcacatgtggaatttcattatcagggctatgtaaacaactgtactggggcatatcagaaaaaaaaattctggtgtgcagcaagaattagaccagaattgacaaagggaaatatttgctcatagaaatacacatccctagaattgaaaatcttattagtattcaagtcaagaagcttataagctttcataccaataggatacccaagaaaaacacaagggatggatctaggactaaatttagacctagaatgactaagagtggaggcatatgcaagacatccaaaggcctttaaatggtcataaacaggtggcttagaatgtaagacttcataaggacttttgttccttagatttggtgtgggtgttctattaataagatatgcagcagtagagactcttttatgacttattatccctgatcacaagtggctcttttgctctactttttgtattggttatttttttttttgttggctcttttttattttttggctcactattcccgaatcacaagcgacttttcttgattttggctcttggatcattttttttggatttttggtggctcattttttttgctctactccgatcgggttttttttttgggtcaggtagtcgctagagatttttcttttgttttgctctgataccatgttagaatttgaggataagatgaatgaggtttcatctcaaaactaattggcaatgagagaagtagctcattcctcctatatattttattatctttccacacattaacaatgtgagaatctctagcagtataaactaataataataataaaaaaaaagggtaaattaaagaaatagaaatataatcttacaaaaattttggtt

SEQ ID NO: 406322 - DNA, 618 bp, Cannabis indica
tgctaagactaagtgtagtcgccgatgccgtaaaatggtataaaatacaaatctcaaaatttcataaaatgtcatccacctaggaatttttctaaattttcaaatagcaaagaatatctgaaagtggtcatctaccgaaattcttatattcaaattcaaaaataccgcattatgaactacaagtggcttgatccttcataaagaaggtatgtaggcagcttagtttaattaaataactgagttcagccacaattccaaattcatttaaaattttccccaaattattttaattattttatatcatcgtaattggaatcaaagggtatttcttttaaataaaataattgttattataagaaattatttttataatcttagatgggtcgaacttaaattaataaactcttatgctataaatttaacatatataggtgattgtttgcatttattttcaatattttaaaatgtaaattttttacttaacaacgactataattgaatgttccccaaaaatttaaagctattaataacaacaaaacacaatccaaaataatataaaacaatcacaacaacatttagcaatacaaaatttgccacccatccgaccgcagtatatat

SEQ ID NO: 406323 - DNA, 720 bp, Cannabis indica
tttatggaatatggctagcctgaaccatcgttttatactcggaaaccaatgacggtaaggctaaaggttgggaaatttaacggttgggaaagaggtagaagatgaaagagtagttcattaatgctaatagcgactcacgaaaccgtgaagccgttaagtttaagggaatgcgttatcttgaagaaagagattatgacaaatataccctctgagatcatttaaaaagtactttttaagggataattgttatacccaaaattcagctaccatttcaacggaaaagacgtgtcagattcgaaggagtagggatcaatgcatgaaactgtaattatatttgaaaatggaataactcattaaatgcggaagtgacagagtatatttacaacttgctgactatagggtcttacgcgagataaagatatacaaactgatacctcatacattagtgagaaaccatacgtcaaggaatgcgcaaggcgaggtatcaacctcgttaatcatgagtagacgtaagcgagatataatgactgtgaagacacttagcgtataatatacagtatacagattaagtataacagacgggtaaacccaagtaagtgatagcaaggcgtccatctcgccataggaagacatgtccatgactatagaagttcactttgtcgccaagaattgcgattgtcagatggaccgttatgtcttctgttgggtttatgccctaaa

SEQ ID NO: 406324 - DNA, 807 bp, Cannabis indica
acatgcacaaagagaaaaaaaaaagtcagatcaagtagttgaaaagagaagaaaaataaaactgtaaaagtgaagcaatcgagtcttacttgatcaaaatcttgtgacaggaagctccacaagctgtaaatcgccattgttgatagtggatatcaagccaaatctctgagatgagcttgacagaaatttagccctaatttagggtgaactctgaaatgatttctggtgtttcctctccttttactcactttgttttgtttttcttttttttttcatttttctaatctttgtgtgtgtgggtaaagatcctagggttctaacataggattgagcaagttcttcttaagaacttgctctgctagggtttcgagtttctatgctaaagtgattgtatttgttgtgttttatgaattaagttttctagatttttcttcaaaagtctttttgctcttgggttaaacgacactattattgtggtcgtattgtacttgtgttgttatttttggtctaaaatcatttagataaaggaatgggcaagattgaccttagatactgataattagtgttttgttaaaatagtaaaattcctacaagtttaatatttcaacacccctttaaacttgatttgtgactccaataatacttcgtagtttgatgaatgtttctctcttgagtggctttgtaaaaatatctgctgtttgatcttgagagacatattccactcttacttcttttcttccaatgcattctcttatgagttgatagcgggtgtcgatgtgtttgcttctttcgtgaaagactggattc

SEQ ID NO: 406325 - DNA, 611 bp, Cannabis indica
ctcttactatgtaggcttggtttatatttttttttgtttatctaggcaaatgaccttaaggtcgagacaatagtttgccccttgtggcacttttgcaaagacaaatttgtaaggttggatgaccaactttgcttttattttatctttattgaatgcttcgtatttttatatttgaccttaatatatctgtttgtttgtgttttcattcacaacttgaactactatattttgatcaaatttaaaatactttaggcatttccattgctagtattttcctttgatattatttaagtagttagtaatctactatgtgcgcgagcagttattatcttctatgctttttatttgcgagcagttatcaattctacttcgcataaacaattataatatgttttaagcaaacttgaatatagttttaatgatttatcactttgtatatttttgatttcttatatgaatagttaggtcgtctattcatatattaggtttaagtattttttcaaggcatcttggtgtctcgtttaatactttctcacaaaattcaagccgttagtattcagcttcgcatgtagcttatgagttatatctcatttacagattttgattttcct

SEQ ID NO: 406326 - DNA, 536 bp, Cannabis indica
attcttagggattgaaggcagcagctcttgcggcctgtaaatcgtcaagcagtagttccactcaggatcgaggcaagacaagactagtataataatatgctatatgtgattacagtttagcgtgcatgtttacgaatgcttgttagataacatattatagtagcgatattagtgtacatagagatgcactgaatatcgacagtatatgttgggctaagtactaattaacgctatcacaccggtatgactagagtaccgagtataggctgatattatggttaatagtactgtcgtacgaatgttctagactcagtacgcgtgtgacacgagatagggttatgattaggtgtatgggcgcctagttataattcgatttaaattatgttatgattatgtttttcatattgagtctgtcgacttataattattgtttacatgtgtaggtaagggtaaagctaaggctgagcagcagtgagtgcgaacagatgaagattgtacatgttgaggcagttagacctagagcgtacgatctttgg

SEQ ID NO: 406327 - DNA, 308 bp, Cannabis indica
agattgttggattttaagaattttttttctaattttagtaaaaaagtctaatatggatgaaagttcaaggggcataatttagtacatgtcaaaatttgacggcatgatttgttagatatcaaagtctggggaacataatttagtacataaacattcactgaaatagtaaatttgaatgaaattagacaaaagtctttaaatcaaacaatctcaatagctcagggagcatttttaatgatcttaaaagttcaaggagtatgatttggtacatgtcaaagttcaggggcaaaaatcctaattagccaaca

SEQ ID NO: 406328 - DNA, 614 bp, Cannabis indica
atcgtcatgtaaaaataataaaattgtaactcactcatataccaaaaagagaattgctaaaaaatattattggtgcttagcacttttctcagtgtaattccactattagtgtaattaaatatcgagtcctatatcacttaagaaaataactttcagttaatatcgctaaccaatcgtaaacgccgacttataaaaagaacaaatattcaatagcaatactcaatttatatatataataccaataagtagtaagtaaagacaatcactattatcataatttatatatattaattatatatgtatataaatagactagatgaaagttacgtggcatgccacgtaaatattagttttatttaagttttagtaattttttttttaagaattcggtaattaattataaattattttttaaacgatttgttttataaaagtaaatttgtcaggaaagccataattgtatatataaacttatgatgtacacattgttattaataatactaaaaaaattggtaatattagaaattaaaataaatagcctatataaaattaaaaaatagtaaaaaaaaagaaatgacactaacatgttaaattagaagaaaaaattaattttt

SEQ ID NO: 406329 - DNA, 298 bp, Cannabis indica
aaatataccaataaaaaatgacatgtggataatgactttaacatttaatggttaggtacctacagagttccagaaatataacttaggtattattacagccaaaaaataaacttaggtatttatctgcaactgagagttaaacttagatatttatgccacaaattactcattttttttaattagaaaagtgaaaatattttttaaaaacatgttttataaaatagtttttacttatcaattttttaattgagattcaaaattttaaaaatttttgaaaaaaataactttcaaagttttt

SEQ ID NO: 406330 - DNA, 842 bp, Cannabis indica
  modified_base (79)..(79): a, c, t, g, unknown or other
ttagtttgtaaaaactataaattttttgaataagtaataattttttttcgttctagaaataattttattggttttttangtaaaactcaaagttccaattaaaaaatgagtgagtatatgtcgattttgaaatttttggtgcatctttgtcgagcatggtgctcattcgcactagtcactcggacgaagaaggggggtacacggcgtagattcagacaaaatcgtgtttgaatgcttagtcaagctcattcgcaccagtcactcggacacgaagcccgcgcgcccaaatgtcgcaagtgaccgagaattctcggtcaaggaggttacaacttcctctgtccgcgcgcatattcggctgcatgcagcctttcctgggcatccaagggtgctttgcacccaacatcgattttttggtgattttttcaccaaattttgatttttctaattttaaatccctacatatcaatataaaatataatttttaatatttgaacctaaatatcaattttcgaaattaataatatttaattatattaatagtttattattaatttttgatattttgaagtttaaatttaaaattaattattttatatttgaattatgttagattttaaaaatttattaacttattttataataagattagatattttaatataagatatattttaaattaaaagattgttattatccttttaatttgaaatattatattaagattatcttacataatacattaaataataataaatttgaaattaactttgatatttttatagttatcctaaccataatatgttcaaattcatatattggttataaataatattataaatatt

SEQ ID NO: 406331 - DNA, 669 bp, Cannabis indica
ccaggattcggtgcaccattaaccagctactgcggaggaaggacgccaataaacagaatttcatcaaggtcgtgtctgatgactctaaggaccacctacgatttcaaagagaaaactcaaacgatccagattaatggtgagggaattcgagaaaggattccattgtggttgtgtagagacaacagaagcaagggcattcgacattggtgtaggagcagggacaagtttggaggttgaagaaggcatggacgtgaggtaaaagacaattgataggaattcaagaatcttaagtagaaaaaaaaaaagctagcagagaattagcttagcaaaagctaactcaactattagactttttatttatagacaaatcagtattaagattacaaggctttttaacagaacaaaataaagactaaccttaaacaacctaactaactaattaaaataacaaacaaactaattacttatttgagtgttaacactcggaacttttaggtggtgtttggttgaaagtaataaaatggaaaagaaataattttcattccattcctttatttggttgcattttaacgtattggaatatcattccaatagaacagcttttctaccattttggtaaaatgactattccattttgaaatagaagaaaaaactattccaatgcaagat

SEQ ID NO: 406332 - DNA, 587 bp, Cannabis indica
tatatatactagataaatgttacatgcaagacacgtatgtttatttttatcttaagttatatatattttaatttataaatgtcgaagttaaagataaattatattttttttttgaaataaaagataaattatatttaatacatagtgctaagagaaaaaaaaaagcattaaagtaatttaaaaagaaaatttaagtaaaatattgtataaaattttaagaaataaaaattaaacacaatttattagtaaaatatattaaaaataacattggtaacattaggagtgcacatgggctgggttggctgggttagaggtattttaacacgccaacccaatgattgcggtttggataaactataaaccattgaatttttttttattgtacaacccaaccctacttagcacaataatatagggggtgggttgggttcattgggttaagattaatattttaaactttaatatttatgttacaaacaggataaaattattcaccctagtgcatgcacaaaaaaaaatagatacatatatatgtgtgtgtgcgtgtaatagagtgctttaaaaaaaactaagatagtagtggtatc

SEQ ID NO: 406333 - DNA, 686 bp, Cannabis indica
tatggacttcaatgagtgatttttaaattatgagagttgttagaatgaacacaacatttataaaaacgttcaaaaacacatgctaaaaatttggcatggcgcaatcgtacctactcttgctacctttaacttttcaccatttacaattttaattggaaaagtgtcacacttgaatttgtaccacttatttacactataaatcatacaattaaatctcttgtcaactatattttaaacagttatcctttaatcacattcacttacatttgctaatttaatttactaatttaagactaagtattaagaagaggagagttacaatgtttgcaatactaattattatcttttgaatgattcacaactagggatgcacacggggcggggagtgctcccctcgtccccattctcgttaagaattttaatctccatcatcgcttattctccattgcagatggggcggagaatctccttatgggggcggtaacgggacggggaatcccctaatagaaaaataaagtttataataaaaattttaataaataaaaatattaaactacataaaaattaaaatattatacattaattattattcaataaaaaaattattatccaaaacacaacttaaaattcataaaaaagtactcatatacttaaaaaaaatgcaaaacataaaattataaattata

SEQ ID NO: 406334 - DNA, 643 bp, Cannabis indica
aaaaaaaaaaaaaaaaaaaaaaaacttaataataaactttgaaatgaaaaatgcctttttacataataatgttgattaccctaacccttttttggattaatataaataaataactaattctaaagctggaataacgaatctttttttaatttcatgatcttgatagtgaaataatacaacccaaaaatgcacatatatgcactagtgttttcaaatacaaataaataaattaatattatatgtcatttaaaataaattaataaaaaaaaaaatactcaccaaacaaagaatcgtatcccgtgaagggtataagtaatttaattaatttattattaggcatatattaagggctagctaaaccggtacccataaagattgttttttttatttttttaaaaaagtaaaaaataaaataaaaaaaaaaaaaaaaaaaaaaaaaaacaagaccaaagaagagattataatggtgctttacttgccactatcatttgtcatataaacaaagatagcttataccaaataaattaacctttatatttagaaataaaataagattatacctttatatttagtttacttttttttctactgtatatacaaatgcagaaagggatagctgagacaacacgccaaatagcacaaa

SEQ ID NO: 406335 - DNA, 713 bp, Cannabis indica
tcccattatttataggattatttccactacatactcaaattttttattttttttttaacttttttaatatgagacggaatttttttttcaaaaatactattaaattttatattatgtaatgtgttaagtttttaccgttgttttgaacggttgttttttagttgtttcactattgtttttagtcgttcagttttgtgttctactgttgttttataaaatacagtatttttgaaaaaaattctgtgtggtgatatttttataaaaattaacacaaatttcaatattttttataagttttccttatttatatattgtcaggatcagtttgaacttcaacttatatgtttatgaaattattttaggtgagttctatttgcaccccttaaacttataaatacactccattattaaaaaaaaatataaacttaaataatttttaaagattactcttaatattttttaaaaattttttacttccacattattttatgttaatttctaatacttattttgattttcatttttcataattttttcttaaactctatgtgtatttttttttaaattttctttctaaaaaaaatttctaacattaattttttattttaattttttttagtttctataatatttaaaaattacgtcttatttttgtcttgtatggtatattttttaagtaatatgaattgtaaagaaaaaagttaaaaaaaaaa

SEQ ID NO: 406336 - DNA, 565 bp, Cannabis indica
tcgtaaatcaaaatttatgttatataagcacaatagaatagatatattacttactaagaaaccaagggtcactttctgctcacgttattcatgagttgtttttcaacattttctcataattataaatgatttgcaaatatatcttactttgctttgatattgacataaactatatatttatgtcaaccaatagattttaatgatgaaaatataggctatgtatcttagtcattttgtattatcttttttcttttaaagaaaattggtaaaaaatcaattattacatttgattaaataaatatatccaattaatacaatcatcaaacaaacataaattacaagtgtatgaacatcatttctatgatttttttaaaatcagtttgattttaatacctattattattattattattattattattattattattatgccatctatactgaaccgagagcactcttagtataattttttgtactattctttaaaatatatcattagatttttatttttcaaatatgtcatacatgaaattatttcacacatacacaaaaataacaaaaa

SEQ ID NO: 406337 - DNA, 562 bp, Cannabis indica
acacttatgtcttcggttattgttattatgaaataatagaagacataagtccctctacctttttggtattttttagacttacatctccgccttaatagcatttggtagatatttttttttaacggaagataaactagcataattatcgaaaataaaatccaattttttagtagtgtaaatgcaaattaaatacctctcacaaatatttttacttaatgaataataaaataaaagacttctattatgtttaatttaatttgtatatatatttatcaattacatttttattgtgtaattactcgtttcataataaaattaataaatataatatgatattaaaatgaccagaggttgctctcaaaattatatttgaagaagaattattaataatcagtagtgtaaaaagttaaaaagaaaaaaattttaaattagtattaataatattaacggaggtaagaagatatatagtatatacgtacatttgatttgaactagtaaaaagttaacgtgcgaggcacgtatactaaattttatgctagttttttctacgttattaagaagt

SEQ ID NO: 406338 - DNA, 1092 bp, Cannabis indica
tatttgtcgagacttccactacaaaaattgctacttttagtgacacttttttagcgttaacattaaatttttgtgactaaatgtgactttttagcaacaacaaaaaattatttgtgactaaaacataccatttagacacaagttatcacttaatttagttttagtcacaacaactattgtgactaaaaacacatttagtcacaataaattgtaatttttgtgactaataccattaattacagaccttttagtcgcaacataagaattaataatttataattagtcacaactattttacttttagtcacaaattttattgtgactaaaaataacatttttttgtaatgttctctgttatatctatcatattcatatatttctatccttttattgagcatatctcttgtaattgtttttttttttcttaatcttaaaaattaaaatgtagaagctttttacaatttcccacaagtaattttacaattttttattattattttccttctatatcataagagtatgttagtatatgtcatcaatttctaaaaaaattatagcaaatgatcctaaatcataggattatgttaaacttctagagaaatgactattttaaactatttattatttatattgccttttgtcacataaaaaaatctattaagtttttttttttttcattttttttagaattagaagcaaattatttaaatattatggtatatctatattagttttgataaaatcttttttatttatttaaaagttatgtcaaatagttttttttaattttttatgagttgttgtgggatgttggtatatagattttgttatacaatatatttctattttgttgtatggtatattattattcttagatgatatttattttttatttttgatatgtataatatagtggtatataattttattagcataataaaaatattttaatgtatgtatataattttattggcatgctacatatatttaattattatttttatatattttgcttgtatgattttttattttaaataatatttaattaatttttattttattatatacaatgatagtatataattttgttat

SEQ ID NO: 406339 - DNA, 447 bp, Cannabis indica
aacatgtcaagaaatcatcaataacataggacaagaaagtttgaaaacacaactatacacactatcaaaaaactatcgacaaacaattgagaacgcaaagataacatgccaagattaatgacttttttttttgctaaaacacatctcaatcatgattggaaatgtaaaatcatttcccatttcgacaaactgtcaagaacctatcgaaaagccttcgagaaaggtcatccctgaccttaggacattcgagtggagaacctttcaataacctatcgaaaagccttagagaaatgtcttccctgaccttgggacatttgagtcaagaacctttcaagaacttatcgacaacccatcgagaaaggtctttcttgaccttgagacattcgcatcgagaatccatcgagaaattgtcgagaaaaatatgaacacgcagaatactccaaaaaa

SEQ ID NO: 406340 - DNA, 969 bp, Cannabis indica
gtaaaaatgagaaagccccaaaaaattattaacatcaatttaaatatttacttataaatatttaaatttttataacacaccttataaataaattaatatataatcttaattttttatattttaataattgtaattatagagttataatattcagtattatatttaaattttattattattttaacttgtttataattgataaattcatatattattattattattaatattaataataaagttaaaggttttttaatatgtcgtgccatgtttttctagcttgtcatgtgtcgtgttttttgagctagtctattcatgcttatgtattgtgtctttcatgcttctcgtgtcgtgtcgtacttaaggacatatttttcatgccgtgccaatttgtaacattgtgtcgtgtaatgcccagcccgttattttttcgtgcctagtcgttaggggtgttcattggatcacatccaatggatttggacccatccgatccaatctaattatttattggatattggattttttccatccgatccaatccaattgaattgagtcatccgatccgatccaatggatgtattggattggatcagttccatttattggatgctttaattagtcttttattggattagattagatccatccaatggatccaatggatgaatccaatccattttagccactatttaggctgatttcattaaaaagtaaaaaaaataatatgaaaaacataatttaaaacctaatagtccaacatagataataaaataatttataaaatattaatatataaaattataaatattaactatgattggatggacattggatgatattggattggatcggttcggttatccattgaatcggatgtctcatccaacatccgatctgatccaattggatttttaaaatttgcatccgatccgatctaattatgagtagatatccgattctattagatcg

SEQ ID NO: 406341 - DNA, 673 bp, Cannabis indica
atatttataaatacttttctcaatagtgagcttcaagaaattatgtacatgaagcaatcaaatgggtttgaggatgctacaaaacctactcatgtctatcatctccacaaggccatttatggccttaaatagattagattgaaaatctcaagcacacattattacaatggggttttattgcatcaaggtcagatactttatgaagcatgataaaaatgttaaataaattatctacttactttttaagtaaacaagttaagttatgtaaataataggtcagcattctcactaaattcaccaatttaatttacaatgtaacaactcatatattagattatttatgcacaaaattgaatattgatggtaacatgttactctataaagtggaatagaatgtcaacatacatatattagattattttttttacatagttatattactcatatacatttatttagaaaattacatggattaactatttataagtcatggttactgaaaaaccgtgtttttgtcaaatatcaattatatataagaaaatataaaactgtatgcgtctgcagaagcagaaagtaattctgctactgcagaaactcgttttgcaatgacaaacagaacaggcagaaaataaataacttgacacaagagatttatacgtggtatcagtgttct

SEQ ID NO: 406342 - DNA, 508 bp, Cannabis indica
tgcatgcatgcatgcatgtgttagaactaattatgaatttatgaatatgcatataaatataaatatatgggtaaatactattttagaccctgtattttacaaaaattaccaataatattttgttttgttaaatgataaaatagaccatttatttttttaaatggtaaaaataggacctgagcttaaattttgaaaattttctttttaatataatcacctttaagacaatttctaacacgaacagatatagaaaatgtaattagttttatcataatatgtctgtacacattgttattaaattttattttaactaaaaaattagtttaaatttttatttatataattttaaaaaatatgaaatctattttatcatttaataaaataaaaaatttaattagtaccttttttaaaacacatatgatatacccattcaaataaaacatctagtcaagttgattccatggatatacataaacgtataataagtaagggcccgtttggtacgcag

SEQ ID NO: 406343 - DNA, 731 bp, Cannabis indica
gttatgttccgacgcaatcttcacgagtgtcacatcacatctttctactatatctcttagtagatggtaattcctctcaatgtgcttgcctctcttgcggattcttggttgcttggagttggccacttcttcactgttgtcatagtagagcacctgtagtttttctacttctggaactacttccagattcgtgtagaacatcttcaatcaaaccgcttccttagctgcttcacaagctgctatatattcgacttccatggttgaatctgtaatactagtttacttaatgtttctctacactacaactccaccaccaagagtgaatactgacacagatgtggactttatattatctttgtctcattgaaaattaaaatccgtatatcagtgtgttgtgatattttgcacacgcaagtgcacgtatcgttacaagtagtaaactcaccaggagtgaggtcgatccctcagggattgtagttaagtacgttaaaattaaatttttacttctatttggttaaataaaaattaagaaagaaatttaaaataagaaaactagaaagaagcgaataattaaagaaaatcaatagttataaaaactagggcttcgatttcaattgtttctattgattatggcctaatatgactatctccctatttctatgcaatagcaggtttactaaggtaatttatagtcttctcagagatataaatctcaattacatgcaaacttt

SEQ ID NO: 406344 - DNA, 734 bp, Cannabis indica
tactttcaaaactcatcaaattctaacatcaattatataaataaagatatatttgagagttaatcaccattatttgtacttttcaattttactatcgtaaaactataaggaaacaccgattcggtgcccctaccaggttccgaacccatatgaccaagattccaccaaagggttgaatttcgtttcatgaaacttaagatcttcgcctcactctacaagatattttagaaccaataaattataggaattttaatttgaacatgtagagaatggacttctctgtaatgtaatgtaatgtaatgtaatgtaatagaagaatcgagtatcgaaagggaatcctacctcaaaaatttttctcatttgagctactcctaaagggtgaaactgttaagctcaatagaatgatcaaattgaccttttctttctattcttcaatcaatactatttcttatttttgagtacttaaactcttttgtatatatactctccctttaaacttttataaaccaaaccaatactgtatttcctattgattcaagatacctcagacagactatggtcatgatttgcctatcctattttaccaaaacagagaaaacaaaacaaaactaaaagaaaatcttttcattgcccaaacaaaaggatacaaagtaaaagttatcaaagctatcatttcttgtatgtatacatatatgtgtgtgttgtgtaatttgaagttggtgtgaagagttaac

SEQ ID NO: 406345 - DNA, 453 bp, Cannabis indica
aggtttgggtccgggtccttgtcttgcggttctttttcagtttctagtttcgggtctcaaattttggtcagggtctgggtttgggtcctgcttctggttcggttccaatttcaagtcacacagtacgagttcgggttgagtttgggtctgagtcttggttcgaatcttgatttgggtttggggggaggtacaggtccgtatttcggtctcggttagggtctgagattgggtacggtattcggttctgatctgggtcgaagccccaatccctttcaaagatcccagtctggttccagtttaagtttcagttttggttcccgagtgtgggtctgggtcctggtatgtgtccgagtcttggtttgagttcgagtttgggttcgggtgctattctaattcctagatccaaacactgactacgggtcaagtccaagcatcgagtcccggatcccaagt

SEQ ID NO: 406346 - DNA, 835 bp, Cannabis indica
tatctcaaattacagtgtctcatgagttgagaatacactgtaatacataaagatactcatcctatagaatctaatagcccactctattcttgagtattaaggttaacttggaagattatggtgtgaacttttcagcaatagttcttggattgaatgatcgtaactatattttttacctaaaaaatcattgatttaatgtgatgtggaataatggtgggcaacttttaaatttgtcaaccattggagtatttttttttaagaaaaaagtgataaatcttatgtggatgagagaaaaaataatattttaggatgattgtgtattttagcaaatataaatgagataattatataaggcaccattttttataaaaaaaaaaatatatatttttacgtttaaagaatttttttttacatttttatgattttccataaaaacaatacgaaaacaacaagaaaattacataaaagtaacataaaaataacatctaaataatattaaaacaacaataaaaaaaaacatactgataacaaaaaatcaacaacaaattaacaaaaaccgtattttcttcaatattaatttaattctctcttcaagtagctataatatgtatgaaccatgcactacgactattattattgcaattattaagtttggctagagcatctccaatggaagtgtaaataagtggtgaaaagttaaaatatagctcatttaataaaaagtagtgctccaatggtatgccaaaaagtgatgtaaatttggcacatagcaaattttgtgccaaatatggcacaacgtttgctattatgtcaaatttacaccacaataaatgca

SEQ ID NO: 406347 - DNA, 1021 bp, Cannabis indica
gattaaacacaagaattacaaatgacaacaaattgtaattcctctccaagttacaacatgtaggttaatacacttaataaatattatttatataataatatattacatttaatctattatcaatattataaaaataaatataacacaatatttttattaggattttgaatattaaagctttataacatatgtcgaatctattattatatttatatttataacttttaattataaatatatgctagtaattaattaaaatatcatttacaaaaaaaaaaaactaaaatatatacacatttttttttcgattttttttagagatgactaccccctctccctctatgtgagttcgcccatatatataatatgtcactaatttttttttattatttattttttatttatggaaccactagattattgttacttctaatagcttaaatcttaaaagtaaatttagtaagcgaatgatcttatgaatgaaaggtaaactggacaataatgttacaatttatggaattaagtaaaaataaataacaaagatatataaattatcaatagtccaataataatattaataaagttataggttggattgcacgccgaaaataattaactatttatagttagctaatgaaacataatatcattattaacgttaaataattaataatataagattattattatttgtgattagttcttcttcaccaacttaattttcgggcccacattagggatgcacacggggcggggaattagcggggagtgctctccccgtccccatccccgttccatccccgccccatccccgtttattccccatcggggacggggcagggaattccctaatggggcggggaattccctattgtaaaaataaagtttattttaaaaatttaaatgtataaaattattaaattacataaaagataaaatattacatattatttactattcaatatagtaattattatacaaaaatacaacttcaaaaattataaaaatgatattaatatac

SEQ ID NO: 406348 - DNA, 974 bp, Cannabis indica
aaagaatgaagaaagaagcccaattagagaagcccaatatgaaaaaatgacttgttatattgtctacatttattcccaaggagaagcccatcaaaatgctccaacatgattgtcatcaatctcaattgtaaaggctgtatatacttatcgtgttgactatggatatggtatcgattagtcatatatattgtaggttgctgtaaacttttattctagtttgttcaactgatggttttctctgtacaaggtccagaggaactgggccggcccattaaggtgcccaattgtttgcactttgttttgaggtctttgcaaagaaaaaaaattgggccttctccttgtttagcgtataaattagaaaaaaagggtttttatatgctaattatgtaaaatctcacaatatttgagggatgtcaaacctcaatttgatgcaaaatgtgtatttttgatatcctgtggttgatacatatgttgttcatagagtatccgattcaatacaatctaatcaatttcgtaaaatacagatatccagcaaatatccgcacttaattatatatattttaaaaaaaattataattttatattattaatattaaatttttctaaagtaatattaaaaaaaaaatctaagtttcaaaaagaacaaaaaaaaatgaaaactctaatgtagtaactagttaatctcaaatatagtagcagaagtaattttggacttgaggcttttaagtttggggttttttatatgagaaaaaaataatagaatttacttttatatggtagaataatgaaggggaattatctcatatattattttttttaactttttttttttttaaatttacggtttgggtttctaaagtggttgcagtgctagttgcaataagggtttctgtacgattttttgttacaatttaggttgcagcgccagttgcaataggggtttctatgtagaatttcgtaaaaaatgcaaaaaa

SEQ ID NO: 406349 - DNA, 550 bp, Cannabis indica
tgagcttaaaggatttgaaccaattgagaagaatgacagtacatacacaactccaaatgaaactgaggaacaaccagatttgtctaactagctacgagcttactagagatagaaccataagagaaatctatataccagcaaagtttgcagaagctgatttgattgccttctgctttgtcaagaggcgtagctccttagaagagcaacatatacatgcatggtgtgttttttaacttttgtgacatgttgttgaagtagttttctgcacgattaagtccatgaactttgtggatcaattcataaggcaagtaagttgcctatcactacgtttagggcctttctctctttaatctttattgtctctcccatttcactttaattaatatctacataaacaaggtcactagcagatattacaaaattcaatatttatatgattatatgcatctttgacacaacctcttacatccaaaataattcttatccacaacacaagtgaaagacacttccgaaaatccaggtgctagccgaccaccattcatttgatttg

SEQ ID NO: 406350 - DNA, 977 bp, Cannabis indica
tcaagtcatggatcgacgacatatcattatcgaggttacgtttatgctcttaatttatactatattattttcatgaataatatatatgaaagtacgtggattaattaatttgcctacattataccttaccatttcttttatttatttcagtctcaataaattaccaagagtttatctattacttacacatttttcatttcataataaataaacaatcgtgtttcaaatatcattaaaattatgttaattaataatatttttttttaagagtggcacgtatatatattcacttgtttaactgtgtttcttctttttttttttagtattgggcaaatctacctacacatcttttagattgcataataactaaactagctagaatcgtccatagatttcgtacgattcggtgatgtttgtgtttcataaataagagaaattatatgagtgatgatgacattaataataatggtacaagtattttgcttccaagtttatattctccagaacctttcctgaaaccgatgatgaagaagaggacatttctgaaccagaagaatgtttatatttaggtactgattatcatataatgagagctctaattgtaggcgatcctctcaggaatcccaataattgtattgttgttgttatttatagcacatcatatgaattagcttatattagaattggtaaagacacaacatggaaaaaattttgtgaatatacacctggatatagtgacattattatacattataagaatcaattatatgcattgtggtgtacaggaatagaactcatgttgctaagtccaggagaatgtgatcctaaaaaggctatgaaactagttgcaactaaagaagcaacacatgaatccaaactatatatgtgaatcaagtggggaacttttgttagttgaaaggtgttttgattttattcccaagatgaattatgacttagagcgtgtgacaacattgttc

SEQ ID NO: 406351 - DNA, 634 bp, Cannabis indica
ctttacttctttctactctctctctctctctctctctctctctctctctctctctctctccacactattttttctatctttatatatatatataaatatatacaataattgtacatttttatatttttttcgaaatttttttcctctctcacaaaaaattttatttttaatattttaaaaaaaaatcaaaattgttaaaccgaaaactttctttggtggtgtggacatcaattttcgacaagtggcaagatggatgacatcacggagttgagtagacccgagtcatagcagtcgacctgggaggggaccctaatcttgcccccaagttgacttcgggagctccggggtaggattttgaactttaataacatgaatctaactcactatattttagtatttttttaccatcaggacatggagcaacctaatccaagcaccgggagctaaaattacatgaacctgcaacctagaagccaacctaggcacctagggtttcacctagtgcctaagttgacatttccaactagggtttcagtttttgggaccatcttagtgcaaaaggatcagaacttgcattgggacatcaactagacataccatagacatatttgactcatcagaatcagaatcagaa

SEQ ID NO: 406352 - DNA, 949 bp, Cannabis indica
gtcttctcactggctcgagacttttaatgatgctacacttacaaattgtgagttttcttcctctgatcattctcctattcatctagagcctactgtcttccaacgaaatcttgggaatgtccaatttctatttgaaaatgcatggactcatggacctatgtgctatgagattgttcatgatttttggagtaacaacccgcatctcacggttcaagagaaaataatggcctgtgcttctattcttgctgtttgggggaaggagttcacgggtgggttcaagaaaagaattgatactagtaagaggcggatgagtttgttcaaggcaaaggcagatgatcattctagttcggatgttccaggaagctcaagatcaatattttggtgtgttggctcaacaagacactttctggaaacaaagggccaaacaattttggcttaggaatggtgacaaaaacagtaagtattttcacgccatggctagtgctagaaagagaagcaataaaattcagagattattaaactcggatggtgttagtgttagttggaatggaggtttggaacaacttatcattgattactttgtcaatctctacacggctggttcagccgagtataaccaatttgtgagtggtattgtgccttctgtctctccagctcaaaatgcagaactctttgcggatcttacggatgaggaaattagaggtgctatctttcaaatgcacccggataaatctccgggtcctgacggaatggggccgggcttctttcaaaaacattgggacatagtccgtggtgatgttgaacaattggtaaggaatttctttgctaatagaactcttcctgatggtttaaatgtcactaatcttgtcttaatcccaaaaaaagaagaatccttcgattatgggggatctcaggccaatttctctttgcaatgtgctttacaagatag

SEQ ID NO: 406353 - DNA, 621 bp, Cannabis indica
tttgtgattaaaaaatttaaaaataaaaattttaccaaaggccactgtaatttccaccatttattaaaacaaagttgtattattttgtgttttgatttttttaacttgtacttaaatatctaatttgaaatttcaaaaatatcgatcccgtttttgttaaagagtaagtattatttgacgcaaatgatgttaattcatttgattgatctatatttaaatttaaccaaaaaaataaacaaaattacctttaacgtgttttcttaatcttattggtaaaattcaatttgttaggaagaacaataaacttcaagagcagtaaaataataaagaattaaagcaaaacaatttactcagtttgttaaaactactaaaagaaaaatatatttgactttatcacttctaaattacatatgttctttatcttaatctctctacccaaattccaatacactctttgctttttcacactctcactacacaacaaactcatacacacttctcttttcataacttactttttttctctacacacatacctctctcacacacaaaacacatatttataaagttacaaaatttgggttaaagacaacttgaggacaaagactttcctttttctac

SEQ ID NO: 406354 - DNA, 795 bp, Cannabis indica
ctctatgtaaggatcaatgtccaaagactcctcaagaggaagaggacatagaaaaagtacccttatgcatctgtaggaaatcaagctagctgtaaattagttataaatttacatttattgtatttttcatttactctagtattactaggtgttcacattatattatatataccctttgtatatactaaaatatatcatcagaaataaaaaaaataaaaacatttttctctcatttgcttcatggtatcagagcatttgaagcttctcaagcatattgtttttctcactccttcctttcttaaaattagggtttggaggcgttatcctagaatattaattaaaagtagttttctattctcacctttgacccagggagcttgtcccacctccgatcgacaaaacccaatagtctggcgtccaaactcaattccaaactaaacatctaattgttaaagaccgacaatgctcatgacttcttcaattctgtacttggatcatatttgcaatccaatgtgattgttcatcaaagttcttgcatagacacaccataacaaaatggtgtggctgaacacaaaaatcgtcatttactagaggtagccccatctttactttttttcatcccatgttccaaaaatattttggggtgaagtagttctcacagctacctatctcataaatagaataccatcacgtgtattaaaaatcaaaactctgttgcaaatcttcctagaagcatatcctcactcacatcttgtgtctcaaattcccttacgtgtctttggttgtgttgcattt

SEQ ID NO: 406355 - DNA, 572 bp, Cannabis indica
aggcctccgggagcgtagggggctccggatgccttctccgggaggtaggtctcggaagacgcctttcttcattaagacttagcaattaatttaaatgttaagatcttttggtccacgtgtccctgtgcggttggtccacgtatattgggcaaaatgaggggcaacataaataatagtagttttattaatttttattatttattttacaatttttaattttttagtattaatttcaaatattttctttccttttcttttaattgtaattctattttacattgtatatatgaatattaatttctttgcctaaatgggacactagccctcacttttttcttcttttttttttcaaaaaaaaaaaaaaataataaaaaataaatagttgtgtaatcttttatattttagcctctattttatattttcttacattgaagtcactactaattttatttattttatatttttaagagttatttatatgttatcatttatttatatatatatatatgtagcattaaaattttaataagtttttaactgtatatattttatttattaattatttaaatttt

SEQ ID NO: 406356 - DNA, 878 bp, Cannabis indica
tatatatagaaaaatatcatttttaaacttataatttataaataattaaatatttaacaaaataacaaattttgaatttgaaaatattatggtaagtgtatctataaaaatatctatgttaatttcaaatttattaattatttaatttgtcatataagataattttaatataatattttaaataaaaagacaaagttatcttttaatttaaaatatgttaaatatcaaaatatctaatcttataattaaataatatataaatattaaagaagttaacaaatttttaaatctgaccataataggaaatatttaaaattggaaatatttaaaaaagaaaatatttcaaattggaaaaatttaaaattggaaaaattgaattttgggaaacaatcccataaaaattggatttttggggaaaaacccacaaaatatatttttgggttggctgccgaggaatggctgcatgtgcagcctcaggaggctgcacgcagcccgtgcgtgcacggagtaagggacggggcgccgagaaaacttagcgcttgcagggtctctggcggggagatgtgggcagacagcaggggtgacacgggcgtgtcacgcgcgcggatgggggcttccagaccgagtgcctggtgctcacgagcacccactcgacagccttgaatcccgattttccaaaattcataacttcaccaatttttatcgaaatcaaagttccgtaaaaacaaaaattcttaatttgaataaggaatacaaataaataattttcaaaaatagagaaaatatttttcaattggaaaaaatttgtacaacacatacattcaatcacaaaagcacataaaccaatatgaaaccatccaaaatcaaacacaaaacat

SEQ ID NO: 406357 - DNA, 579 bp, Cannabis indica
aaaacgatttgtgtgtgatttggatggtttcatgttaatctgcgtgttatttgatgattgattgatgcttgtgaaattttataaaaataattgatttttcgtttctagagtattttattggatagtttggaaaaattaagcaattcacttttttacagaactcgatttcgattttatttgaattagttatgattttttgaagttttaaaaaaagatagagtgatcacactccctcacgcgcgcggaaccgaggttcactcggtcagcagcgtgttcggacagaatttgtccgaaggaacacgtgcagggatctctgaaatcccttcctgcgcgtgtggagttcatgccagcagcctctggcgccaaggtttctcgactgtgcactcagtgagcgcgcgcggatgggtatgcagcgcataccatccgtacagctcaaaattttttcgattttcttcgatttttcatgctatttcatggaaataatttcgatttttgtgtagttttgtattttgaattttacttttcatatttcaaatctaattatcagaattaaattaattaaaatttttaaaattaatt

SEQ ID NO: 406358 - DNA, 543 bp, Cannabis indica
taaatttaaattacaatatttttttataaaactattttctactttatagcacatttgatataagaaaaatatatttaaaataaaccatcttgttttattatttggttaattagaactttgtactatttctaatttagctgtagtatttagttaaagtgtaaaattttaagaggagtattactctcaatttcctattataattttttagtcaaatctctgtgcccaaaaatacatgacgaaatatttttttcaaatttctctatggtgatgttcgttatgtttacaacatcatccctgtaaatttttaaatagtaaaccgtgtcgaaaatacgtttgaagttttttaaatacgtgtagtaaactagaatatcaagaagtctgttttcggtattgtaaattatttggaattttcaaaattttagaggaatgatactataactataacgaatatcactacaaaaaaaaatttaaaaaatatttcgacttgtaatttcggacgtataaattaactaagagattataataaaagattgcaacttttac

SEQ ID NO: 406359 - DNA, 610 bp, Cannabis indica
ataaggtgacgtggcagtctaaaaaatttctttttaaaaaaaatcaaatctattttatctaagttttttaaattttactaatgttgcccaaaaaacatggaccaaccggcttgagacacgtagactgaaggggtttaacgttgggataattcagctaagtctctttcgtcaaagggatcagcatctaacatgcctcttggagaaggcatgtgagtttcgcatactcatggagagcaaagctacaacaaagcttctccgggaggtgtcaaatcctatctgaacagtcacctcgcatttaatgccgcatgggagaaggcgtattgaaattgccatatgtcttaaagtctgacggcgtaaccccctttctgtagctgctacgctatgattagtaagcctagtgacggctactttatgaggaatcacatcagtcaagaaggataaatgactacatccattaaacccctacaacgcctagggattagaccatgcatttcctatgatgtatccattgggaatgtgtgcctttactgaaaattacagaaagacatgtacctcaattctacggatcaccccacaaaaacactataaatacccccaaactcattaaggc

SEQ ID NO: 406360 - DNA, 576 bp, Cannabis indica
taaataaaaaaaaaaaaaaaaaaagaatctctatatttacatacatattgtagtgttgtagattaaaaatttaaggtggtgttgcttatcattagtggtcattatggtacttctatgaggaatcgtaaataatactagtaatcattagcaatcaaggagaaataaaggagtaatcattagcaatggtaaataaaggagaaatataatatcacactctaaaattactttagagatcgtttgacacagtatttgaaaagttaaaaattgtttttgaaaaagctgtgataaaaatatttttagtaaacagtcaaaaaaacagttttttgaaatttttttggagaagttacagctaaaagctgaagcaatccaaaccaaactaaaaaaaaaattattttgattaaaagactataatatttttttttagatactaaaaccatatttacttatttattacatattaaaaaaataaaaaacattaaaataaactaattataatacaattaataattattaaatctctttttttttttattaaaaataatttttattttactttaatattaacaaacaacatca

SEQ ID NO: 406361 - DNA, 524 bp, Cannabis indica
attactacatcgatataaaagactctaaacccaaagcctagaccatattagaagcattgaagaacaaaatactaacgcatgctctagagtctccgtaaatttccctaaatatcattgttgtttatgattggaatactttttatatctaatttagaattggctaataataattattttcttacttaatttttttttttggtttaataaattatatcacttgaaagtttcactattttattttgttaatcattttaaatgttttttaaaaataggtattaattgatttttttttttttatgaaaatgtaagattattttaaattattttcataatagaagggacacaatttgacaataatataccgaaggaggaggaatgcattagaagtcatagttcataggataaaattactaattatttaatagaaaatataccaacgtcctaagtaaaacatgttgtaatatataaacgcttaattcaaaaaaaaaaaaagttaaggtaaaatatttaacatcactaataat

SEQ ID NO: 406362 - DNA, 786 bp, Cannabis indica
ggtactgaggatgcattcaaataaatataagagatttaaaacaaaattcgtatgataccattttagactcttcatatttactcaaaagattctttgttaaaaaaaatgattatatgttttggaagtactttttcttgactttgtaattgttaaatttgttcaaaatattttaattaaaatttggttttaggtaactattttgaaccaaagttacaaactatgaccatgagatgagtaaaagtaatttactctattaataattaggagaaggatgttggaatcttgattctagaggtgattgtgcagcggacagtttggtgttttgcaaacattttgtatcacttgcatatactattttaagtaattttctaaactgcacttgcaccacaagtgtagtatgactgtatgagcagtttacacatattacaaagtttttttttttttaatttttaaaaaaatgaagatatattgtacacctaaagatgttagatttcgatattgttgtattttagtaatagtgggctactagaagtaccgcatgaatgaattatgaagtattagagtgtattggcccagtttgtcagctaaaaaagtgcagctagacgattaagcttcagcccatttaaatctagtaactagtatacgttgtgggccttgaggaagagtttcagcatctactacctttaatagtcctctagttagatcttagtaataattacatgaaacatcaatttttgtaaaaattttacattttacgtttattttttattttttataattttatag

SEQ ID NO: 406363 - DNA, 665 bp, Cannabis indica
attattttaaccaaaattttgacaccaaatatgtcaatattttcacatatgcacatagccaaacttgacttagaatttaaattcaaaataaaataaattaatcaacaatatctcaacatattttgattaaatttgtggctcacccccacatttctagcacaaattaaaatttttataagaattacttttcaccaatttaattatctaaataatctccacattatttaaacaacttaatttgtaattatttttctaaaatgcctcttagagatcattattagaaaattatcatttgacaatcttagtcttctcaacagaactaaaatattaaactcacatcagcatttaacaaataatgtgattattttacccattattttaaagttatctcctcaatgagatcaacccaaatattacacaaaagcttacaaaatcctcatcaattttgttcactactttgattatttaatattcaaaattgcttctccaatcttgtaatcttttcacattttttttaaatccaccttgatttacttttattgattctaaaattgttcttccaattatatggcttatttcacaatttgggatctacttttgatccatttatttttgctatgacaagacatttatcataagagtaactctcatagttcacttttttt

SEQ ID NO: 406364 - DNA, 827 bp, Cannabis indica
tagtgacaatttgtatttgaatattatgttttagtaactagtaactttttgttgtgactaaaagtcacatttagtcaacaaaaaaattggtggaaactaaaaaaattatcactaaaagttgttatttttttgtagtgataattgtgcttcaatacaaaaattggtaaagaaaaaaattgttatatggtcatttaatacaattatattgaggatacacaaattgttgcttaaataataacaatatggtaaataaagaatttaaaattttctaaaagttaataaatcataataattggtgatattgtatagtaaataaaaaataacattaattgggtaaaaccttatactaaatttagtataatttttagcacatgtcaaattttatattttttaaaataccattagaatagtatttttttttcttaaatgtgcttataatatatagcaatacactatctttttaacactttcttcgaggttctcgtattaatttataataagtttaaatatatattagcaaaatgaaaactcaaatatcttttttgaataaaaaactcaaatatcttaaaaagcaacatgcactacaaaaaattgatacttttagtgataactttttagtcacaacataatttttttgtgactaaattatattgtgacttttagtcacaataaaatattacttgtgatcactaaaacatagtatttagataaaagttgtcactaatttagttttaatcataaaagtatggtgactaaaaatcatttagtcacaacaaattataatttttgtgactaataccttcagttacgaatcttttagtcacaac

SEQ ID NO: 406365 - DNA, 516 bp, Cannabis indica
aaatagtaattgttatagttttatatgtacacataatttacatataaaattaacacacatttatatagtaagtaattttaattaattatttttatttaatataggctctacttaataaaattaatttgccagagtgtattatatttgtataaattatgtgtgcacatattatttaagaatttttatttattttcattaatatctatcaaatcatgctctttaaatttttatttatctaagactttccttattgaaattagataaaaagtcttaaattcaataatctcaatagttcaagagagatttttaataatcttaaaagtttaaagaacataatttaatacatgtcaaatttaaaaaataaaaattctaatcaacctaaatattttaaaggctaattagtaattttttcccccgaactttgacatgtactaaatcgtgccccctgaacttttttagccgttagaaattccttccgaactattgagatccttaaatttaaggacttttgtctaa

SEQ ID NO: 406366 - DNA, 571 bp, Cannabis indica
ttataaatatgaaaaatacattttcactgttatatgtttatatgtggatgacttactaattttttgatcaaatattcatgttgtgaacaatttgatatctatgttatgtgaaaattttgacatgaaagtgttgggttttgtgccctaaataaaattcatttcaataatcagatttataaattaataaagatcaaaaatcattttatgttgcatggttcccattatttacttcatgattatatttaatgtataaactctattaagtccagaacatataaaaatatgtatatatttgttcatgattatagtgtcttcagcatagtggaatataatcatgattatatgttcaaaagtttaattcccatgatttgtcagttcactgaatttagactggcatgataatcaacgataaggtatcttacaccttggataagtgttatgtccttttcagggcattgacaaagtttatcagtattggatgtatggagtatacattggaagggactgatattgatcttggataagatatcaaaaacttactgttatatctttctaagtcaatatcaatggt

SEQ ID NO: 406367 - DNA, 556 bp, Cannabis indica
cttattttaagtaatataattgtatcaacattaataaaatttaaactattctatatgtatatttatataattgattatattattttaagaaatatgtgttataactacaatatacatacaacaaaacaaaaattaagatgtaattttttaggttgtactcgaaaataacaaaagtagacttatatatatatatatatatatatgtttgtaagttatataatattggtgatgaataatttgatcatttagtaattgttggagttaattattgttattatcaggctgatgataacaaggatggaaaattgacacttgaagagatgttgaaccacgagtctatattttacagcactgtttataatgatgatacttatgaagattttgaggatgatttccatgatgaactataactataaaattcatatatattacttcatattcattcattcatgtaattaattaatttaatatatgtaaatatttacttttttttttatcatcctgctctattatggttacatttttctttgattactaataggtgtaaacatttctt

SEQ ID NO: 406368 - DNA, 363 bp, Cannabis indica
ttagttgggttttagaattgaccaaaatatctctaagtgacttagaaggtttttggatgtagtgaggaataaaatggtctttttggccattttattctttgtccttttgtgaattttatttaagtattacaatccgatttcattttaatttattagaaaaccatacgttaatttcattttattcaaagaaaaaggaaaaattaagaaatccaactctcctctctctttctctctttctcgagctccctagaaccagctagggtttgagatttttcaacctcaattcagagatttcgagcaagttattaaagtattcaagctcaaggtagtgttctagctcacctcttgttgatttctttaagt

SEQ ID NO: 406369 - DNA, 854 bp, Cannabis indica
taatacaaattacaaattatgcttttcaaaaactatctagaaaaagaattcacctaacaactaacggagtaattaaaattgtatttaaaatatacataataacccatataaaaatcacccaataattcaaaagtaaaaaaaaaaaaattaaaaataatatatagattaatttcttttttaaaaaaaaaaaactatctcaaaaaacacaaaataactttattagttttactaagaaagaagatatttaaaaaagttaatgatatacacacttttaatttacacattttttatacaattaatgacattaaaaggttgattttatccattttaaaaaaaattgattttatttatgttcataattcattgatgttatactcaagcccgaacccagcacaggccatttaggtttgtgtttagaaccctaactgaaggagatctcaatttttaaaattatcactttttagtttttacatacaaaagctaaaaaatttaaaatgctacttcatataaaaattagaaatataacaaacaatgtaacggaccttgcccatctcaagataaactatggttatacctcgaacttgtaatcctacgtcatgattggtttagtaaacctttggaaatctctatgggagatttgtatttgcacttgatagattcatgtcatgtattcaacttgtcatttaagaccttttttaaaaaaaactttccacttaagaaattatttgtaatatttgtaacatgaaataataataataataataataataatattttgaactctgtgtttcgtaaaagttaccaattgaattatctgttttgttaaatgataaaatagaccatgtattttctaa

SEQ ID NO: 406370 - DNA, 608 bp, Cannabis indica
tattctaaaccgcttaattaacttgaatatattgaataaactaaattatataatatattacataaattaactattttatatttaatgtttaaaatttatagtgtttaacttaaaatttaaactataactaataatttttattatatttagatattgaagttaaaatttaaaattaatactatatgattacttctttctttctttttattttttaatgaatatttatttaatattttaatgtttaatgaattaatattagtcttatattaaagttaaaattaagaataattagcatttttttttctgaatttatgatactacctgaccgtgccccttaaaatatacaacttaatatgtctcctcgaacttttatatttataaaagggatattggtggctaaaccacttgaactttacggtttgtaaacacttaaccacaaaaaccgaaattttggcggctaaactacccaaaccctggttccgtcttgctctgcacacctccgtccaaaaatcacagttaagtgccacaatggactgtccacgtgtacacacgtatactcatgacaattttttagtggtccacgtaacattaatattaaaaaataatta

SEQ ID NO: 406371 - DNA, 519 bp, Cannabis indica
gaagccacttaggagttagaatccagtgtgaaagctcaatttccagagtttttcaggttatatttcgaggatgaagtatttttaatggagggataattgtaatgactgcgtacttagaacatggattagtgaggcaataagctttaattatttatattttatgattatatgtgaatatcttatattgtgagccctatttttaaggaataggaattagagttataatttctcaatttttgagattttatcaaactctaagtgtattatatatggtatatgtgaaaaatattatttttataatttttgctcggtaacgatagaaaatacaacagtttggccattagagtcacatgggattggttcagaaccttttatatagtggggcaatcataagcgatctttaaaatattggggttaggtgggattatggtattagaccattttacccctaagccttaaggttgcttaagggtgaaataaggggcaaaaatggtattttgcctaaaggattttatagga

SEQ ID NO: 406372 - DNA, 778 bp, Cannabis indica
gggcagtgtaaaatgaaaaatcatacacacacacaacgaaagctaaactaagcatttgaggttgcccctaaagcaagacaagttgaaaaagatggaaaaagaaaaggtttttatgaatgtataataagaaagaaaaatgaagaacaaaatcataaataatatgtaaaataaatgaaagatgcttgaagaatatagtagattatattagtaaaggagttgagagagaaagaaacctgttagtgagagctgagagagaatgccaagagacaaagcaaggatgaagatgatcagatgagtgatgaggaaagaagtggaaaggccaatataatctctctctctctcgagtctctctttatgtatattaagcgggaaaccaagaaaggctttactctacacgtggatgctcaccattgtatcattttttttttctttagaattgaatagagaaatgtttaaaggacaataagatttgctatcaaaatattactattagtccaattaagtattgcatctcgtataattgaatataataatttttaagaaatacacttgcaatcacaagacaaggtgctaggcacactgatacttaatagcaatgctcataatttttttagtgcaattgcaattaaatatgagattctatataatttagggtaagtacgtactattttaaattttgtattttgcaaaagttactaattgaacccactattttgtaaatgacaaaatggaccttatattttctaaaataagtaaaaatagaaccctgagctcaatt

SEQ ID NO: 406373 - DNA, 580 bp, Cannabis indica
atatattatttttaagtttttttaaatttacggtttggatttctaaagtagtttctatagaagtttttatgtcgggttgtcatacgatttttgcttgcgatttagattactccactagttgcaatatgtgtttttatgtagaattccgtaaaaaatacaaaatatatatatatcattacaggtcatgtcttcttcatttccccttttccatttttcacttttttatttatttctcaagtggttcagttgatctcttactaattttctttagaaaatctatcattattatgcgtctctagatcatcatcactactctcaagttgttcatgtaaattttcagtatcattaaaaggtttttcaaactcagatggaattattccagatgaaggtgtccaagtatactctcctgtagaaacagtgttcataaaagttttatcttatttttctctaattctggtttaattccccgaatgcgaaactttgcagcaccgagatgagtctacaaaaagaattttgttaattaaatgtaccattcataaaaaagtctttagtttcatataaatatttaaaagattataat

SEQ ID NO: 406374 - DNA, 619 bp, Cannabis indica
atgtagagtttggcaaggggtgagtcttctcagaggcgtctttggaagggtgctgtgaagcgttgggcttcttcgtcaatgacgaatgtgcctcaacgatagggtggttggggtattccgtgtgcactcgatggatcttcggttgaaaccattggtttgtgcctttcatcatccattctgctatttgggtgggtagaaattttcaaacctgtctagtgaggcatggggttccagtgtggtggatcagtggtccgagtttgtggttctgacgtcggaaatatgaagcttgtggctggttggatcttactcaccgatggattagtgatttttgcttttgtttgttattattttattttagaatttattttgttttttttttgtttttttttgtctttatgttgtttgtttgtcacagtggtagacttgctccttttaaagtcaagagagtttgtatctttagtttatttctttacctactatcgacggtggtatgatacttgttaacgactatgactttggatgtgtgtgtcttggtatgtcagtctattagccttgttgccgtttgctcacccttatcaagaatgatttgcgtttacttatctttgagcattgtaatgga

SEQ ID NO: 406375 - DNA, 756 bp, Cannabis indica
cgaaactcaatttcgataaaaatcgagaaagttataaagttcttaaaatttggaatgcacaggctctatctcacgcaccaggcctcggacaaggaggtgatgcgcgcgtggacagggggacaaaaccctgtctgaagcctcggtcagctcccagtccggacacgggacacgcgcgcatggaccctacaatttgcgtgtcctgaggctgccaatgtaaagctttctcgggacaacaccctactgaaccccattccgggcgcgtaggaggctgcatgtagcctcttcgtgcggagcaggtgcatcttcccaccaaaatccaatttttgtgggatttttccacaaatttcgaatttttccaattttcaaaccctaatttcaaaataaaatattattttaagatttttaaatttaaatatcaattttaaattaatagtatttaattttaatagattattattaattatttgatattttgaggtttaaatttaaaaattgattattaactttttaaattatggtcaaatttaaaaattttgttaatttctttaatacttattattatttaattataagatcagatattttaatattaattatattttaaattaaaagataactttattcatttaatttaaaatattatattaaaattatattataagacaaattaaataattaataaatttaaaattaatctagatattttataatattctaaccataatattttcacattcaaaattggttatttagtta

SEQ ID NO: 406376 - DNA, 534 bp, Cannabis indica
atatatgtatatatatatatatatatattttaatttgggccccaaaatagtgggacttggggccgaggcctcggtcccagttgccccatctttggaccagcatcctcactatataaaagagaagagatagatgataaaaaagttttcaaagtaggcaccaatcctctttaaagttttaaagtaaagtaactaagttagtagatgtgcactttttaaaaaaattaagaaaatagccaaatctaataaattagataataaaaattataaaaatagattcatcacatatttttttaaaaaaaatatatataataacaaaattaagttacataattttttttagtattgcatattatgatattgtaacaaaaataaataatataacatcatttaaatatatacagcagtattagatatatcgtagtacagaaaattaatataccgtagtaataaaattatataccacaaagaaattataacaataataaattaatactaaaaaaatatatatatcatgctaacaaacttatataccac

SEQ ID NO: 406377 - DNA, 515 bp, Cannabis indica
atgctagaggaatggaagccaatccgaaaaaaaatccaagccctcctggatatgaactcgccaacaaaaaccaaagaggtgcaaagcctaactggtcgaatcgcagcacttagcagattcgtgtcaaaatcaacggataaatgtgtcccattcttcaacatcctgtgaggaaacaaaaagtttgaatggacagaagaatgtgaaagagcttttcaagatctaaaaacacagctcgcaaaacctcccgtcctttctaaacctctggacggtgaggaactggggatatacctagcagtaacggagcatgccgtgagtgccgtactgatcagagaagaagacggcgtgcaacatccagtctattacatcagtaaaagactcgtcgaggccgaaggccgatatccgttgatagaaaagctcgcctactgcctcatcctagcaacaagaaagctaagaccttactttcaagctcatcctgttcaggtgtacaccgttcaacctctacgacaaatactgca

SEQ ID NO: 406378 - DNA, 510 bp, Cannabis indica
aagacctccttggccgaccaaggtgtacaaaggatttaagcatgtgtttttttaagaactcaaacatgttcttcatgctcttcgtgttcttcatgactcaaagagccaagaataacaacgaaggttagaataaaatctttttcgtctagaaattacacattacacatcctaagactaccatgcagatcaaaatgctgaaaagattataatctaacgtgggaatctaaagacattcaaaacaaagaaaaggttcatgcatttatggcaaaatcaactaaatcaagtgaatagtaggaataaaaagcttacccacaataagaaatcgttgacaaagaaaatgggagcttcgatcgtcgaaatggcgcaaaaatcacgagagaccgagcaatgtgggttcgacctctagagagaaggagaagcttcttgaaagtttcttttcctagtgagagaatgaaatgtgaaaagtgaatagaaagtttccctccaaaagacttatatagtttctgtggg

SEQ ID NO: 406379 - DNA, 1331 bp, Cannabis indica
tgagtactcaaagtttacactgcaaaatagacaaaataagaatagaaaaataaaggagacagagaaatacaaaggttcagtcaaaactcggtttgattagtccacttttgcaatagttttcagcttagtttatttgatttggatcactcttttatatagaaagcaagtgtcctttaatcttacataactgatcagataggactgtttatcacattaattacataatttaattaatacagtcgtttaaataataaatgtaagaacagttttgtctgttcctgattaattgcccaattgtttgtaacttgcaaagtcgcatattgactattcatattctaaacacgcgagcttgcatgctctgtggtgttttaatcgcataatgggccttcgggcctattcggtttaattaatgaatgcatatgatcgtacttgatcgtatacctagacattccttatgttatacccaaaatttggctaccatttcaatggaggacacgtgtcaagttaaggaaaatatggatcgatgcatgtaacggtaatcacttttaatggaataactcattaaatgcagaagtaacagagtatacttgcaactcgctgactataaggtcttatgcgagataaagatatacaaattgttgcctcatgtattaacgagaaaccatatggtattggatgcataaggtgagacatcaacttcgttacacctaggaagacaaaagtgatgcacattgaccgtgaaaacacttagcgtataatatacaaactaagtataacagttgggtggacgcgctcctgttactttcactaatcaatttcagacatctttcaatgagacttataagctgacattcaaataacaaagaggcgcctatctcgcaataggaagacgcgctcctgttactttcaccaatcaatttcagacatctttcaatgagacttataagctgacattcaaatagttgctgaagtactctttgttaataagaattgtgattttcaaaatgaagcgttaagccttcaaacaaagaaacaacgaggcgtacatcgtcgacctcagaaagataggggaaaaagctccagctcgctatcaaggtcattggtactgagttcctgtcaagacatcccagaacgctatgatttaaaacgtgtttaaatacatgatcattttgacccagtaacagcggattaatcacagctgtgtgatttttcgaatattaaccgcatttatactacgtgatatgtaatcaaaccccacgattttaggggataaacattgtaaagattacggtcaaatctgtaattaactgcctactatgtgattataaata

SEQ ID NO: 406380 - DNA, 770 bp, Cannabis indica
attacaatcgatcgccaaacatttgatttccaattgtgatcggattggattgaatgttatttttgaatatccaattagatcatatcggatgttggatggagtgtttaaaaattcaatatatctaacatataattgaactaattagtattttcatttagtttcgatgaataattaaattttatattattatacgtaaaatatatgtatatataaaaattaacattaaaattttactttttttttttagattggatggatccaatccagtacatactggacctaaaatattgaatgaatccaatccgattcaaaaaatactaggtctaaaatattgaataagcctaaattaaactaataaatatatttgaaaaatatccaacaggatggtagattgattggacgactaaattaattggatcgaatcggaagataaaatctagagataaattgaggaatacctcttttttgtatccattaataaaaaatactttcatattttatttaattaaaatctactcacttttatgggtgaattgtctaatatatccttaccttccacttaagtgtagcacataatttatatttatgtaagggctataatagggacatcatctataaaagtgaatatatcttaaagaatatggaaataaaggtaaacattaaaacaaataaagtaaaatgggtatacaatgcaattttctctaaaatatggtatactaacttttgcaatttttttacaaaaatactgccagacagtattttttactttt

SEQ ID NO: 406381 - DNA, 542 bp, Cannabis indica
ttgttaactctttatatatgttataaatgtctcattaaattggatttcctttattttaaatcccttattttgttattattcaataattattatttatattattactattgcttttaaatatttattgttattaataggttttaattctttctaatctagtcatgttatttttgtgtgcaaattatttggatttcttttcatattttatttatatgttactatcactattataatttacttcgaattgtattcttactttgacaacttatatatattaatatgtattattttagtagttttattcgatatagtcaaatgttttgattatttatgttctatatgtatatatatttatttttattttgggctagtttgggtcatttttttagctagtttgtgccaatttttttggctagtttgagccatttttcttggctattttgtaccatatttttggctagtatgttgttgactcgtttgcgcatggaggctacctcaaagagtcacagataagttttgaatcttacttttaattatatttt

SEQ ID NO: 406382 - DNA, 637 bp, Cannabis indica
caactcagaaattctcattcactttctcttctctcttcatcttcttcttttttcttttcatttactttatattattttataacatattccaattaatagaatggatataatttggattgtagatcttctaaaaaaatttgactgttttggctttgagatactagtggagaacttttaaaaaaaaaaaattatgtaggagcaggcgcaatgcatgtgcctcactactagtattatataggaaaaattacatttcacaactaaaatttgtaattaattgccacaatattgttggtcaattaattagcacatataccgttcgttcctttaatttcattgtaacacgtatacccgtaacaaatgcaatatgttttcttcaatattacactcatgcatgcacactctttaattcttttttatcttttttcctaacactatatttctccttctcgatgtatgtgtactgatgacttttttttcctctctcaatatatgacatatcatcatatatatatataattatacttttattttgtcatgccatcaaatttttttttttccacacatatataatagaacaaataattattaaaaaacaattaattttaaaaggtttctctttttattttatttttttcaa

SEQ ID NO: 406383 - DNA, 674 bp, Cannabis indica
atgttagcaacagttgtaacaactcaatcttatacatcaataatgttagcaatactaattacagcgactcaatctcatacaacaatcatgttagcaaatctcatataacaaacatgttagtaaccctctcatatagaaactttattagcaacccaatctcatacaacaactatgttatagcagtaattacaacaattcaatcgcataccaacaactacgttagcaacactgacaacaactcaatctcataacaaccatgttagcagcccttatagcaactcatgaatatcatataacaactatgttagcaatccttatagcaacacagtctcataagctatattgttagcaattcttacaactacccaatctcatgcaacaaccatattagcaactcttacaatagctatgttagtaatctaatcttatacatcaactatgttagcaacctaatatcatatacattatacaacaaccatgtccaatccaatcttatacaacatgtagcacaactcaatttcatatacaacaaccacattatcaaaccttaaagcagctcagtctcatacaacaaatatttcttatttgaaattataatcattatacacatcatttgattttttaagctataaatttttatttcattcttattttcgaaaataaaataacattgt

SEQ ID NO: 406384 - DNA, 967 bp, Cannabis indica
gagctgaaggaggtcaaggactttaaagacccatccttgaagaaggctaagaaagatgagctcctctcccctatctcctgcagccgttgcatcaagcgtttcgatgacggcgtctacatggcctggtcgacaaatggccagagtatcaagcttgacttctacccaaaacctgcggagatgattgccaaattccgggagaagaagaagaagcttgacgccatgcttgaggcgggcattggtcctcgccttcctccttgcattgattaggccgttctgaatctagcccatttcaaccaagatttttcttatctttttttattttatttacagctattttttttgtttaagacaatctttattttaatagctgttctattttttgaggggaaacaatgattaaggcctgtccccgggcccttttgtatatattttttttacctgcccttagggccaggatttttatatatatatgatcctttttgatgcacatatttttttttggacctgccctttgggtcaggatgtttatacatatgctcttttttgatgcatactttttctttttggacctgccctttgggtcaggatgttttacttttggcctgtttttcgtctgtccgtgtggtatgccttagtacccccctgagtggcatgaaaacttagtttttaaggcactcagttttatttaaaatacagaggctgcatacacttagacggtacaaaccctttaaacaaagcctaagttacacatttggactattggtaatattttcggaggtgatcggcgttccaggcccttggcacaatggttccatccatcctttttagcttataagttcctgaaccgatttcgtcctcgatttcatatggcccttcccagtttggcccaagtacccccactccgggttcttgggtggctgggaagactcttcttaagaccatatccccaatagcgaattttctgttt

SEQ ID NO: 406385 - DNA, 604 bp, Cannabis indica
tttagtagctcacacgattgctagagctgctactttcttaccctgatcgtacttcaagtatgggagatgtcccaactgatttgctaccatgtttgttggctgagtttgaaagttaaataaaagtttgaattactttacttaaaaaaaaaattgcctttttaatatttttaattttaatgattaaataatagtaaaataattaatttttcttaatatatatgtataatttatatttttatataaaaataataaaaaaatatagtttttgtacaacttttagttttgtggttggaatataaaaaaagtttagtgttaaaattgtatctttttaatgttggttcaacattaaatttagcttttactgttagagttagcctaagaaatggtaaacctttgattagtatcaagttgatgaccccttaatattaacatgtaggtgttctaattttttatttttttttttttattggtggtatttttgtactctaggctaattggaaagggaaatttgaatttatatgcatacatttggggtatattaaatctttgaacataagcttacaaaaattaaaaaaaaataggcacactttatattcatacacat

SEQ ID NO: 406386 - DNA, 573 bp, Cannabis indica
aatctacaaaatgaaatcagtttattttttcttccttaaatattgattttgaatttgataaacttgtgggctttatattattaattgaatcagacataatgatgtattagttagtatttttactattgaatcttgatatgtaccaaattatattctttgaacttttaaggtcgttcaaaatacccttaaactattaagtttgttagatttaaggatttttgtctaatttcattcaattttattatttcagtaattgtctatgtattatattatgctctccagattttgatatctgtcaaatcatgtccctcgaactttgacatatactaaactatagtccctgaacttccatccatattagatttttttactaaaattagaaaaaagtccttaaatccaacaatctcaataatttaggggtatttttaacgaccttaaaagttcatagcgcatgatttggtatatgtcaaagttcagagaaccaaaatcctaattagctttttttttttttttttttttttttaatttaagtggtgtttatttattcttagtttcatacaatacacattttat

SEQ ID NO: 406387 - DNA, 410 bp, Cannabis indica
agtacttttaaacaattaaatattattatttatttatttatttattattttataatgtgttaatttttatacaattactaatttgccaaatatcaaaatataagactatattttacatccaaatatatgtacattaattgtatttcaaaatagattataaattattatgttgagtcattactatacagttgctttcaaatctatgtaaatatatataaagggtaaataccattttggaccttctgttttacaaaagttactaattggaccctgtgttttgttaaatgacaaaatggaccctgtatttctaaatagtacaaataggaccctgaattattttttgttcaaataaagtttaattttaatccgatctaaaagtgctatgcaaaactgtttacattttttgtatc

SEQ ID NO: 406388 - DNA, 597 bp, Cannabis indica
aaaaatatatattaaaattatatcatttttttctattatattcctatttaccaaaaaggttagaaactgtatcttaaaaaaaattgaaacccagttaaagatttaacaaagttcgatactgaaaaatctaaaatacaaccttttataaaaaagttcaacttatacatgcacaaaaattccaaatcagttaaatataaatctaacacatctagaaaaataaattaaaaatctgaaccaaaaaaaattacaaacgtggccaccatagaccacgagcccagtgtcgtcgacattcaaacgtccagacccatgaaacctgccaccgtaaaccaggaaccagagcctttgaacgacgaaaacaacaaacccaaccaccatagagcccagacgaagttcgaacaactagatccacaaagaccttcaaacaaaatacacctgaaaaaatcagagatatggggagagattttaacccaaaaaaatatatatcgagggagacgagaggagaccatgggcatttggaggcagagaatccgtcgatggagtagagggagacgagaggttccatggcagttgaagctcgcctgggcctttggtggttgt

SEQ ID NO: 406389 - DNA, 592 bp, Cannabis indica
gagtaaaggaagaaagagagaaagaaatgattcgattattaggcaatcaattacatggtttatatatacatcaagaattaagaaactaatagctcaaggcttaaccactaactgaaaccactaacagccagctcaccaaaacactccttttaggagttgtaaatatggatttttatatggtttgttatgtttacagttattttgggtacaaagttttgggctatatgcaatttgtttggtctttaatgaccaggaattgaatgtttttggctccttaactgaaaggaagaaattacttctgtttcttttatgtagttgatacaaaaacttttacttaacttaggattatattttgtgtaatttggaacagatacgcttctgcactaaaggatattcgaacagaatgggcaaaatttactaaagattacttcctaaataagtcgaaactagtaatactgaataggatggatactttattatgattcatgatggagtctataagaaagcttcaagttgacaatgcgaatttgaataaaaaagtttgtttttttaagcgaggaattggataggcgttcaattgataatcgtgagt

SEQ ID NO: 406390 - DNA, 906 bp, Cannabis indica
gagagagagagagagaggagacgagatggagagggagaagatagggggaagggtttagttttattattagcagggtaaatttgatactaaaaattagggtagtatattttgtctcatgctttgtacggtggtatgttatgagaccatgcacaatgtttaagcatggtatatcgaattgcccttacagaattacaaataaatagaaaactgaaatctaaaagtgccaagaagccaaaaattttgaaacaaccaccagagaatacttttgaaattgattggtggtactagtcggtactgaggccaaaaatccaaattcctgaaggtattttgaaattgattcttctccattcaaatctctattgtattcttgtcttgtgtttttaagaataggaagacttttacttggatctgcaactagatttggtctgtgctcggcgactcgtcgacacaaggtttgtctttttctagtctcacattcttctttttctatcgctacttttttttatttaagttatatgtgtaacaattataaatattaaaagagtttcaccgcaaatatctctaaattataccgttatatatgtaaaaaaaaataatttataatttctctacatactaataagaaatgctttaataataaagacaaaataatgctctcacttaaagtttttgccagattggtaacaaaatatgtatacgtattaaattctttagaatatagagaagataattggaattttacaaattttaaatttcttgagaaagagacattacaaatgcatgtgaacctccaaacgaaaccgttaaatcagttacccagatatcatgccattgctttagggattggacttcttttctttctttctttcttaatttttttggtttcagtcaaatcaactaaaataa

SEQ ID NO: 406391 - DNA, 558 bp, Cannabis indica
atggtaaaagtttaaattaaatttactttagtctttgcggcttctttcaatgaatagagaatactagaaaattgtaaagaccgcttagcattaatttaaaaattagcagataattagggtttaataatgaaaattaattattagttttaaattactaacttatgatgatttatttgaatttggaatgcattttatatgttatatatggaatttcataattttgcatgttttgtgcccggcaatattggaacgtggtgtttggctactaaaatcacatcctaatatttttagtatagcgggacattgtagttagacattgggaatgtcaggattagttgagaatttagaattgaccaaaatacccctaagtgaccttttatgatttatagtgtgggaagggcaaaatagtcattttgctttttggtgttttatcctttagtggacatatgttaagtaaataaatatgattttatatatgttatcaattaaataaaacaatttttatagttatctcattttacaaaaaaaaaaatacaaatatcatcaaagatcactttt

SEQ ID NO: 406392 - DNA, 828 bp, Cannabis indica
ttttgtaaatttccctttaatttatagataaacattagtttacttattttaatgcaaatatagataactagtcaccatacatttttaagtttggtttaaaagatttgagatctctaagtaaaataaaattcttcacactgaaaacaaaaaactaaaatgaggcaacaatgcaaaatgtgatatgctatgacaggtggctcatagtttttatcaaaagttccagacatgctaaaatttttgaatataaaacctgataaattcatgaatcaaaaaatctattgagctgcctaggataaaccaagttttcctaaactgtatatgctttaagcattaaaaacacatcttcatcaactacacacttttcctattgattaattagtttgaaattacgtacctagttgtataagaaaaaacttaattggtagttaagagaattgctaaaattacagttggtgtctaacatatttcttggtattataccgttattggtataattaagtattgggtcccatataatttaagaaaataatttttaagtaatattgttaaccatgcattaattattatttttttttttaaaaaaaggaacatgtcccatgaatgagccaatgaacatcacatcagtaattttttaattaaatttacggggcgtttactaaactataattggaatcagaataatcaatgagagaaatgtatcggtttaaaatagaaaataatcggaaacaatatattttattatgatgtttactaaactgtccggaaaagaaatcagaatcatattattttgttttacaaaactaggaaaggtaatacagaatgctttaa

SEQ ID NO: 406393 - DNA, 764 bp, Cannabis indica
tgggtaagtctagaagttttttctagtgggataaatatttgagataaatagaatatcaggtttatgcagggttgtggttttggaccatcctacccctaggcttaaaataacttaaatttaatgaacaagagaattttggtcattttattagttgagttttggtggccattttggggattgatacctagccatttagtgataccatgaagtaagtgaattgttgggcataattcgtttagagttaattaagaaaaatcaagaaaatcaagagaaaagctatctctctctttgttcaactcccacaagactggaaggaaccagcaaccttctcttttaatttgaggatcatcaagaatcaagggtgattcaagttgaggtataccttagaaactcttattttgtgaattccttaagttttagttgtgtagttttgagttgaagtggttgttagggttaaatttatttatagtttgatttctaagtttaatttgagttggatttaagttctagctgctggttttgttgacttttgtggagaatgattaagtttgagttcgaaaactcaaacttgagtcattaatggcatatttgtgctctttgtgtatttttggattttattgcttggattatgttgtttaaggtcattataggtgttctggaaggttttggtaaggttttgggcatgttttttagtgtagattcaaattgtttgggaaaagctagtgcaaaccggttacccgattcgacaagccctgtaaaactgg

SEQ ID NO: 406394 - DNA, 593 bp, Cannabis indica
atttcatttcaacccagaaattacacattcgagctcagcccaataggacccgaacccgactatgccaaactcgaagagcccgacccgatacccgacacatccgaacacccgaaaaccgagttcggttgtgcatttccaagacccgaaccccgaagacccgaaaatccaaaaacccgatccatgtgcagccctagtttgtgaggaaaggaaaagctgagaaggaaaatttaatatagtcatgtggatgcatccactaatttaataacattacattttttttgttggatcttactttaattttaaatatgtaattttattaattaaatcaaaaaatcacttataagctttattttttaacaagagtactcagaatgtgatatttaatcaaatatttacaaatattacatatctttcacggactatatagaacccgggttgtgacaatttataaaaaaaaattaataaaaaaacaggtttctagatatatattgcaaaacttaatttcagataatcttataaaagcatcgattagaacatttttcataacattgaaaagccctagctgtaagacaatttatatgtataaactgaaa

SEQ ID NO: 406395 - DNA, 518 bp, Cannabis indica
tgctagtcatactctagccattttgatgtgacagcatcaatcactatttaagcaaacatacatttatcagtattcaatacaactctatgtatactattactgctatcaatgtaatctaacaggcataaacaacatgtacgctaaacatgtaataacatatgcatgatattatattaatcttacctcaattctgaattcaggtgtgccgatcaacctgagtggaacaactgctcggcgaattataggctcctaaatcacatcgaatataacacgaataaatgactcgctaaatcacatccggaacttaggtttgaaaccaaaaccctatttactgcaacctaatatggcaataccctaaacaagcagggactcaaccaactagaaacatgaaactaacgtgaaacaaaaagctgaattttcaggtttccctactccgaaattcgggtaaccggttttacaagcattgtaaaattgtaaaaccagttagccggttagctggttttacccagaaaaaacca

SEQ ID NO: 406396 - DNA, 1037 bp, Cannabis indica
tcaactttttgcctgaaataactctcaagatagaacctcactacccaggatgaataagtagggagggagtggatcaccctatcttaatccccgagaaggagtaaatcgtttgagagatccatcattaagcaagaccgaaaaagtcacaaaagacacaaaccaagcaacaaactttcgaaacatcggattatatccaaaggcctctaacacatgatctaaataactccattccaatcactcataagccttggacatatctaacttcatcccgataaagctaacactcgtaactttcttattacatgagtgtataattttcttgagctatcgtaccatttttgacaatccaacgaccttgcacaaaggcatcttgcagaggataaataagaaacggtagaatctcgccaagatggttggctaaattttttgaatgatttataggcaaaattgcaaagcaagacaggcctaaaattgtcaaacttattagcaccatcctttttggggatgagcacgatagaggtttgataaagagtcttgataaactcaccggtttggaaaaattgagtaaccgtaccaaccacatcacccgcaacaatctcccaatgtgcttgataaaaacggccaggcatatcccatccgggcctgaagctctcaactgacctatagaccagataactctcctaatatcttcacaagaaggggcataaagtgaggtgctcattcatattcgaagaaaacaaagaggtgataagctcaaaaagatcctcatcaataacatgattgacagacttaaacattgtttagtttatatgcattttttatgggtatattcttagtttattctacacaatttttttgttttatatatgtgcattggttttattattttttatgttgtttattgagttatttttttatgatgtacatttttagtttcttcctgatatttttttttgtatgtgttgttttgtagtttagatacatatatttagtttatttttttgacatgttttattaaaatacaatgataagatttt

SEQ ID NO: 406397 - DNA, 955 bp, Cannabis indica
cctcccgctctttagatctaagaataaagttgcgaatttcaatttcatccttgataaccttgtttcaaagttacatggttggaagataaggatgctatcgaaagctagtccggccatccttattaaatctgtggggctggctctatctgtgtatactatgcaaactaccaagctctcaaagaagcttgcttcgaaaattgatggtatggtttgagggttatatctgaaggcctgggaccaacttttccttcccaaatctagagggggcttggggtttcaaaagtctatggaatttaaccaggctcttctagctaagtggggttgggccctccttactgaggatcaatcactctgctgcagggtattgagagccaagtatctgaaaagcaaaccgttgtttgatgtaacttataaagatttagactcttggtgttggaaaaatgtggtaaaattgatattctcaggaaaggggcttgtaaggtgatatcaaatcgggaagaaacaaatgtttggaaggacccgtgggtttttcatgggaaagagtactacccatcacttcttgccctgagagggtgactaaggtggcgaatcttcttatgagtgatgggaattgggatatccctaagctcgagaccctctttgactctgaaacaatcaatgatatcctgaaacgtgggcaggccttccgatcaagggagagacaggtagatctggaccaatgaaggaaaccgggaaattcccccgacgaagtctgcttatttgattcaagctttggaaacgagcccccgcctgtgtggtggctccaacataatggaatagactatggaattccaaaattttggaaaagacataaaaactcctttggtcggggtaatcctttcgaatgctataccggtccgtggtagtcttggcccaagagtaactcaaaaacttgaacgatgtgacttgccctttt

SEQ ID NO: 406398 - DNA, 534 bp, Cannabis indica
gacaccattttggacagtgaatgtgctcctttagattcatgaatgcagtctcgaattcttccgtccattcaaattttcggcatcttctcttaatgttgaagaatggaacgcacatttcagtagacttagaaataaagcggcttagagcagccatctttcctgtgaagctttgtacatccttgtctcttttcagggacgacatgtccagcgaggcttgtatctttcctaggttggcttctatccctctttggttgataattgtagaaaatagtgaatcgaattatctatgtatttcatagaatagtacatatttatatacaaagctaggagactaggaaataggaaactaccaacaaaataggaaactactaaatacaagttaccctaattcttttacacctaatatacagctagttctctaacactcccctcaagctggagcatagatgttaatcatgcccagcttgttacaaagatagtcaatccgcaccccattcaaagcttttgtaaaaatatctcctagttgttctccgg

SEQ ID NO: 406399 - DNA, 572 bp, Cannabis indica
atttgtacgtcaattaatttcttgttttttgattgtagtagtgtaaaataaatattatataagtactcaatagtggcaaaaaattactattcatatttttagggaaaaattctaaaatatcttattcctttgtccaaattggaaaacttattattatttaatttttaaattaattttaatagtctttaattacttgttaacaaaattacaataattaacttgacacatatttataccataatgcaatcttgcatgcattcttataggaaaatttgattatgcaagcttaaatttgtttaaacatttaaacaaaatattatacatctgtttttttagtaccaaatttacccctaaaataataaaactaaactcattcccttatcttccttctctttctctctacaaagtctcacacacgcacacacacccttgccttactggagtaccatttgtcggagtatctcaattgacaaccaaatgtgtaggagcaacccaaactcttaactaacataattcttgaataaaaattaggagtttttttcatttttacacttaaaaacagtttttttttt

SEQ ID NO: 406400 - DNA, 517 bp, Cannabis indica
ctaaaaatttctttagaatgtatttagaatgtattataaagcgcatgtataataaatcaacatattattgttgataaatttgttggtttaggattataagtggtttagattatataataagaagagatataaaattgataaatttttaataaaaatatatagcttataataaataaacaataatgaattaataatttttaatatataatataaggttttgttaaatttttattgaattttttaattcattaataactgatattaaattataaaaaaaaaaagaataattaaggaaagaaaagataataaaattaaagttattttaaagtgtcacgttattgtgttattatatatagattgaacaaataagtactcaaccaaatggtgcatccagtgcagggacagtacccagttaagttattgtgggggctatagcccctactaataaaaatattgtcttttaaaaattaaatttaattatttttaatttgataattatagactaaaataataaaaa

SEQ ID NO: 406401 - DNA, 810 bp, Cannabis indica
attgagcgaagggcatccaacacatctttatcagtaaaaggacgcaacagtgagaagttcatttcgtcagatactgttataggaatagcatgaagaacttgttgcaaggctgctgcatcgtacccaaagcagtgaataaatcaccaaaaaggtgcaaattatttcattcattccttgctttgaacttactgcaagaccagcatcattctgcaacactttgatattattgttggacttccttgaagacacataagcatgaaaaaaattagtattctcatctccgctttgtagccaatcaatcctagatgtttgttgccaatatatttcctcttgagataacaattcatccaaagtatcctccattttttttttcagattgcacatggactcattggtttgggtttgttgattattcaggatttccacttctttgtgagttgctttgattttcatcttgatgttgccatatttcatgtgatgccactgttggagagaattgggacaagcctcaagattagtgcaaacgttgtctattgttgttcgagtcaagttttttttccaattttgctgaatgatattagttgctgcagagtcggacagccacattttttcaaacctgaaccttgacagtcttttatcttcatgctttcgagcagccaggggaagtacttcaacagaaattgctctatagtccgaattgtagtagtcaaggtgttttgttgtaatcggctgaaaagaattttgccattgatcgttaatgaaacaccaatcaagtcgttccttgatagcattgacattgtggcgcccttt

SEQ ID NO: 406402 - DNA, 699 bp, Cannabis indica
taaaatagaaaaaaataaaaaaaataaacaaaattaaaaaaataaaaaaataaatacaaatttaaaaaaaaattaacaaaaagtaaaaaaataataataaatatataaataaaaaatataataagttttttttttaaaaaaaaaaaaagaagaaagaaagataggacaaaaacaagtccttttcttttgtttggtagtgaacatcaattcttctattgatgttagatatatttaattaatattgatttatactattaatcaaaaaaaaaaatattgatttatactaaaaaaatcttatttttaattataacaaaatttctaaataaaagtaaaaatattgtgactaattataaattattattcttatattgtagattcgtgactaaaacttttagtcaaaaaaattataatatgttgtgattaaatatatttttattcacactacttattgtgactaaaattatattagtgacaattttttttaaatactgtattttagtcaactttttattagaattaaaaatcatatttaatcacaaaaattatcactgaaaatatttttttaaaaaatattagtaatgatatgtgtattaaagtaagtattaaaatataacacacaatcatataatattgaatttttgagagataaatgtgattgattaaaaaaaaagtaatcaaatcatcatatgtaatattttg

SEQ ID NO: 406403 - DNA, 1011 bp, Cannabis indica
cttctacagaaaggaatcaagggctagagacctgaacggaagtagtcattatattccgctgcacctaatattgtaaggttttcttaaacccttatgtgtttatttcattgttttagaattcatattaggatgttaatgaaacatacttgttagtaaatctagatcctcgtaaaatatttccaagaaatataacagctactcagattatacacaaaaatcccaatagacaaaaacactgtaaaagtcatactaaaactcaaaaaaaaaaaaatacaaccaaaccaaatcaataaaaactaaaaaatcatcaatgggcaggcaagacttcaattgtagttttgacttgcctgagtgaatcgattccggaaaagaattgaaattgtggtcgtcgttcaagctcttggctgaatctcctgattgttcaagccctctcatcagaattatctccattgttcaagccctctcatcggaagctcctggtttttccatcaatttttggccatggtcactatggaggtaagtagattgaagaagacgaatgtgagagagaaggcaaagggtcgaggtgggcgtggtgctgtttttgaggtgggagttatttctcggccgcaacaatccaccatgtttcttagtttttttttctttttgttctgggaatcgattgtttttgggtggggattgttggctgataggttttgggggtggtttctgggcagtgagaaggtgagaagaagaagaagaagaagaaagttatggtttgaagaagaagaagaaggaaaatcaggtgggtgggtggggtttcgtgtgaagcagaaaaaagaaaaaaaaaacaaagttattttatgatttgaaaatattatttttagtttttttatattattttaaattttttttattaaaattataatttggaccagtaatacttcaagacgtggcattttaaaaattaataaacggacagttatcttagggaccaacggactcacagaaaatgtgaccttggggactatt

SEQ ID NO: 406404 - DNA, 701 bp, Cannabis indica
ggacatgtaatttttaacgttttaaaaaaaaaaaaataactttaaaggtttattacttttcttgtactccttagctaattactaactttaacctttaattttacatattacaaagaaaattaagtaaaaaaaaaaaaaacttttagtttttagtaaattgttaaaaaaataataccatcaatttaaatttgagaaaaaaataaaattaaaaaaagtaattaatattgtgtgtggcaccctatgtcgagtaccattttatatatgtagtatatcgtgtgattagtggaatttaatattggatttagtatatattttaattttttttatataacttgatattatgattgtaatgttcccacttcaagtttttattaggtctttacactcacagaatgatccttttatttacggttacgtcactctgactgtttcatggactgaccactggccctacattcatccattgttctaccttaataatatcagtaccacttagaaatgtctgagattgtaacttgacaaacatttaaaagactaaacctcttcattaaagaacttgtctagagttaattgtcattggaacgagagctggaggagttacttgctctactggagctgcctgaaccttcttgatgaagaataatgtttctataaccgtcgcctatacaaccgtcgtaaaacaggcataataggcgacggtt

SEQ ID NO: 406405 - DNA, 884 bp, Cannabis indica
atatggtaaataagaaaatgtaaactttagtaaaagtcaataaattataataattagtgctatatttgacatacaaaataaatttgtgctatatttgacttaatatttacaattgtgctccaatgcaaaatatgtaaaaataaaaaaaaataattgattatattaaatcattgatggtcatttaatattttattaagaatatatagataaatatttctttttttatttaaataatggcaatatggtaaaataagaaaatgtaaacttttagtaaaagtcaaataaattataataattagtgtcattatattaaagtagcatttgttgtgagctaaatttgatacaatgttatatattgtgccaaatttaacataatttttagtatgtgttaaatttagcacataagcccttaaggctagcttagtggtgagggagagataggaaaaatgagaggtcatgggttcgaatctaagactttttaaactacaagctattaattgattgtaaaatattattacgctatattaaaaaaataaattagcacacgttttaaaatactattggaaataaatttttttttttatataagtatgttgaaatataacaacatgtcatatttttggcactcaattagaaatactgttgtaatcatacaacacaaactcaaatcagtctaatggttagataatcaacaataatcaaatgacaaaaccaagattataaacaatataatttgaacaagaaaaacagagagaaaacacaagcaattatcctggttcggatctcaaatcttgagtcctactccagctctcccccaaggagatttctccactataaacttgcaattacaaacaccaatctcagtacaagatcatcatgaacac

SEQ ID NO: 406406 - DNA, 973 bp, Cannabis indica
tttttttttttaaatagtaagtgaccttttttgtgcttaacgcattggtaatggtatgattaaagcaattgtccatgcccttggcacatagactttcacaaaaatatctaaagcacatactctttacttattatggattttttttgtcactaattttacagcaaataatcaattcataggggacaaaaaggtagtggatgtggataattcatggaactgataggatagaattttgattgagattgggattgggattgggatttagaaggaaacaaaccgaaaaatcatcatcaaattggactcaatgtcaactactatttatataaatataaatataaatatatttagagtagtgctaccttaatctcctgttacaatctcttaattaaccttcacgttcaaaaatacatgtcaaaatatttttttttttcaaatattttttcgttatgcttataatattatctctagtaaatttttaaaattttttaaattagtttacagttgccgaaaattacattttaaagtttttaaacgtgcgtggtaaattgaaatatcaaaaactctgttttcagtactataaactattcgaaatttttcaaaaatttacagagatgatactgtaactataacgaataccgttatgaaaaaaaattgaaaaaataatttttcatggaaaacgaaactgtacaacatcaacattcatcaaacaacacataaaccaacatgaaaccatccaaatcaacacagaaacatgcaatcatcgttttaattcatattacatgaaagtaaatcattaccatggctctggtgccagttgttggaaattattttaccaggatctagatttactaacaagtatgttggattaacaacctaatatgaattctaaaacaatgaaaataaacacatataaagttagaaaaccttacagtgggtgcagcggaataatatgactccttccgttcagatctct

SEQ ID NO: 406407 - DNA, 597 bp, Cannabis indica
aattaatatttcttattacagtgtgatcaagtaattgtaggaagagttgtatacatatatttaaaagtaaaatattatatataatattaattaccttgcattgcatgcatatgtaaaatgattgaacctggaaatcttccaaattgaccaggtcgatatcgatcgatctataatgggagaagaacaaggatgaactagtatctagtattaatataaaataatgagttgaaaatttctacaatttatagaaaactataaattgtagttgcacttgtacaccatgcatgcatgcatgtatatcaaggtatctttcgacttcgtcaacactgaaagctaccatgttagaaataatatgtatgaaccaaccatcgatataaatgtacataaatggatcacaaaaagaatgcaaattaattaaacattaatatctttatatattaaaagtacctatatctaacggcatttcttgatttaacagaatatacttaaaaataaaggtttgatctcccgttaacaaataaactcaataattaaaccaaaaaaattaaacaatcttttaaatattaataatcagttttaaattaaaaaaaatcatct

SEQ ID NO: 406408 - DNA, 418 bp, Cannabis indica
actataataaaatcgtaaaataatatatttttgtcattatttttttactaaaattatatgtataacaattattaatattaaaaagctttcgcctcaaataatattcttttacaaattgattcgaaaaaaaccttttttaatgtattaaaagtccacttaaattttaacttgtacaaatgatttttctaaaagagataataattaaattatatcaccccattttatgatttgttataaagtaataaatttgattttatagcttataaaactaacctaagttatcataattgattatcccttagtaaagtagtaataatactaattaagatgcatgtgtgttattgagataagtagttctataaatgcaatttatgaatgatgatgatgatgatgatgatgttttagctacgtggtcagc

SEQ ID NO: 406409 - DNA, 530 bp, Cannabis indica
tcaaacctcaaattccattgtctaggagcctgtttcaaaccatacagagacttgagcagaaggcatacttgattgggattcccattgtcaaatccctctggttgtgccatgtaaatcttttcatcaagtgtgccatgtaggaatgcagttctaacatccatttgatcaatctcaaggtcaaacttagctgcttttgctatcataacccttatggatgtttgtttcacaactggggcaaaaatttcagtaaaatcagttccctccttttgagtaaagcctttggctactagccttgctttgtatctcacttcaccattgccagtttcatcttctttgtgcctgaatagccacttgcatcctactagcttttgaccctctggtttgttgacaacaatccaggtcttatttttcttcaaggatagcatctcatcatcaatagctttgttccatttctttttatccttgcctgtgattgcttcttgataggtttcaggctctgagttgtcaagcttttctgctgctgcaagtgc

SEQ ID NO: 406410 - DNA, 795 bp, Cannabis indica
attaacgttcggactaagctttataaagtttcgaactcgatttctaactcaaaatcacctcaaattcaacaagtaaatatcgaaactagtcccatagctaccaaagaacaattctataaagttagaatctccataactactctaaatcacaaagccactatataaaaccaatcgtttttagcttaacatgtaattaaaccatacatgaagcattccctcttcaaggatttgctaccctactactatcagagcttagatcgctaggtttttgttataaatcaaagaaaatggacatatgaagagaatgttatatcgaagggagagaacaagaatttcgttcgtatagtttcatttgatgtaaacttataatatatataccaaacataggttaagttatatatatataaaaataatattataataataatatagtattgataatattattaataaaaactttattattaatagatatcttattatttcttagtcactaagaaacttctacttctaaggtatttggccaacttcgagtattccaaaatatccagtatttttaaaagcaatttatcccaataatcccatcaatatttctaattaaaactgttgtgacattttttgcctccaattgggtctccaagatcaccgaacctgaaaaaaatttcatctcacaaataactcatattatatccatgtatttcaaataaatctccataattaacaaattacgcttatttatccacttatcaggtcttcagggtcgccaaactggaaaatatttttattccacatgta

SEQ ID NO: 406411 - DNA, 592 bp, Cannabis indica
agtttaagaaaaatactaaaagttacgtgcttagcatttttctatatttcaatatcgatattggtataattaaatttcgaatctcatataatttaagggtaaatggcggcaaaaaccccctaatactttcgttttggtttcattaaacccccaaaacccaaatttttgcgagtaaacccccaaaactcgtattcggttagcaatttactctttccgtccaaatttagctattaagtaccaggttggcttgtctacgtggacacaatatacacgtggcacaattttattggtccacgtaaataattatattaaaaaattaaaaaaataaaattaatttaaaattaaaaaaaattataaataataatttttttcctttctttctttctttttttttcttttctttcttaatctaatgccctttctctttctctctctcgctcgcaagtagcatcgtagcagcagcccaagacctaggtgccatctctctcgatccccctctctctcgatctcagccatctctctcgatccccctctctttatctctcaaccatcttctctttctcgatccccctctctctcagccatcttctct

SEQ ID NO: 406412 - DNA, 780 bp, Cannabis indica
attttttcctaatatattttttttttcagttttaaacaaaatatctataactaaactttatttctgtttataaaataaaatatctataactatttttttttcaaaaataataaaaataagcataagatactataaattgacattagcattttaataaaatactaactctgataaatttttagttatttaaatctaaattctaaatttaatattattattatatttttttcaaattaatttaagatgtaaacaatttaaacattcatgattttttttttaatgaaataataaatttttaaacatttacagccattttaactattttaatatttgtctttgcctccatctccacatattctccatcaaaaacaaagcgaggaatcttcattgggcatgtaataccaacaagacatttatttatttatagcaaatgtaattaaataaaaaaaaatataaattacattaaaattaaaatattatgtatactaataatttaaaatatacaatattatctaaaataaaataacaatacttaaaaaatttactaataaactacaaaaaacacacaaaaatatgtgtataataaaaaataatatcatataataaataaaaaaaaattaaaactacgaggacatgaggtgctatttctatttctgccctatttaatattcggggttttgaaaaatttttactctttctcatgataggtaccccagcggacatatgtcaattttcctatcttaattcatagtaaaatgatgatgatgagatggaaggtcg

SEQ ID NO: 406413 - DNA, 1094 bp, Cannabis indica
ggtgagttgcatcttgagttgcgattagggttacgatttgagctgagattcatgttgcgatttaaggttgcaaagataataatataagagggcttttcaaagttaggcaatgtaggtggttgcagatgagacaaatctgattttggctaagaaagaatgagaatgatagaagaaaatcggcctggtttcgatgaggaaacacaaaaagaagaaatgatagatgtattagatttcaaataacattgattatatatataaatagacgaaagaatatatacccctgattaagcctttgctgttcttgttctacaatttcaatatgcgttgcaatatgtgaattgaattcaattttaggaatcttgtggtatgggttgaaatagggatttagggttgcgaattgggcttaaatgttttgtgttttgtttttgctaaaatgggtatcaaataagagaacaagcataataataaaataaaaaaaagcagaaggaagagatgctgaaggtctgtaatgtgtgttggcttccaatggtctctggtggtctttagcgaaactagagggtagaagaagacaaagtataaaaataagaaaagagtgagtgacagaagaattgggggaaatgttaacaacactgtaaatcaaaatttagtcttatgagaatcaaacaataaattagagaggagaggaagcttaccgtgtccatataattgattttgtaatggtatgatcttctaattttgtagtcaaatctttctttgtaacctttatctcttgatgatgggggtttcaagagaataaaaagataggaaattgcaaattgggaactattaataccgtttatattactaactcacaaaatagttaataatatttattgactatttttatttggcccctcatcaaattagaaattgtctttatagtatcaacaatattaaaatcatgacaattatgcccttaaattataaactttattctaaaatagaccacataaatttaacttatttatttgataacccaacacacattttatatatacaattgtgatcctaataaatttttaacagaaaatggaaacaagagaccgtaaaattga

SEQ ID NO: 406414 - DNA, 551 bp, Cannabis indica
caatatgggtttctatatagagttctgcaaaaatagcaaaaatagaaaaaaaaaaaaaaaaaaaaaaaaaaaaactaacttttgaagtgtaaaaaatagaaaaaaaaaaaaaaaaccccaaaaaataaaattattttttaaaaaaaaagtattaaaataaactaaaaaatggttatgtttacttaaacaaatctacattttttgataaaaataatatatatttaagttcgttcctataaaatttagtttttaatatacttttacacattaaattttgggggattttcaatattatacctaaaattggttttatttataaaaatacctttaagaaaattatttgcacaaatatcgatgtgccacgtcagcatacataccaaaatttaaaataattaccgaaaatggaaaaaactagaaaaatctttatttccagaaatttttgcttttttggagttttgaaaaaagcaaccaaatagttgcttttgatttgaataagatatcaattggttacttttctagtaaaaaaaatatttcaaaattttacacatata

SEQ ID NO: 406415 - DNA, 565 bp, Cannabis indica
ttatacatattttactgagagatatcgaagcaaaaaaacgtcttctcgccgcgacgaattgtcaccacggcgaggctaatggtggtcgcgacgagggtatacagaagtggtgtttttttgattttctacagtcgttgtggcgtcgactccgtacaggatatgagcaactttgtttttcttaattttgggttgaaacacattattttaatgaaacatggtcgtgaattttagagggatagacaaaatggaaccctaaaaacacgagaagaagaagcttggagtgaacgtggatgatccgggacaatcctccatctaatttcctttgatttcttatttgtgtttagtttaattaagaatttgattatgagttaaactctcaatgtagggatttaatagatattgtctgagattatttcgtgagttaatattagttaattgttctttcttctttgattgtgtgatttattcatctttgtgtttattacatgtttaagtttgattaccttatgcataatttatgatcctatgtgaaatctgaaaagtgaatattaagaatgctataaat

SEQ ID NO: 406416 - DNA, 1262 bp, Cannabis indica
ataaaatcactaaagacaaaatatcattggggcaaaaagaccattttgcccctccacactaaaaccacataaataacactaaaggggtatttttgggaaattctaaattcccggccattcccgacattcccaatgtctaataaaccgtcccaaactactaacatactaagttgtgatttctactgagccaaacaccgagttccaaaataccgggcaccggaatgcaaaattatgcaaactactacatgacataaaaatgcatctctgaattcaataataacagtataataaattatttaaatagctataaataattttcataattaatcatgattaactgctaatttccaaattaaactaagcggtctttacattaatgggcttaattgttttaatttttttattgagaaaataaataaatatgttataaaaaatatatatataattttaaaataaaaataatgtatgttagaatgtatcataagattgagggattaattgagaaatacatcttttttgtatctattaattaaaaatagcttcatattatattttattaaaatatacccacttttatgtagtgggttgtcattatactcttgatacgaaccacaccaatattgtgatgaaacccgataccaattatagcagcctctaagaattctcaaaatttagatgtggaactgcgacccaatgcttagttaagcatgaaccttggtatgaaggaggacgccacaaacagtggtggaaatccgtttgatgagtcagttgaacctcacaacgaatactccttgataagttcgaatagttctctcaagaactcaagaagaaaacctcttgaaattttattcaaaaatattctgattttgtaagtgtttacaaggctttatatagccaacttccaaccaagaataaaggaaactaaaagaaagacaattttccaaataaaacaaagatagaataaaggaaacaaaattaaaaatgaaagctgccaaaattccttaaaaaacgtgatcatctcaatttgggtctaaattgagtctactttgataagaagcacaaatctttgttctccttcactgttgactgcagtctgctctagttttaaaactctgttgactatgttgttcagttcttctttgaatctcttggctcacaccctcatcaccgggccaactggaacttgacttatttctttggccttagtattctcatcattctcgcctcttgaagaggatttgtcctcaaatcttcacttgcat

SEQ ID NO: 406417 - DNA, 539 bp, Cannabis indica
atattatataaaataaggttagttgactattctcttatcaaaagcttatcgtcagtatccaggcctcaggcaaatggacaagtggaagctgttaataaaaccttaaaggatactatcaagaagaagctagatgctgccaaaggcagatgggttgacgagctacctcaagtactctgggcccatagaactactgagaagacaacgacgagacacactcctttctcactagcatttggctcggaagcaatgttgcctgttgaagtgaacatatcgactcacaaaagagagttttataatcaagaagaaaaccaggaacttttgaaattttccttggatctacttgagaaaaaatgaattgagtcacaattcaccaacgcagtacatcaacaccgagttacgagatacttcaacaaaaaagtcaagaaaagactattcaatgttcgagacttcgtgctaagacaagtatttgcaaatacgagagatgcatctgcaggagttttcaacccaaattgggaaggtccatatgtcatcgaaacagt

SEQ ID NO: 406418 - DNA, 766 bp, Cannabis indica
gaaatataacctctaaaaataatcaaaagctgaaaacacataaataaaaaaatgtcatagtatatatttaatgtatctaaattatgaatactaaatgaatataaatgataaatatatccatggctagctctcagtgtatcaagaaaaagccttttcatgcatatcgcctctatggcttatgggttaatatttgaaatcctaaaataataatatagtatttgagttatatgcacttgagttagaaaaaaaaaaaataatgtgagttttttttttaaaaaaaaataataataagttgaattattataatatgagaataatatgggaatttaaaaattaataagctatatatatatgcagatttaaaagaaatttgaaaatagattttcttattaatgaaaataaaatacgtttagttaaaattttttaataaaatattagaaaaaataataaaatacaatttaaaattataaaaatgagagagttaaggagagattataaaaaactatttagagtgatttgagagtaccacgtcaccgcctcatacttcttctttatagatatatatatatacatacttaatgtgacaaaataatttataataagtcataacaatatattactttaacatttattatttgtttctagaaaattcaaagcaacaatatataggtttcgtaaaattttaaaaaatagcaaaaaaaaaaaacgtgtgatcttaaaataaagaaaaagaaaaactaaagaagaatagcttacgaaaaaaaaa

SEQ ID NO: 406419 - DNA, 532 bp, Cannabis indica
tcgttggagatgagttcgtatataactattacatatgctaaagtcggaccttaaattcttcatagttctagttctttttacgttgggtatcagacggtaataagttgttttattagaatgcagcgagggttaccgccttcatttagaacatgtagaacaactttggaaactgaatcaccaacaatatgccaatgatgttgataaaacatcactgacattctatcaatactcggtacttttatcggagcccattgttttcaacactagaaaagacatcagcagaccgtaaaatccttagacaggaattcattgtgaacatccgagacagttggggagaatagttaagagcacatgggataaagcccaaaggtcttatataaaatgcagaatcacttaggtttaattgcagaaattggaagaacaaacaaacagcaacatatgtatagatatatttagggtaaattgtggcataaatacctaatgttttcgattttatacacttaaatactaatgtttatttttggtggcaaaa

SEQ ID NO: 406420 - DNA, 537 bp, Cannabis indica
gtcgaagaaacatcactgtcaaaaatggaggccaccggcaccacggacctcctcgtctttctctggaggatcaaggctattgtggccttcatcgggcttcgaagcccaagccctgcagttctcaaagctccctttgtcgttcaccacgaagttaagaaaaaattaattaaacccacatttttatttcaccacaaacaaaatctgtaaaaaatattaaaataaaaatacaaaagagtgagaaacggaggtggagccgagaaagagagagagagacgaaaacaaagacaagtaaggatgatttactatggattttttcttgccgaagatgagaccagtagtggagacgcagtcgtaaaggcttgggcgagagagagagatctgaacatatctaacacttcatggcttcgactcgttgtcgaagcatcagccgccatggcttcgacctgggtatttttaacgtctggcgagccaacctctagtatggagtttaaatcaatggtggtggaaggcaagaaagaaagaaagaagatatgaaat

SEQ ID NO: 406421 - DNA, 637 bp, Cannabis indica
taaatattaaactaaaatttatgtttggagttatctaaattagcaattttaattgaataaatagattaaaataagtaccaaatgaaaatacaatcctttcaaataatgagctttagtttaatggtattccatctccattgttggttctatatagtttttattttaatgagattcatccctaatagatgttcagtcattagtaatttaacaccatagaatctcaaaagataattattattgtaaatcttttattctttgtaacgatcaccctaatagtgattgctaagagtaggagctgacaaagtatgaaacaatggtagaagctcatgaaatagattgatcatgactcttgcctaaacaggacaatatcctattctcatgtcgattgaataaagggttgctaaaatgctatccattttagatgatctgacaactctattcaattaatgatatctttgactctcgcctaaacgaaatattgataacgatttgttagaaatcttggaaatttttgaaaatgtgtttgtattttcacatgtctttagtacttgctaaatattttcggaactgtgtatgaatttatattgaacctaattgtatactgttattaatgatgcagtataaattttgaatcttc

SEQ ID NO: 406422 - DNA, 561 bp, Cannabis indica
aatactaaaatttaatgtaaatataccacaaagatatttttcgtgccaaatataacataatttttacatttctcattggaaatggtctaagtgctcttaactcacaatagaatgtgtaaaatagctaagcatccattttttttgttgtaatgaggacattctttgaatgagagcatctatctttttggtggaatgagagcatctatttttttttggttgaatgagggtatttttgaatgagagcatctattcttttagtagaatgaacaaaggtattccataaatgagagcatctatttgggcattcctcaaaatgagaatgatacaatacaaggagatccaaatagtcattttgaacttgtcctaaaattaggagaaacattgttactctgttgcaatcttttttttcaaaaaaaaagaatagtactttatcaaatgagctattatagctcaaatatttagctcatgaataatgtttaactacatgtaaagaaatattatttagtaatgtataaatattatattttttttttaaagtgtgtaatattattatatatatat

SEQ ID NO: 406423 - DNA, 755 bp, Cannabis indica
ttttttcgttttttttgtttttttttttaagtttcttccacttttcacatatatcatcaccaccattgttacatgaaaagattaacaaccatcacccaccacccttctccacaacccaccatttaccgaacatcaagcgcaacaagcactaccacttcaccctactgtttatatccaaatcacacatataaaaaaattaaacaaaacttaaactaaatttaaacaaaattaaatcaaacaaacacacacttatatacacaaaaattttagatcttcaactttgaaccagatctaagatctctactttcattacaaacccaacccggactatccacttacgagatctccacacaaacccacgaactcatccatccccgtcgaaccaagaataccatccctgtcatcaaacaataaacccacgaacccagaccatccccgttgaaccacgaacccacgaacctgaccccacatccccttcaagccacgaaccccatcgccatcctcgtcaaacctgcaacaaaaaaaggacacacacacacacacacagagaaacaaaaagagagagggaaaataaaagagacgagtttgggaggacctgagttttggggtcgtagatcttgatttcgtagtccaaacacatcgccagagtgcttctccaccaccaccgatgacttctccgtgagtgcatctgttacgaattttatggttactacgcaagtatacgcaatcaagtagtatctcacgcaaatgaggtc

SEQ ID NO: 406424 - DNA, 352 bp, Cannabis indica
ataattctatggtagtgactatatttttgtacctatactatacatatacttttttaatcattgatctatatgacttttaaaagtcaagattgtgtaagatggactaaatctggaaaagctctgttagggcttcgtcgactccaatctctaaatcggagctatggcaggtcgaggacgcccatgaaaggatgctttgaaggggtcgggtagcagaggttttgttgtgccgaacagtaaagggaaaatgaaggtcacggggaatgctgggaagaaaaggggtccgactttgtaacaccctaaataattaggcacgctacccaaaatgctgttggaatttattttaccaggatct

SEQ ID NO: 406425 - DNA, 540 bp, Cannabis indica
tgctacgatgcccaagctttcagactagtgacgctgaatatggtggatggacgtctctattgaggtgtctcaagtcggaggttggtggtcgtgggtagctccggtctcatagattagtggaaggcgatgaaggtggacttctctgcgctatcttcctttcgattttgggggatggcgagtttcggtggtccttctcaagcaagagcttaggccttggcgtgttcactacaagaaatgtcacttttagcaaaaatttggtattgcgctagtaaaatggaatttacttctgatgcgttggtaaaagaagttggcaaatcaacgttggtattagaaattttgccagcacaaaatgaaaagtgctagcaaaaataacttttcccagcgtctaaatgcgctggtaaaagttagattttaaccactgcaatgtgcgctggtaaaactttgacctgccaacgcagtttgcgaaatgcactagaaaaaattacttttaccggcacagtagcgaactgtgatggtaaaatgacatttcttgtagtggtt

SEQ ID NO: 406426 - DNA, 580 bp, Cannabis indica
actacaatatcatagtattataaaaatagggctcgaaattgtcaaatacacgaccggaatatataaaacatgattgttgtaatattcgtttatatttttttttttgatgaatcaggaatttcattgcacaataaccttttatgttacaccctatggctcttcaaagagcaaacaactatacatcttactgtaaaagaaaaaaaaaagcaaactcttaataaatcttaaaaccattctaattcttttttatctatacattttggcattacacaagtaattctattttttatgtagccattttgtttcttgcaagagtgcttgtggttgtgtagtctccagggaccataacatttgattcctagcttgccaaatcttgtaaaccaaggcagcaatgcatgctgtgtaacagcttgccttgaatttgttcagttttgctcgatcaatccatctcaaaatactcggtagggattcagctttgatcctctagtgccgccgtatttttaatcttgtaagcagcttcgagtgtacctgcagtcaaagacagatgcagagtgttttctactgcattattacacagtat

SEQ ID NO: 406427 - DNA, 508 bp, Cannabis indica
aaaattccaagtggggcccaatgtatcctatggccggccattagggaaagtattttccatttaatttcttcattattttaatgcctaataaatcttaacctgtttaagtggtttcctataaataggtagtgatggcttaaggggaaagattatgatgcatctgattcgttcagtaaaattttgagcctccttccctatagcatagccgaaaccctatctctctctttctcacttcatatttttttaccttgagtgatagagtgattgcccacacacatcaagttggtcctcaatcatagtatgtaagactgtgaagaatctaatcaacaagaaggacaatcaggctcagatcttgttgatactttgctacagaaaggatacaagggttagagatctaagcggaaggagtcatttaattccgctgcacccactataaggtttctcaaactttatatgtgtttattttattgttttagaaattcatactaggatgttaaacaacatacat

SEQ ID NO: 406428 - DNA, 534 bp, Cannabis indica
tagatggagaactcgatcggatttgcgacgctttgctctaagagtcttctttgttttctagggtttttttctcttaatatctcattttctaatttcgcgacccctttttatataaaaatcaatttttacaactcaaaaattgaaaaaaatacaaaattgcccacaaattgatcgcacaacgacagtgtcgcgacacaaatatagggcaccacaacacttagagcttttttgaaaacttaagtcctttctgtaaaattcacacatcatgacacctccaaggtgcaattatgtaatgcccttacttacgtaaaatagatgccataaataaattggtgttaagatactaatgttgcctttattttaaaaataaaatagcaacaatattcaaaacatgggtacccagttgaaaataaagtattactacttaggtaaaaataatagaaaatttaaacgacaacatcctcgataagtttaataattttttgttaaaaaaagactttcagcggaagatggccaagaccacacgcagttaca

SEQ ID NO: 406429 - DNA, 513 bp, Cannabis indica
tttctagcagagaaggggccattacaattgcagcaacagggaatttactgatcatgggtgagaatccttcaatggttcccgctaaagtgagacaacccccagaagtcaagccactatcagccatgcaactgaagaggggcttgaagaagaagaggccaacatttgtcattgctcccgccgtgtacgatgcagaagtggaggagtccactccacctataattgagcaagtgttggatgaattcaaagacgtgattccagaagaactcccaaaaagactgcttcccaagaagggagttgatcaccaaatagagcttgtaccaggtgcaaaggctccagctaaagcagcataccaattatctcccccagaacttaaggagttgaagaggcagctaacggagatgttggaggcatgattcatcaaaccatcaaaggcaccttttggtgcccccatgttgtttgttatagtgagatttctctctcacctagatactcgagaccagactcctctttaaa

SEQ ID NO: 406430 - DNA, 648 bp, Cannabis indica
aacagaaatcgctactatgtacacttatgtacatataacgctaaaacctcgaagctaataaaaatatattatgtaaaaatgtacacaataataatctaattaatatttaatagtgagatttaatctcaaatttacaaaataaaaaatagagggtattaccaaaaaaaaaaaaaaataataaaattaaaacacaagggagtgccgatcccaactataaaattaatgtttgtaaaaaaaataaaataaataaaattaataaataatgattatggggcgttttgtcgtacacggctaaaattagtgaaggctcttcttacaatacaagccaagcttatccctgagattattaactcaacataaaatatcattgcttccaaaattgaaactctatccacatttcatcgtataaaccaaaacaaacattttaaaactaccacttttttctaaaaagaacactaaagtagaaactaggaaataaaataatatgttgttcggacccgcgctccattcggatattcgatccgtggcagcattagcatttggcaacagggaagtgtggaacccggggttttcctacccgaccccgacgtcccttgtgctgggagtaggactcggaggtggagcttgcgagtgagagcttcctctatt

SEQ ID NO: 406431 - DNA, 598 bp, Cannabis indica
ttggttttttcatttattttttttttatatagttttgatgcattttatggcttttataacatttttttatggcttttatttcattattttatggtttgtccttcattgtttataatatatttgtggtatagtaaataaataaaagaagtgttttatggtttcaagtcttgataatattataatataaattattttactatcttattcacatagcctattttatcattaaaatggtgtgctaatagagttttatttattattattatataggtcaattttgtggagggtctgttgtcaaagagactttaccgataaatttattttaaatattatttgtttgggagttattttcttctaactattgagaatttattttcttagttgttaatatcattggagggttaattcaattttctttatcttatgttgttttatggaccattcttgatatgttaatgagttgacgtgtagttttttagtattataagctgaagttttaactggtttagtgtgctgtttgaggatgtcatagctttattgtctaaatttttaggggcagtttttgttgggaatattttaccaagatctagattaacta

SEQ ID NO: 406432 - DNA, 1102 bp, Cannabis indica
taagaaaaaaactaagaaaaaaatcgaaaaacaacccaacttacatccttgacaaatttcgaagatttggttctctttgtcttacgagattcaatcttagctggaaaaaaatctttttttagaaccagatggctctgcagcatcacccattcccttcttcgcaatgtctttcaaacccattttaggatcgtagcatagatgagaggttgaaattcgtgggttagggcttcacatgggatgatactgtgttatagaaaaaaaaaaaaaaaagactaacagaaaataaaagaaaaattaaacaaaaaaaaagaatgaaagaaaagaaggtgaaggagatggagtgtaataatggagatgaaagagaagaaggtggcaaaatataatattgaaaaataattttttaaaaaaagtttaaataactgaataaagacaaaaatgtaaaaaaattagcaaaaaagaacaccaagtgtaaaaattccgattttacccactttggtagcctgagttgaattaagaatttaatatttccaagtagccccttattttaataattatccaacttttatagataagtttattattatttttaagtttatttatataaaatatttgaattaaaattaaaataaaaatataaaaaatacagtttatataatatttgaaattaacaaattttataatatatattaataaattttattatatatttttgcaattcttttctagtttttttttgtttctacaaacatcgaactcccaactgagagccaccaccacctagttgaaatacacgtcgagcgcgaccaagggtgcatattactaagaaatcaaatcattgacaataaatgctaattataattttttcattcaaattttgagcttaaaattacatgcaaaaatatttttggggggttttttttttatttttacacatcaaaactattttttttgtatttttacagaattctgcatagaagctcctattgcaactaccgctgcaacctaaatcgcaacaaaaaatcgtataacaacccacataaaaaccatcggagaaaacactttaaaaacccaaaccgtaaatttgaaaaaaaaaaaagttaaa

SEQ ID NO: 406433 - DNA, 868 bp, Cannabis indica
ctctctataaactcactattttgtttccacaattgcttttgaaagatctttaactaccaccttcgagtaaatgagacaacacattatatcaagtaaatatcaaaatataaaaagtcttaaagcccattttattattagtttttttctttaaaagtaacattaatctataatgtatatagagaaggatgaacataaaaaatatgatagttttttttaaaaaatatatatatataaattaaaacacatgagctattgtaattgctatttgtagataactatttaggtgtgagttataaaattaaaagtcactatattaattatatttatgaatgattcaatagtatttattatttataggtaattatttagggatgtgagttataaaaaataaaaagacactatattaatatactactaatgaatgatttttttcttcattagaatatatgcactttaactacacctaaatgtggcttaataatagtaataattaaatataaatatagtgtaagttataaaagtaaaaagacacattgatcatttaataaatacaatatctattagaagtatttcttcttattattattaattagttgttattgttgttaataaatgttaaatacaaaaaattaaaaaaaatgcagattagagaaaattgaacataagattaagagattgccacatcaattaatatataaatattctaaatttgagcattaattttaacaaatattggaattgaaaatttgtaagtgtaattatagagagaaaggacatgcttcatgatcaccatgactacaaaatgtaaataattttttttacaaaattatatatttaaaaaaattaaaattgtatttaataataattc

SEQ ID NO: 406434 - DNA, 510 bp, Cannabis indica
ttatagataaactataatgtatgcatattatttcataacaatgagtatgattatttatatttatttgttgtatgattattagctaatatatgattaaaaattaaaatattactcacaaaatttctgacttataaaagtataatagttatcaaaataatttaaattatattaaattacaaactattttaatggaaaacaaatataaaagttaagtaagtaatttaagatgtaaaagcttcaaaactacacttttcatataattataaattatagattatttactatattttgaagaacgagaacaacaaactatggaattccaagtatgatgatgtagatattattgtaaatagagtcaaggaatctgtaaagctccgaattcatgtagtatggcccaaaaaagttagcgcaagtgatttaaaatggtttcagatattgtaaaaactaggtaacgagcggttgtttaaaaacttttatttatgttgtaaaataaaatttatattaaatata

SEQ ID NO: 406435 - DNA, 576 bp, Cannabis indica
gagccttcactgtagaagcccaaggtcggtctggtggattggcttttctttagaggtttagtgatatgggtagtatattgggcttttcaacaaaccacattaattattctgtagaattcgaaggtgaacctaagtggagagttatggggttctatggggaacccagttccccaacatagcatttcgtcggaactcttggaacctgctacgatcgttggtgggtactcctacacagtcgtggtgtgtgataagggatatcaacaacattatttcacaagatgacaaaaagagaggataaaattaacataattttaatgataattaatatttatattcatttattggtcgatatgtgttgttaccgtagtaaggtacatttattgaattgtaataagctattacatgatctatctgatctttagctactgtaaacataaaacatttgaatggtaaattccgtccaaaagacattgctcaagagcaatattgattttgaataggggtgttcattggaccacatccaatatttttaggcctatccagatccgatccaattatatattagatgttagattt

SEQ ID NO: 406436 - DNA, 1008 bp, Cannabis indica
  modified_base (36)..(36): a, c, t, g, unknown or other
  modified_base (51)..(51): a, c, t, g, unknown or other
  modified_base (69)..(69): a, c, t, g, unknown or other
ggcttcgatcttcatgaacgagcctattcttgggcnctgtctacaaattanaactcttcaatgctgtgnggatagctcttgagaatagaaatttttccagtcagtctaaagctcgatttacttcaactcaagggacaatttttccaatcttcaataaggtaatctaagcattttttggctatgttgataaaatcaagtccatctgtgattctttagctattgctggtcattcaatcactaatcttgatcttatcttcacttgctcaatgtcctcggaacggagtttgatcctgtcgtttctggtatcacttctcgaagtgatgctctcacattagaagaagtccaagctcttctaatgtctcatgagactcggcttgaaagacacacatccatgatggatctttccacaaaaatggctgcaaatctcacatttggctccagacctggcccttatcaacatccttttgcctatgggagaatgcctcctggtgaacaacaatcaaggctgcctaacagaaactatggctgtcctccctcgaataacaagcatttgtgtcaattatgcctgaaatatggtcacactgcagccacctgtcattacaggtttgacaaaactagggttacacccaagaaaccttcacctcaaccccaggttcatctcacagaacagggacctgttcttgatcatcaaaccccaactctccctgattttggagatgacattggatggtatgttgacattggtgcaaccaaccatgtagcctttgctatggaatctttggactctgctacaccctacaatggtcaagaatcggttgttgttggagatggtaagaaattgcttatctctcatattggtaaaaccactcttccttcctttaattccactcccttgaaactacaatctgttttacatgtcccttccattacaaaaaacttggttagtgtatccaaattaacaaaagataatgatgtttttcttgaatttcacaaatattgttgttttgt

SEQ ID NO: 406437 - DNA, 949 bp, Cannabis indica
taatatttttatctttgatttttgattaattatttaataaatatcactcctaactaaacgggtctagtctattaatgacatgtttactaaattacaattggaaatcagaataatcaatgaaacgggttaaatatataataatcggaaataatattttattttgttgtttactaaattgacgggaaaggaaatgagtattattttattttgtttacataatctagatatgtaatcggaatgacttaatttgattaaattatcatgtagttattttttatttatatatttttgaagggtatatttgtttttttttattttttttgtttttaattaaaaaaaaatataattaaagtaaattaaagaaagggaattacttatgaaaatgggagagaatatttttctttatttttttcttaatttgtgtgggacctactaatttctcgtgttctaaaatttagtaaataaatgaatgggaatcaatctatacaattgattcctattcccctttagtgaaaaagaaaaaatatgccaactttactaaacaataaacatagatatttaggtctgttatcagttataaaatttaatttaattgttagatatttttatattttagttaaaacgttatcataataaaatatatattcaaatataataaaatttggcactcacatttaaattcaaaattacataagctattatgattttttttacttcattaattaataaccatatatattttttttttttgtatatatttgtaccgcaggttcctaaattatatatattttggcaagtttcctcaaattttattttttgacaaattaattttcaaactatacatgttttggcaagttagtctccaaattttatattttggtaaattaatccccaaatttttatttctttagcaacattaagttctcactattagatattaatattttta

SEQ ID NO: 406438 - DNA, 561 bp, Cannabis indica
atatgtgatttatatatttgtacactttgagaaagcgaataattaaatatttcagagacttccgccagggaccaaaactagccatactttaaataatattaaatatttgtgagagcaaccttacactttatctaagaaccactttctctaatcaaaatatgttatcaaaattttgtaaaataagagtgctaatggtaattttcttacaaccttttagttaatttctatgtctgaaatcacgtatcgaaatattatcttaaatttttcatggcggtattcattatactattataacattatccctataaattttaaaaaatatcaattagtttataatgccaaatatgaagttcctaatattttaaaataccatgctcgtttcaaaaaactttaaacttttttttttagctactgtaaactattcgagatttttaaaaatttacagggtataatattataattataacgaataccactaatgaaaaaaaaataaaaaaaaaataatttacaacaatgtaattttagactatggaagttaactaagaggttgtaattaacact

SEQ ID NO: 406439 - DNA, 643 bp, Cannabis indica
cttgagcctgttttgcctgaacagccataagcttcgtcagggcctctacttgggctatcaatttggtgatggcatctaccttgtgcataccagctaccttcttcgtttaacttctttcagttggccattgttgattattcatggccatttcttcgagcaaatcataggcctcgtttgcactttttctcataaatgccccaccagctgcgacatctataatcgttttggtgttaccaatcagcccgttgtagaagttatggaccaacatccacttttcaatcccatgatgtggacatttcctgattagatccttgaacctcccccaagcctcatggagagattcattgtccatctgacaaaaattattaatttctcctcgcagctttacagacttcgctggaggaaaaaacttggacaagaactttgttgccaaatcagtccatgttgcaatagagttcggtggcaaggagatcaaccaacttttagctcgctctctcagcgagaatgggaacagtcttaagcggatgtcatcatcattgactccatttaccttgaaagtctgacataactccatgaaattagataagtgcaaattggggtcttcagaggggagtccaccaaattggactgaagactgcaccat

SEQ ID NO: 406440 - DNA, 890 bp, Cannabis indica
ccttcctaacaatttaatacgtacctttactaattttaacagaataagttattttaagtctttatagtttacggatttattttatttaatattatggatttatttagctatctttctttcatattatcttagttttttttattaaattatgtagccatagatttttatttatgattgttttataggtcgattttatggacgacctacaattacagagactttgtcgataagtttaatttcaaatataattttattttattaagaacctttttgaagattataattgattaaggctcaaatttatatattttaagcttctaattgtgtacataatattaatttaattagatatttttataattttaattagaaatatttaatttaacataattttatgttatttttcatatttgagcaaagtggtataaatgaaaattgagcaaaaagagaaaaagacttaagtgcaagttcttgtggacttggacctccacaaattcatacatcaggtcaaagttctcaaagctcaaatatatgtatatataggaaaatttacacccattactgtgttttcccttttttttttcgtttatactgttacacgctcaaatttacttttatactgtttttgaattttaatattttttggcagtatactgcctttggaaagtttaatatataatgatttttttgctttacacttgtcacgatagggttttgccacgttttttttttaaaacaggaaatcattttatattttttgatttcacggttttttacacttatcaaaaagttggtgtacttttatttttttttatttttttttattttttttcgtaatataaattttttttaataaccctactctctcctcaaactgttcatcttctcca

SEQ ID NO: 406441 - DNA, 701 bp, Cannabis indica
ggccagggggggcgtgcaagaagtcagagtgcttaaaatatctagctttgaggatagagtgtaggagggaagatctgtcatgccaaatacgccatgcctgcttagctaagagagcttgattatgagaagaaaggattcgaaaacccagacccccaaagaatttggaaacagaaatagagtcccagtttttccagtgcactttttttgtgccctgagatccccaccagaatttagcaatcaagctttggatttttgaacaaatggatttggggattttgaaacttgacatggcaaaagagggaatggcttggactaccgctttaataagaatctctttaccagctttagagaagaatttttcattccaggaattaagttttgaggaaaccttttgaagcaggtagtgaaacattgaggttgaaaccctgccaacacaatggggagcaccaagatacttgctaatgaagccttctcccataagctggagatcttgacggaaaagatcttgggccagagaagtggtattgggggagaagagaatggaggatttctcacggttcaccaattggccagtagctttatggtacagatcgagaatactattgagggaattactggcttgagggtggacaggagaaaaaccatgctatcatcagcaaacaggagatgggacaaggggagctcctctacaaatccgaata

SEQ ID NO: 406442 - DNA, 815 bp, Cannabis indica
gcacgcgactttcaaaccctccatagcaaccatctcctttctttgaaccacaatacaagtaagacgttttttgaactggttaaatttttcaatttcacactagggtagaaattttcgttcaagctatgttctggattatttttgcatgtgaccattagaaagagtgtttagaagattactaggtatggaactgtttaggaatgatattgtcttgcgttttcttggtaaatagtaaataggttcgaaagcttgaaccttgcaggggtaattttcatgaatttaggttgttctttgtttacccatttggattcattagggcttcaaatggggttattttttaacttctcgttgtcctatgatgtaatacccggtaaaaatatacatatattttaaattttatttgttatacaatttgtgtgagaataaatattcatttatttctactaatagtgaatagagactattgcttagaatagtattgatagatttctaaacatagttgaaattatagtaagtgtcaaggtaaaattatggtgtttttacgaattaggataattactcaattaaagcccaatatgaaagtctattagagttttatagattatttagtgggtttaatctattgtatgaagtgcattaaataacattataatggaattaatgtcacaaaaattcgtaggttttgataaattcgcaggattaaaaactgttttactaaaatgatcatatctagagttttagagctccgattgaggtgattccagtggcgttggaaagataattcaaagatctataaattttgtagaaatagttat

SEQ ID NO: 406443 - DNA, 901 bp, Cannabis indica
gtgtattcgatccgcactaagtgcgaatttcgtattttaaatccaattcaatcggcataataactcaaattcaatccgacaaaagtacaaattggattgattattttaaatttgttacttttaataataaattatttaatatttattataaaatattttttcacataattaacaacaaaataaaataagttattatttttttatatctccaacaacaaattaaaaataaataaaaatacaaaaataacaaattcaaagaatgaagaaaaaaattgcatgtataaagaaatatttaattttgtttaagattatatttttcttataaataagaataaaatatacgttatatctatgaagttttaaatatatttgtattatacgtattaaatttttaaattaatattcttaccgtaaaatatgaattgtaaatataattttttttaaaatatatataaatatgtatggattggattagatcggttacttttatatgtcaatcaacattcacaaatacagattttagattttccaatctaatctaatatatacaagtgtggatatccacactttgtgaattggattagattggatagtggggattgaattagattggttaatttatgaataccattatattatttgtttttttatgaaaaaataaaaattatattataaaaattagtgtggcgcaatttaaactgtaattattaaatttaaaatcgcactgcattgtgccatttggtaaaaatataaactacaactgcaatacaaagaatttcaaattatattttttatatgatggggcttgataccaacaatttatgtaggctaattagtaattttttcttctgaactttgacatgtagtaaatcgtgctctctggccgttaaaaattcccctc

SEQ ID NO: 406444 - DNA, 508 bp, Cannabis indica
aaatcaaatttcccattaaaaaatcatttcttgtatccgatcttatgtactatgtgtatattttttaaattattagatattgtgatagaaggaacatgaagaagattggttagggacaaagttttggaagtgaaaggagaaatgagagaaatattatcaatattttcaatgtcaagaccagtaccattacctacaaagacttgttcttggccagaatagtatgcatgaggcaatgttggctccatcaggagtgagatgatgagtggcaccagaatccgggtaccagctgtcatcttggacaatctcaggtgttgcaaaacaaagcctgcatttttgcaacattagctgaggcagagaactgattaaaacactcgggacctgtaaaaaatttatcaaatctatagaaacattacttgacagtgtgcccgagcttgtggcatagctgacattgaggtttttgtgtccaagactgagaggctcctcgacctatagatgcataacctctgcc

SEQ ID NO: 406445 - DNA, 714 bp, Cannabis indica
tagacaacaattgattaagtgaaccaaaacatacacaaatgaatgaaaaatacttctgttactttattgatattgaatattctggattacattgaaatagagtttatttagggcataaaacccaacattatcctcctaaggcgggggatattgtggagtggtgtgggaagtacattaaagattttcagcaagataatgggaggactaatggtggggggcctcggcagcagcaacaatgggaactgcctggtgttgggtcctttgtggttaatgtagatgctgggtttttttttacaaaatgaaggggcgtctacgggtgtggtggtgcgagatgacgtgggaatggtccggtttgcttcggccaccgctgtgcggtttgcacggtccccgttgctggctgaacttatggcgattcgggaagggttgctggctggtatacagcgccggctgccaatgtttcattttcaaacagactgtatgcaagcagttcgtctttttcatggtgaggatatgggttgtcgagaggaggatggtcttattatggagattcaaaggttgcttcaacatcgttctgttagtggtttgcggtttgtatttcgggaagctaatgtggtagctcatgtattagccaattatgctttgacaaacaaagttagtgctatgtggatcgggatttctcccccttgtgctcgtcacgcaattgagcgtgacttg

SEQ ID NO: 406446 - DNA, 741 bp, Cannabis indica
agtttatgtcacactgtaatttgtattttcttattacttttgtgttttatcaaatttgtttagttaacttttttttatgacgttggttgttttactttgtcgcagatggtgatacccctattggataccgagagtgctccgcactggtttgcggcgaatctgaccatggataatacaacagtggaaattagagactcgttgtcttctgcaatgcataagacgtcacgtcagaacacttgcctagagatggtatacacgtgtgtacatagtttgctgttgtattagtgtaattgcaagaatctcagctgtaattgttttaatttttttgcagttgcagactttggaccaattttttgcctctgtcaagccagaaaacctcaaatttagcgagttcataattatttcttctggcagtgactacccacaacaacaaaatgggcacgattgtgaaatttttgtaatgaagtacatggaatcaatggttgaggaaaatgaaacaatggcagaggtaatttaatgttgatttctgtagtttagttttcatccagttaactaagtgtttataacgaaattaaggtatcaatctatgttgtgttgatttgtttctatgtatttcgttgtcatgtgtattactcaattggatccttaatgtacaatgcagtttaatcctattgaagccagactggattgtgttgggcaaattgtcacccacgagagtaacaaggctaaacatgctgtgat

SEQ ID NO: 406447 - DNA, 907 bp, Cannabis indica
tgaacctttgggtaggctccgcatgattaacaacaatagctgcacggagtacggtagaattccccggtacggtcattcaggaattccctccgaggacgactcccataacgagaagtgttctggcgccaacgctctaaacagttgtggcttcaagaaggtgatagtaacagtaagtactttcatgctaaagctacttctagaaagaaacacaatactataactcggcttatgaatgatgtgggtcactgggttacttgggaggatgagttgccgaatgttatggttgattatttcaataacttatttacttcaaatgtggccgattactcaactgtggtagaggagattacttcttcaattaccgtggatcagaatttgtctttacttaggccggttttggaggaagaagttagaagagctctgtttagtatgcatcctgataaatctcctagtcccgatggtatgaccccaggtttcttccagaaatactgggaaatagtgaagagcgatgttgtgaaccaagtttgccaattctttgcggatggcagtattcctgatggactaaatgacacgaatattgttttgattccgaagaagaaacagcctacttcgatgggtgaccttcggcccatatccttgtgcaatgtcttgtataagatagtgtctaaggtgcttgcgaaccgtttaaaagaagtattgcctcagatcatatccccaaaccaatctgctttcatctcaggacgccttattactgataatactatgatagcgtttgaggttatgcactatctcaaaagaaagcgtaaaggcaaagaaggctatatggcgttcaagctggatcttagtaaagcttatgatcgtgtggagtggggctttcgttcgagctatgatgagtaaaatgggattt

SEQ ID NO: 406448 - DNA, 501 bp, Cannabis indica
aaaaaagaaacaaaacaaaaaaaggttttgttcagttttaataaaaaaaaataataatattacaaaaatactttcagctgaccaaataaataaatatatagcccaaataaaaaaaaattacacaaataccacttatacaaacctttaacccaggatccatgcttcttgggcaactatcgcgcaaccacgcagcaacccaatgcaaccgaaacaaaaattcaaccagaaagagaaccaccattaattttcgtgacttcacctgagaagacagccggaatcaattaaaacaggggttggttcgaattcatgaaaaaaaaagtgtagaaaaactactacgaaactaaaattctatcgaaaatctaatttaatttgcataaagctaatgtcccgacttcaattttcagatccatgaaaggcagatctcaaaaagttgaactggaattctcaaacaatccaactcaagtataatctaaaaaaaattacatcaatactatagtaaaa

SEQ ID NO: 406449 - DNA, 553 bp, Cannabis indica
cagtttaggttcaggtctcggtgatagtctgggtttgggtctcaatcctaatctcgatccaggtctgagtcctgggttcgagtctgagttatgttacgagttcgggtccgggtctgggtttgggttacggtcttggtctaggcttcagtctgtgtttgtgtctgggtcttggtcttgttctgggtatgggtctgggtgtgggttctggtacaggtctaggttcttgtcaaggtcctaagtcaccggtcctaggttgcaggtcctagcacaagtctggtattatgttcgggtctgggtcttcgaaatggttccaggtttgggtcttggtacgattccaagatctagacaccgactacgagtttggttgaagcgttgggtcgtgggtcaagatctgaatcctaggtccctgcccatgtctgtgtctggctccgagtttgggaccaagaccggggtctaatcttggatcccagtcccagtcctgggtcctgattttggttctaatttagagtttgggcccccaatctaggtcttggtactgggtcaaggtctgagt

SEQ ID NO: 406450 - DNA, 946 bp, Cannabis indica
gtacccaagtttgattttacaaaaatttaaaatataaaatttgagattttttgacatttctctctcttcataactaatatttattagtattatgttaacaataataataataaattaataggtttcagattctaaataatatgtggtataattaattttggagtttcatagtgcattaatagtaacctctcttaatttaattatatatggcaaaatgacatgggtcaccaatttattgggtcagcggatacacaatggatattttggatgacgcagacataattatatagtaaagtatattgaaaattgaaaattattaaagtcaatactgattttggttgaatttataaaaaagagtttaaaattgaagattatgatgtaactgactagctgggacatcattgatcgaatagaagaagaaaccaataaaattaattaataattaatataacgtaatcatggcaccacaaatttttgctgcctatcaaataataatgagcttatactgtcctcctactattttggtacaaatatttagccggccaagtttatttttcaagcttagcttaactgaaaataatgaaaaaaaaatattgaaatggccatgttggaagttttttttttttgttcgctgcaattttttttaaatattaataaatgatccaaaattaaatattttctttcttggagtatattggttttacacatctgaatgaagaaaaaaaaaaaatcaattcctatttttcttcactaaaccatatacataatgttacgtaataatatattgttattaacattaacagtacctaacaccacataaaagagacgttttacgattatttaacaaaattctctaaatctatgcttagaaattggattttggcgaggaaaaaaaataaagaaaatacagagaaaaaaaaatgaaaaataatatattattattgaa

SEQ ID NO: 406451 - DNA, 505 bp, Cannabis indica
ttttctaatttgttataaaatataattatttaattgaattaacgtcaaatttaaatttaaattaagatttatattaaaaaaataattatctaattttgttgatacttttaaattaaatttaaatatttaaaattattttttttttttaaaaaaaaaaatgatcaattaattgatttaacggtgttaattttaaaagtaatttgcaatgtaaatatctaagtttaactttcagttgtagataaatatccaagtttaattttttacgataataatacttaagttatatttttagaacttccgtaagtacctggtcgttaagtatcaaatcattatctacgttttattttcttattgatatatttaaattaattttaaataaaaataaaaatttaataacttggacaaattatggactaccacgtgacctttgattgtttgacttacacctaacaactaggtatcttgtatttacgagagattcagaaatgtaacttaaatattatta

SEQ ID NO: 406452 - DNA, 902 bp, Cannabis indica
aaatcaacacacaagtgtgtttccatttcttcgacatcctacaaggaaacaaaaagttcgagtggacagaggagtgtgaaaaagatttccaagggctaaaggcacaacttgcaaaacctctcgtactctcaaaacctctgaagggcgaggaactgagaatatacttagctgttacggaacatgtcgtgagtgccgtagtaatcagagaagagaatgatatacaacacccagtctattacataagtaaaagactcattgaggtcgagggctgatttccgttaatagaaaaactcgcctactgcctcattgtagcaacaaggaagttgaggcctgatttctaagctcatcctgtttgggtgtataccgaccaaccactgtgccaaatactgcaaaaaccagatgcttcgggacggctacttaagtgggcggtagagttgggccagtacgaaatcacttttcgaccccgaacaacaatcgaaggcgaagccttggcagactttgtggtagaatgcacaggcaaaaaagaaagcataccagaaagcaaccccgagcctgtacaaatacctcagccaagtcacaatgaggacaatttgacctggaaactacatgtggatgggtcggctacagatcaactatctagtgcaggaattgcccttgtcacgcctgggggcaacacctgcacactgcagtcaagttcggattcaaagcatctaacaacaaagccgagtacgaagctctaatcgctaggctaagactagcccaggagacgaaggtcgaacacatcgaactctgcagtgattcacagctggtggtaaatcatgtatccggagaatatgaagctcggggagaaaagatgagagcatatttgagcaaaatacatgatctgctcgcacaattcaaaa

SEQ ID NO: 406453 - DNA, 687 bp, Cannabis indica
aaaacaacatggttagagataacggacataaaaaacataaggcataaaagtcaagaagctcaaaaacaagaaaaaatagtatgcaaggtgactgaccaaacaagactcgaaagtccatcatcacctaatatcgatcttatttcagataaaacaactttcccttttcttaacacgggaggggatgcgcgaacaggtgaaatggcctcccttatgcgaatcgcagttccaacaggcctaggcggaccgggagtttcttcttcctcttaagtagagtcaccgctcttcctcaacttcatcttcacgatttaagggctcctgagcatattgcttggcccttgcacctcccttcaacttagcttcgcgcttaagttgaatgagttcattctcctgatgagctcgttcggcccgtccagcaccagatttcctcttcttccccttcacggacttaggaataaagtccttgggaaagagcccgtacttcacaaagttatcctcagaggtcaactggataatattctagtcttcccccggtagtcgagcaagcttttgagctctatccctgagagcaagagtaaggggagggcggtgatatatcggaatctactggaaccgagtgcgagtgatgcccgtgccatccattatgaagtactcatcaacaaaacgcccaatcttgctgatggccgaatc

SEQ ID NO: 406454 - DNA, 523 bp, Cannabis indica
agtcaaattagaaagaaagaaaagactattatgaggtgtttggtaagagggttgggttttggggaatgagaatttaaaaccaaataatataaagggggttccatttttaagctttttttttttttagcaattgcggtgaaacgcttttatgttttaatttttatacacctaattttcttatttatttttatagtaaaatccctggctcttaagtttttttgggcaaatttgacacgtcagttaaatattaccgttaaatattaactggataaccacggtatatacttgtgtatatgtaacagtaaaatctcgaaatcgatacagtagtaatctaattggtatttaacggtaatatctaattaaaatcttaaatttgcaaaaaaaacaaaaagtaaacttgagggaatttagccactaaaaaatataagaaagttaagtgtttaaaaattaaaacataagagagtttcgccgcaaattttttttgtttgggtaattaatctttaaactctttaaatacttgagt

SEQ ID NO: 406455 - DNA, 375 bp, Cannabis indica
actttctttatttaccatattataattatttaaataattaaaaaagataaaaaaaaataataaatattatatattcaataaaatattaaataaccatcattataataattttttttttttatagtaagtcaaatataatatagatttatttttgtgttaaatttaatataaattttaaattttacatttgagatgatgttacataacattttattattaattaacaataaatattaaattatgttattaatatataacacgtatgacccgtttggtacgcaggattagactggattggactgaaaatgattggactagactggacaagattcgattatggtgaaagtaatcctgtgtttagtttaaaaatagact

SEQ ID NO: 406456 - DNA, 626 bp, Cannabis indica
gtatgctctgatatgcattagactagacaacgaagttgagtaagggtggtatattaatactcttagttgaaaatacaaataaatcttaagatacaaaagaggaactatatgttagtcgagtaagggtggtatattaacactctcagtctacaacaaatcaagtttctaggcttgcgttaatgctagaaagtctacttatgagatggtgattactctggggtggagcaatgatttttagagaagtgtaaaaatttatctgaagtctctaactctaccaatgagattgaatgttaaagtggcccagaaggctactagataattatttagcctataaaatgttctatgtaatttttggcattattccagtcatggatcaactactagtgttacttcatgataatacaacatagttgccaaacagtaaagagtctaataccctaagaggagtaaacatatatataaaaatttcacaatatctaaaattttgtgactaaggagaagtaatggtggagaaggttgatactatacaacctatcaaatcctattacatagataatactacatactatacttgatttggatatcaagatgttaagattaattgaaatacacttttagttttatat

SEQ ID NO: 406457 - DNA, 586 bp, Cannabis indica
aaatgggtctattatcaaatttttgaccctaagttaatttgtaccaattgatgcttttaatttcttttgatatcgaaaatatagaggtggaaatttatacctggatggggattcctttcttggtggttagtgaagcaatggtaggaaaaaatttcaatactcgaatcgatggggcgagagtaggaataatattatccacactatatttgaccctgatatagatagatagatttttttttttttaaaaagaaaacactttattcaacaaacaagaaactacaaatggtcaggcttctctacatctaaaatagcagcagcacaagagggtaatacctctgaccaaaaagaattacatctgtgattaaaagccacgacaaaagaaaaggcttatctcgacagccctatctcggcgggcttgcgtgtgcgtgtcgagataggcctgattttttttaaaaaaaaattctgagcatagcaataacagcgtgcctatattggcccgccaagattagtaaaaaaaaaaaagcccagcccgcccatatgtgccctttaacctctcttttcttcttcttcattacatcttccaaaa

SEQ ID NO: 406458 - DNA, 515 bp, Cannabis indica
aatttttcttttatttttgtgtaaataggaataaattagaaaatacatcttttttgtatctattaatcaaaaatacccttatattatttttttattaaaatatagtggattgtctaatataccctcactctttacttaaatgtagcatataatttacataacctaaggagtcttatgagaacatcatccatagagtgggtatatctaaaaaaatatgaaaatagaggtaaaaattaaagtagaatttacgtggtatatgatttttttaaaccttttatgataaatatggcatatttaactatggactcctttatatggctttttttaactttggcactagtttatgggattttaaagcccatacacctggaactattttgccaaaagcccatattgtgggttttgtagtttctttaagttattttagtccttttaagtatttaaattttttggtacagtttttttttaagataaccgtttattgtagagggatttttgcatgtaatcatggtgat

SEQ ID NO: 406459 - DNA, 554 bp, Cannabis indica
attatctgtgttttgaatgcaatttttatattatgttaaagtgaaattacggactaaccctatttgtgaaatcccgagttgtgtgactaggattactggcacttgatcaggagcatccaggagtttggaatctctgttattgcgggacaacaggtaagacagtagtttgcacgtagagtatgcatagtggcgcttattttgaatatgatatatgtgagtaattgtaaccgggattagggttattaccctaatatgagcggttaatagcctagggttagtaccctagtgatataagttgagtaaatgctatgccatgctaagtatatgattatattgagatttaagggttatgcgtttaaggcataatcgggttggactctgtaaccataactgagatgaactattctaaggccttattgtatttagacgttttagagaaacacgtaggtctataccacgtagacataaatagacgtgtgagagtaacacgtaggtttacgtcacgtaaacataaacagacatgtgagctgtaatgaccgctctagtaatgtgga

SEQ ID NO: 406460 - DNA, 1110 bp, Cannabis indica
gttattaatattattgtatctattttttattgattaaatttacggttactttcttatttttttttgttatattttctttttcatttgaaggtgagacgtcttataattatattaaacaattatatagagatagttaaaatataataaaatattttttctctctcttatttctaattttaaccacactactagttgtttggcctcacaaataatattattaggacctacttttcaatgtgtgaatttcaagatatgggaagtatatattttttcacctttttaaaatcaaagtaactatttagttatttaccatatcaattatatactcattagttacatttcaaccatatataattattaaaatatatatattttaaacatttaactcattggtattgctttagtttactaattataagatcactaatcgccacaaaaaactcaacattacaacgctttttattggcatcgtaaacaattattattatttttttctttgataaagaagtgcataattataaataaatgaatcattttttgtgttgggtgtgtaaggtaacttcctagttactttatattttaagtatcataattaactaaatagttactttttactatataacaatagaaaatatctataattacgtattaaaataaccacaataaaaaaaaaatagtttctttttctatttaaataaccaaaaagtaaccaaattttataaataaacaaaatttaatatgcaaactaaattcgtaagttactaaaatatactttgttattcatatttaaaattattatatgataactaattagtttctacaataaattaaggttaccaaaatatctcttaaataatattaggataccatgatgtaacctttaaataactaattagttattatagatgtctaaacattttactaataaattatgtgatttattttactttatttttaacacgttagtttcttcaataagattataggtaacataaatgtacaaaaaaataatatatatcgtaaatattataatataaactaataataacatatagttttaaaagtaactaatctaaaaatcaaaagttatccatatgagatatttttatt

SEQ ID NO: 406461 - DNA, 534 bp, Cannabis indica
catttaagaacataattcatggcaacacacacattttcacttcagatttacagcaacaaacttcaatataaaaggatgaaaaactacctcaagatcttctcaacacaagcacctaaatcccaaggtccaagcacaacaccaaaacccaattgaaaaccaagaacaaagtgaagagaatttgagaaagagagaagggaaggggggcagtaatggctgtgagaagaaaccaaaaaattgcatttctaattttgcaaaaatctcttttgttgataattagctactaagcccaataaaccaaaatgcccctacggcctatatataacatatgcatgatacaaggataaaattgtcattttatcacattccacacttaaacaaattttcaaaatatttacacactaataaaatgccaataatttatcccaaaattgtatttccgccctgaacctagttcggcccgaaatacctggttgtgactataccgccccaacttgtcagaacacacctgaaaaagacaacacatgcatactatat

SEQ ID NO: 406462 - DNA, 502 bp, Cannabis indica
ggccttgaggaggattttgcgagtggagatgcgaaattccctacactatcagaactttcagaacccgtgggatctaaacctggaccccctgacagactggttcaatcgtttcctcggtcctaccttggctccttttgctgcggagatgaccggcgagtacgtctcccagctaacccggtgcgtgctcaagcggttcgctgcttgtgcatccttgaactctgtctttcaagtttaggatctcagccactccttgaccgtggtaagtatcccatgacttacttcttttctcgttatttttcttaaggcctttactcactcttgcttccttttccagcttgctgcagaggtcggccgcctttccaagaacatagttaatcacggcttcgtcttgtagacgaggtcgtgaagatcctgcaggacctgtctgctgaaaggcgggcgttccaagaggaggctgcgtggcaagaggctcttgctaaggccaagttcaaggaagaggcta

SEQ ID NO: 406463 - DNA, 576 bp, Cannabis indica
tcgattaggaaattttagaatttgatcaaatgcaagatatgtctacccccgcgtccggatcaaagtcctcaggcaaagggtctaagaccttggccaccctggaggaggtgaagaaaggaactgtggtccaagaaaagtgcacttgtcgatccaccagctgggaggcagacgtgttgcactcaactctaacttgcgaccaccaactggagaagattgtcacagtagccggcatcaagccttctgcttccggagtctttcaccgtcttcctagagacgaagagacgcccaaccgtaactacggtggttttggagcttggagtcaaactcaccttatgtccggggcaatgctaccgctataggactatttcataaatttcttagtttttgttggccttgcgccttaccaacttatcccccaagcttatcgcctgctctcaggtttgtttattttttatgttgccagagccttgtctggctgaaattctctatttttatgaacttttatctgtccccaagaagggagacaaactcaaaggtggttttttctgttgggatttttaccaggatcttagatct

SEQ ID NO: 406464 - DNA, 501 bp, Cannabis indica
ttaatgttcaaagtttttaaaaaattcatgcaaagtttaactttctctatttttttccatttattcttgtccttaaattattgtttcattttattggtcttgaaaaatttaaatgtataaaaatattaaattacataaaaattaaagtattacacattatttattatttaatatactaattattatacaaaacataacttaaaaaattataaaaatgatactaatatatatactacaaaaatacaaacacataatgtaaaatataaaatataaataaaaagatagctaatatacaaacacttagattaatgtaaatgtgtatttatttaacttttcaatttaatttttatttatgcttataatatataatttatacttaatttaattatattaataataaaataatatatatatataattatgctgctgaaaaataccaagaccctatggcgtcgattttccataacaactgacgtcataggtatgacgtcggttgttatg

SEQ ID NO: 406465 - DNA, 785 bp, Cannabis indica
aactctgatgcgagggaaccattgataaaggtggaaggagatgaagttaacagaggaaaatgatggaacaaagtgtttgagacagaggaggccaaacaagaagttctcttttctcttcctatgataatcaccaacggtttctactatttgattccacttatttccgtcatattcgctggccaccttggccagctccacctcgccggagctactcttgctaactcatgggccaccgtctccggcattcctaaacagtataccatatagaaaaattcacaagaagaaaacgacattatacaaaccaatttctaaacagtataccatatagaaataatactcaataaacgaaactccagatcccaattatataatcaaaacttacctatatattactctcgaataaagaaagaaagagggttatgactctcaaataattagcatcaaatatcacttcaaatattaatgggatttgttttatttttattttattaaatataaataatattttattattttattaaatataaataaaaagtcaaccaagaattcagttatatatagacacactttatataaaatagatatatatataaattaggaagaggtttcaatggttacatttttattgtaactatcatggttacatttttttaagccattggattactattaaatggttgttattaatttggaaattaaataaaaataaataataaataacttgtaacctgaaagtaacctaatcatttatttccttactaaaactttaattaagattaacttat

SEQ ID NO: 406466 - DNA, 847 bp, Cannabis indica
tattttttaatgggtattacctattgatgagaacttttaacaaaaataattataaattaatgtgcattttaaaaattaatattttaaaattgatattttaatacaatggttgataaggaaagaaaaatttagattttttgtgtcttaattttactaatttaattaaaaaaaatcattctctttttacaattatatcaagagtatgattatattttacatcaaaaagatgtatgattatatttagtatttttaaaccacatactaaaattttcaacttcttttaattttttaatgtggagcggaatttttttaaaaaatactatgtaagttttatactatgtactaccttaggttttcactgtttttctaggcttattttttagttattccattgttgtttaattattttgttttgttgttttacggttattttataaaaagacagtaattttgtttaaaatttcatgtgaaagtaaaattataaacttttacccaaaattcactatttttgtaaaaattccttacttatatccctctctttctaacacaaacttaatttttttaattaaaatactaactgaaatttctaacttttttactgttatactgtggggcagaaattttttaaaaaaatattgtgtaagtttcatattgtgtactatgttaagttttcactgttgttttacggttgttttttttttttgtaaatgtgtttttttatttattctactattgtttgtaattgtcctgttttgttgttttacggttgttttataaaagacagtatttttataaaaaattctgtgtggcagcaaaattataaactttgacccaaaatctaatattt

SEQ ID NO: 406467 - DNA, 1842 bp, Cannabis indica
caaaaaaaaacactacgcacttacaaaaatatgtcaagaccaatcacgataaatagccagccatgcagatcataaccaaatgatgcctccataagtgggatggggcatctacagggtaatcattggggggcccgcacctcactggagacagggcaaagctagagaaaattatgctcaagcctttcagcatgaacaaaatgatacaattctagccgtggaagaaaggaaaccttaaataccacgtgtaggggaaccaacaataacattcacctatgagatggtggcacggactatggtggacaatggagcttccttgaatattttattcaagacaacctaagagaagatggggctccatcttaaagaattaataccttacactcaacttgtctatgggttctccagtcagagtgtggcaccacttggacaaatttgcctaccacttacagttggacaagcttcaaggaccataactgtgatggcacaattcctggtgatcgacgtcctgtcagcttttagcaagccctatattacttaaaagctattgcattggtatgccatctgtgcgttaagttcccaactaaaagtggagtaggttgtctaaggggaaatcaaaggatcacacgggaatgctacaaccttgctctatctaaggtcaagaaggataatacctttggcaagagttcagatgaggggaagagcattgcttaataaaaatctgcccaagccagggacaaagacatggatccctgacataacaaaaataaaataacaaataatcatgctaatagaagaattaagaagaagtagaaatcgattcagctatctcgaccaggaagctcaaaattgataaaggtttgttagcttaaaataaaataagccttaataaaatttctaagagcaaaccttgacaatttttcttggtcacatgaggatatggtcggtattgaccccatgatcatgtctcacgccctgaatattgatccaaacttccatctggtccagtagagagaagactactggataaagaacgtgcaaagcactaaaagaagaggtagaaaggctacacgcaaacaagttcatcattgaagctttctacccagcttgggcggctaaccccgtactagtacccaagctaaacaaaaaatagcgagtatgtattgactttaccgacctcaataaggcatgccccaatgactgttttctactttcaagaattgatcagctagtggacgcaacagtcggacatgaaaacctaaaatttatggatgactatttgggacaaccaaattagaatgcatccacctgactaagaacatacaggctttcaagcagatatggatctatactgctataaaataatgtcattcaatctaacaaatattggggctacctatcaaaggttagtaaacaagatgttcaaaaatcagatcggacgtgtaacgtccccacttgaagcctctattgggcccttacacccatggaatgatgactcttatacacgagtacgtcactctggccgcttcatggaatgacgactgaccctacaaaccaacacaagtgttttcagtgtgctttgtcctcactcgcacactttttgggaaatctttctaagaggtcacccatcctcaaattaccccaggttaagcacgcttaaccatggagttctttcgtgatgggctaccgaaaaataagatgcaccttgttgatatgggtagtaccaagtaatccatttaacccctcttaaactatgtagtcccatacttacgcagtctcagaataatcacacatgaccttccccaggcaatctgggattgcacagcttacccgatatttcccctt

SEQ ID NO: 406468 - DNA, 441 bp, Cannabis indica
atatatatatatatataaactcacaataaaaaaatccacgaagttatgtatcaaactttataaaaaatataaaaatattttatgtaattttctctattgtttcatagaaaaaaatatgccaattgatttgtatttttcttttttttttttttgaaaaaaataaataaaaattggagtctaataacttaagttgcttaacccaatgagctcagtccaaccctattagaaaatcatgatacgttatttggtgtaattattctaaaagttaagtaatagaatgaaattatcaactcaaggaaccaccttatacataatacatatcaccttacaatggcagagcaccaccaactcatgtggttcataatttaatgaggaacccatcgaagctctctttctctctcttcctatttttgtaggaaataaataattaaaaatgcaatc

SEQ ID NO: 406469 - DNA, 874 bp, Cannabis indica
tgggatctaaacctggaccccctaacggactagttcaaccgcttcctcgggcctaccttggctccttttgccgcggagatgaccggcgagtatgtcccccagctaacccggtgcgtgcctaagcggtacgctgcttgtgcatccttgaactccgtctttcaagtttaggatctcagccacgccctagccacggtaagcactttgcgatttacttcttttctcattattttacttaaagcctttactcactcttgcttccttttctagcttgctgcagaggtcggccacctttccaaaaccgtaattaatcacggcttcatcttgtccgaatttgggggcatagacgaagtcgtgaagatcctacaggacctgtctgctgaaaggcgggcgttccgggaggaggctgcgcgtcaggaggctcttgctaaggccaagtttgaggaagaggctaagcaaagggaagcccaggcggaggcaatgatccgagagaaggtccttcagagggataggctagaggcaaagcatcgggaagcattgagggcggagggcgaggctgtcgccaaggccaaacgcgagctccgggaggctagggaggccttagacgaaatggctgccaaggtgaagtccttagaggaattgcaccaggcggacttggagtccagggctaacttggccgtggagctgaaggagcttaaggacttcaaagaccaagccttgaagaaggctaagaaagatgagctcctttctcctatctcctgcagccgttgcatcaagcgcttcgatgatggcgtctacatggcctggtcaacaaatggccagagcatcaagctcgacttctacccaaaacctgcagagatgattgccaaatttcggg

SEQ ID NO: 406470 - DNA, 497 bp, Cannabis indica
tgtcgattcaacaaagaaggaagatgagttacctgacatcccaaccaccattaacgaatcagactcatctgagaagagacaagttccaactggacccactaaactcaagtttgaaggaaggaggactgatgtaggaaatctgccacagaatgacaatttcattcctacatgtcatttctgcaataggagaggtcacattcgtcccaagtgctacaaattgcagaattacttgaaagcaatgatcaatcgaccaaatagtttccctcaaccaaataagtcacatggacgcaaacctcgtcgagaatggaaaatgaagtccaaaccaaatccaagtgttggattggttgcaaagctatctctgtcagcctttgttgaagggcagtggtattttgacagtggatgctctcgtcacatgactggaaataagaaagtgctagttaactacaaagcaaaaaggggatccgttacattggtgatggtaacaaagggcagattgc

SEQ ID NO: 406471 - DNA, 799 bp, Cannabis indica
taattaattatatattattattgatacgtgcatggcacaattgtttgataatatgggtggatatgaggccccaccacacagctacaactaaggggacacacgtgtgagatataagtgggacccaatcctagctggcgacaggggttcttttaccaggtcaaactaacacatttccttgttcttactaccctagctcccaaaacaatttttaataataaggaattaaaaattatctaaagtatattaattataaaatatttgaagtatattgattaattagttttttttatattgtttaaaatcatatatatatatatatatttaataaaaattaaaaaattaatccgtacaaaacaatagaacgcacttcagaggaacagtcctctaactgaaacacacgacctgtagagaaacaagagtctattggcaagcaataagccaacttatttgcagatcgttttacaaaacacaaatcaataaaaaataaagccaaaagcaaatttcgaacatcttgaacaacaagaccaaactgtgaaggcataataaaaatattgatataaatcgcttgaacacacaccaagttgtctgtttccaacatgactctatcccacgaatgagttgtaatccaactcaatggttctttaatgcctattatctcaacaatttcaggttgaacacatccaatctcccctttcttgaatgcttctaccatagcaacatgatgatgatgatgattctaagctacacaacccatgccaaaagacaagactccaaccataaaaaactaaaaggaaaagac

SEQ ID NO: 406472 - DNA, 526 bp, Cannabis indica
acttttacaatcacattgtactcggaaccttactccctgccagagtttgggagcctcttccccacttcttccagtcttggcttcgtaactatataggaggcgtgcttctctaccttctttccggattcctctggtgcttctacatttactacttgaagcgcaatgtttaccttcccagaggtatatcttcgtcttcatatttgtcatccctctctaaaactatattcaaaattttaactacaaccgatcataattttcgtccactttttattattattattattactttttttcggattgaaggtcaatcacggatctgtaatttgacactgcagttaatgtgtcagaaattcttattgaatgattgtgctgtctactttaattttctacttgttccggagactgatttgacatactaatttccttggttttgaaccgtgttctgacttgagaaataatcatgctaaatttggtttagtaatttaaaagtctctgtaatcttataaaggatgagattggtcctgga

SEQ ID NO: 406473 - DNA, 1280 bp, Cannabis indica
ggacccgtgacttaggatcttgaccacgaacctagacccgtaccaaaataccagaccaagacccagacccagacaagaccaagacccaaccaacacagactgaaacctagaccagacccaaacccaaaccagacccgaacccgaactcgtaacataactcagactcgaacccaggtttcagacttggatcgagatcatgactgggaccgagacccagactagcaccgagacctgaacctaaactgggactagtactcggactgggacccgagaccaggatcgggaccaggacctgagaaccgaaccgtgacctataccccgacaaggtcaagacccgagacaaggactagtacggaacatggatcgggacctgcacttggactgggaacctaacccagactgggacctaggaccctgacctgaatcggggacatggaccaatgactgaggacccaagacccaaaccttgacttgagacctaaaccaggacacaagacatgagctagaactggactaagatcttgatttagactcgagacccatgacccaagacccgaggcttgtacccgacccacagtcggtgtctaaatctgggaattggacctggactcggacccagacccggaccagaactggaacccgtaccagaactcaaactagactcgcatgtggttggtgtctggatttgggaccaagactcagacctaaaccaaaacacgaacctagacccagaccaggactcggacctagacccacacccgaaccttaaatcttaccctatgacccaaaatgtgaactaaactagaagcagacccttaaaccctaaaccctaaatcctaaactctgtacacttacccctaaaccctaagcccgaaaccctaaacattaaatccctaaacactaaacccaaaaccctaacctgggcatgggcctagacccatacccataccaagatcagaaccaggacccagacccaaacctgaatatagacccgaacctagacccagactcatgacctgaactcggatccaaacacagaccagaacctggttcgagacctagaccttgactgggatccggatcgggaccccgacccggacccgaatagggacctggactcagaccgcgacccagtcccaaactcaaacctaaacccgtactgggacctagactcagacccaaactcgggatccaaactcgaacctgaacttggacctacaccgagacctaggatccagacctagagggggacctgggccctaaacccgaacctagaccca

SEQ ID NO: 406474 - DNA, 1025 bp, Cannabis indica
cataatagcttatccattagacagagaggggttctccccctcccccccccccccccacttgtcttatgcatatctaagtcttgctcttgtaccccagattcacccatcattatcttttttccccttgaactttagtaaatccttcagcatctacctgaggcatctgcccaaaaatcgtatattatattattaaaaatatcctaaaataaaaataaaataagtacataaataataaccattcaatcaaatgtactatttaatgctttgttgtcgttgttacaaaaggccatcggctaagtatttaataacaaaattaatattttggcataaatgtaaataaatactataggggacggggacacactgagtttttgggcatcatatatatatatagtaaaacaaggtctgaccaaatcttaatagttagttacggataataggaatacttggaggaacctatctcattcttttagagaaacttaggtggtgattggtttaaccaaataataatggtaaataaaaatagtaaagaagtatataaataaaaataataacagaaatattattaccatatgaacattataattagaattgaattgaacaaaaatattcttattttatttattatttatttatattttcaaaataagaaagaaatagggtaaaattttgcttttattattttttgggaattattttaaatacttctttttttaatttttttttaatttacggtttgtgtttataaagtagttgcaacgctagttacaataagagttttgatacgaattttattgcgatttaggttgtagcgctagttggaatatggatttctatgtatagaattctctaaaaatgcaaaaaaaaaaaaaaaaaaaaaactagtttagaagtgtaaaaataaaaaaaataaataaaaaactctttttttttaggtgctctttttattatgggataatttcacaaatgcacaaaaacaacaaaaaaaacaacagaaatacggttttacggaattttaaacactt

SEQ ID NO: 406475 - DNA, 824 bp, Cannabis indica
caaataataataataatataataaagtgttatgtttaaaaaaactaaagcatttatatttcatgctaagtatatctcaaaaggaaaaaaggtgtttccttatgcatacactttaaattttttagtcacataaatatatttttatacataatcaaagaaacataaacaaattaattaaagggctttttcatgtatatactaaaatggaaaaaaatattacataaatataggggaattttcataaatatgggaattaagggtatagtttacttttttatggcataaataaataacactataggtttatagattttttttatttttttatttttttacatttatatgagttttttttatatgacatatttttgtaaaaaaaaaaaaatagaaaatctcatatttgtaaaacaacaataagttttgccggaaaattcaccagcaccggaaaattcgccggaaaaaatcacggtcgccagaaaagtcgtcagaaaagtcgccgaaaaagtcgtcaaaaagtcaacagaaaagtcaacgtcgccaaaaaagtcaacgaaaaagtcaacgtcgctgaaaaagtcactggaaaagtcaacaaagtaaatgtctcatagataactaaaaatataaccgattatatgaataaaaactaataactcaaaccggttataattgaattataaccagttcttgtaacataataaataaatataaatacataaaataactcaaaccagttataatgaaaatagaaccggttctataaaaatattataatgaataaaaacaaataacacgaaagaactcaaactggttttaactaaaata

SEQ ID NO: 406476 - DNA, 856 bp, Cannabis indica
tagaaaaattagtagaaagcaatactactcgagactcgaaaccatttaggaactcgttactcttaaacgtatgttaagattttgactcacctgatactacctcaacggttatcagctcagagttcattgatttatcattgagtgaaaaatgtaatcaatactagtacaagaaactatatttgaatgaaaaaattagtagaaagcaatacttactcgagactcgaaccaattaggaaactcgttctcttaaactatgttaagattttgatcacccctaagttgtagctcgttcatatgctaaatacacataaatagatttttgtaagataaggttgtgagtgaagaaaagtaaattaagaatgtaaaaaatatcttacttgataaacttttccacttcagtataattgttcagaatgtaccactaccttaaagttttcttgcatcagtaaagacacgatggtcctcttaccaatgagtagtccaacatgctttaggcttattgtggaggacatagggctgagcatgtaacccggtgggccgaccaacccgaccaacccacatacaaaaaatgggccaaacaacctgtataattttgggccaaaagtccacatggtttgagaaatccataacccgctggttgtgggtcgaacacggcctagacatattataacccaaacaacctaacctgtgccgaccctatcttaagaaaaaaaaaagtggtatgggcttctttataacattgggcctgcttgactttgtaaccctagcatatatatatatattctatacacataagacacacaagactcaaacacacacatacacagacacggcactaaagcagtctctctctctc

SEQ ID NO: 406477 - DNA, 504 bp, Cannabis indica
tttttattttattcatttttgtaatggccaattatggccggccttaagtataggcgggctaggcccgtgcttaggccctacttatattaggggcccaaataaaaaattatttaaaaaaatatttatagtaggggtctaatttttttttgttttgcctatagcccatttcaactcaagtattggtagttcttagcaattttaattaggaaaattctaaaatgcacccctctaaaattggagcactgatgcacccttatcggttccaatattcgagggacttttttattttatttttttatggtcatgtacattacagttatttaagacatcttataaaattttaaaaatttcaaaaaaaaattaacacgccaaaaataaagttataaaaaaattaatagcaaacttcgtaaatagaattattttttgaaaataaatacctatataaaaaataatttaaattaaactttgaaaaaaataataataataattttttttaaattatta

SEQ ID NO: 406478 - DNA, 606 bp, Cannabis indica
aatgctcggattcttttgttgttaaagtttttatagcaatagagtcctgcaatgtagcctcgacagctgcttctgtagctccatcaggttccttttccttggcagcaatcttttccaacaagtcttcactctgttcttctgttgaaaacttagacaaatcctttagaccctcaacaacaacattagcagattccataacaatttgggttctcatgttatacacacgatatgccctactattgatggaatatcctaaaaaaataccttcatcactttttgcatcaaattttccagtgtaatcacgatctcttaaaatataacaaacacacccaaacacatgaaaatgacttacatttggtttcttacctttccagatttcatatggtgttttgtgagtacctggacgtaataagactctgttaatagtatagcaagcagtattgattgcttcggcccaaagacgccttgtaagcttcttgttgttcaacattactctagccatttatgttggaaatattttaccatgatctagatttactaccaagtatgtttgattaacatcctaatatgaattctaaaacaatgaaataaacacataagagttta

SEQ ID NO: 406479 - DNA, 501 bp, Cannabis indica
ataatatactcaattttaatattttcaatctgaagcaagtttttataaaagtgggcaacatcttagtctaatctaattgaactgaattgatctaatccaatttaattataaaaaattaaataatctaattataattggattggatgttaaaaattagattttaattgaattggatcggttactggatgtcattctcaaaatccaataaaaaacgattaaccgatccaatctaattacatttatatattaaaaaaattaatttctaacgagttttgaagctatttcaatgatctatcaagtcatgtctcaaacttcaacacaattcttaagctatcgacatcaacttttaccccaagggagttatgaaaataagctccgaattactagcagcaggtctcgatgggctccgaaaaatgctcatcaccaccataagctaattttcaccattagatcattatctacggtcaaaatatctaatttgtatttttctcatatttttgt

SEQ ID NO: 406480 - DNA, 1022 bp, Cannabis indica
  modified_base (167)..(167): a, c, t, g, unknown or other
caatttatgctgtacgttatattaataatcttagccaacaaacctttcttttaacacctacccaagtaatccagctagtaaaggataaggtccaagctttaaatcacagccaacttaaaaaccaacgccatagctctttgaagaaaaattacagtaaaaaaaaaagngatggccataactaatatttatttaacaaagttgaaattatgatttttaaatttagagaaaattagtgaacttttcaaacccacttaaatttgttattttccttagaaatgagaaataatgagatttatgcttttaaaattacttagattatgattttgatactaaaagaaatttctaccctttaaaaataactcattttatgtttttcatctcaaagttatttatttattttatttatcaacataaacctacaagtttaaacttatttttcaagagttattttttttaattttttttttctaagtatcatcttaaaatctattctcatactaacccaaaaaaaatgatttattactcatcaaaattttgcaaatctaattgagatgagaaaaaaaaatcaaggaagaagaaaaaaaaagtaaagaagataaataagaagtgataatacatgggagagaggagaaagaaagataaaaaaaggaaaaaagagcataaatgagagtaattatataaacgagtctcattatattacatattaataaaaaatatttgaattataatagttttattacatgacacattgtattggagacacatgtcataataattcttttcttttatttttaatctactacatgcaactacaatttatttaatgtggtcatacatatcaatggtcaagaaaatatctttatagtatgaggacaaaataggtgtgcccaccatagaagttttcaatataaatatatataatattaatattattagttttaggttaattaaacttatattaattttagattaatttaaatacatataaatattaatatattatttgtaatatttttattttt

SEQ ID NO: 406481 - DNA, 542 bp, Cannabis indica
taaattaaaatgtgtaatattgattaattgtgttaacaattgggtgttcataaaaaccgataaatcaaaaccgaccatcaaattgattagactttaatcgaattttcaattccatgtcatcatcgaatttggtggtcggtttcaatttcggtttttttgatttggcagtcggtttcggtttttgaaataaaaaaaatagttaaaccaaaaaactgccaaaccgaaaaccaccaaaaatcgtacggtcggttttatacgattataatttctaaacagtcgattatggttttcgtaaaataaaaaccataaccgaccggtcggttataaaattgtaaaaatcgaccataaccgactgatttttacccctagttaacataaagtgttgagacgcaagtaccctcaataaattaacgggataatttcacaaatacacaaaaataataaaaaaattacaaaaatatagtttcatggaattttgaacatttttacaaattttttaattttatttacagaaaatatgttgtattcatgttaatttgtag

SEQ ID NO: 406482 - DNA, 1031 bp, Cannabis indica
  modified_base (1024)..(1024): a, c, t, g, unknown or other
acttgtagctgctggttggaggttgtgtcgtcagactttattgcgtgtagcagtcccaacacgcttcctcccatgcggcattaaatgcgacttgattgctcaggagaaacctgacacctcgcggagatgccttagcgttactcgagctttcgggagcatatggggttccatatgccttctccgggagacatgtcccggacggtgccttatggcataaagacttagcaaatattttgaatcataagttgcttcatccacgtgtccttgtctggttggtccacgtatattgggccaaatatttacatcgtatgtcttcttttcccctaattgtaaaaagaagtaaatatttttattattatatattagattgtttgttaatataataaataagataattataataacaaaaacttacagaagattttacatcaattaagtatctactaggatttacatgtgcgacgatgtcactgatgtatttcaatacataaaaactgcattcttaattttttggctgttgggtaattttctactgatatttttggatacgctccaatggcactacaacaaatataacttttaggggcggccaattttaaggtgacacaaagtcgcctctaatagtaagggtattaggggcaacaaataaatatcgcccctcaagaaacttgatttttttaatctatccaacattaggggcgacacatgttgcatataaaactattaaaagcgacaaaataatattaggggcgaaaaaagttgcccctaataagttgaaaacccaccgttgcaaataggcgggaattttcccactcatactattacgggcgacttgtagtcccctaatgccctaccacctgacacagtcaaggcattaggggcaacttttttgcccctattgtcgcttttaatagtgtgtccattaaaattctaaatctccttctttcctaatttattttatccctttttctagatttttctcttcttcaaaaaaatcctttattcatcaatcctcccccccccncccacta

SEQ ID NO: 406483 - DNA, 519 bp, Cannabis indica
gacatagattttgagatcaagttcagaattcctcctcaggctgacaaggaatccaagaagaatgtaatcctagttggcgtggtcatggattctactaaagaacccaaatggttcaagacccaagcttgcacaagaagagctttggaccagccaatctcttgtgttgataaatttcctgaggctgggaatgaggtctcagctgcaggaaatgggatcttttgatgcggagaatgaggtctatgtagaggtcgagaccttttacgtgtagactgtctttctcaagttcatcaactgcccatgaataaccttgtattctttgtttagggaaatggcttaatggtttgcccctagtggcatttttgtaaagacaagtttgtaaaccaacttgtgttttctcttatcttaaatgccttgtactttttcattcaaacttaatataattgcgtttacttgcgttttcattcacaatgtaaacaaatatatcctgatcaaatacagagtacttttgggtttttccat

SEQ ID NO: 406484 - DNA, 567 bp, Cannabis indica
ttctctttcaagctcttcaagagatttcacacaagaacctacacaatatagacaaccaaaaaaaaaataataacaaagataaaataatctttgtttgttgatgagagtagacccgaaaacaaagtgcagaaaaataaaatgcaaaagacaaagagattgatttcggagttcccctcaaatcaagggtacatctccgtcaagcttccctcaaagacgcttgattcttcactatgcatgtccaaaccgattacaggatttggagattcctagccacaaagttcagtaggtaatctctattctttctctcttttcttcactttatttttctgatttacataacaatatctctcactaactctctctattttctctcttgtttctgaggtgtattacacaaggaaaacaaaggttgctgcctttttccttgctggccgaaatgtctttgttgtgtaaaatgagaaggttgaacctctatttataatgttgatgttgttgttgttgtgtttgtttttgatctgagaaatggttgtaatctgttgagatatttttccttgtaaagctgaaagt

SEQ ID NO: 406485 - DNA, 730 bp, Cannabis indica
tccctatatttattctattatgacccgataataatatcagacatatacattacagattatatatatatagttatcattacatttataatataatctcaattaaaaagtagtgtacgaatcaataaaagacaagataaataaaaaggatataactgcaaaaaatgaaaagattagatgattttatgctgagggcatacaggctcttaattagtatctattatatatatagtgatatatacacattctaataagtgataacatatatcattgaacaagtattcaatttattcaatgtcaaattgtctagctatcttgaaaactaataagatagccacacactaacatagcttaataataatctttttttcttgaaaataatatatcatatatatgtgtattataatatatatgcatcaaaatgaccaaaattgacccattaattttggttagttaaggagtataatcatagaaaattgaaaaatggtaacatataataatggggtccctatctacacctaagagatcctgaaatttgtcattcatttaaaaaccataaacaaaaacatttcccaattataatatatatatatactaattaatgtggccgactataattaattaatatgtataatcttcctgatcactgtaatattagcagtgtaagttaagaaaaatgattaattatttattgtattatatatatacattagtgtttttcattattattatt

SEQ ID NO: 406486 - DNA, 708 bp, Cannabis indica
tgataacaattatgaaatcatatgatcagttttatataaatttatcgattatcaatttgttaggtctctatttttttttccataataacgtctgcaaaaaagtaagtatttaattcattaatgtttgattaatttgtttatgtataacaaatttataatataatggtgattggaagtgagaatgataacggtttttaaataattaagaaattttttttttatatataaatttatcaataatcgtatttctttaaatttatgagaattttataatttttattatttaaaaaaattgtttggctgtgttttcagtttttaaaattgtatttttaaaagtgagaataaaaaacattttttttaacattttaaaaattttatggtgtgtggcacaaatttttaaaaactgtttttagatttttttcttacgaaaaaaaaatcaatattctagcaccataccatgacattaacccatccgggtctaggttcgggtatgatttcgggtctaggatccgagtatgtgagcaaaatataaaatacaatatgttagataaaaaacattatttttaaaaattgaaaacagcattttgatattttctgttttctagttttttaaaactcaatttttaaaaatttttgccaaacgactccaaataatttttaaaaactgttttcagttttaaaaaacagaaaacaatttttaaactgtaa

SEQ ID NO: 406487 - DNA, 736 bp, Cannabis indica
attgttaattgattatatatatcatattaaatattttaaatttactaatttcttaattaatgtctaaacactaaatactatgaacttacatggtacttttaaattataatttactaattggtgactataaaatttaaatataaaatatttatttataatttaataaaattgttgctaattctctcccattcatttaaccttttatttatttttttctttttcttaatattttttataagttaataattattttttaaaaaagaagtaaaataccatcaaccaaaaagtatacatacgtttatatttttttgaaaaatcatatgtttaaaaataatcttctaactataaagttgtttccaaataataatttataattattttcttatgaatcaaattatcaattataatttataattttttatttttaaaaaaatggtacacgattaataattatgatttttttttttttaaaaaaaacttacaaaaatatctaccaacgaaacaatataataagttctgttatagaaagatttctctcacctagaaactcgagaccagactcctgtttagaggacacgtgtactcagatttccaatgaaagctgagacatccatgagacactcctcgaagttttaaacctcgctcaagatagaatcaacgagatacagcaagcatgaccaaagtctgatcgcatgattataactcgtattatgtgggacaagagaataactcgcat

SEQ ID NO: 406488 - DNA, 499 bp, Cannabis indica
gtgtatgcatatcaaacaaaaactcaaatggcatctttcgaaagatttcttcctactcacatgaaaatcttaattttatttcgaagaggacacttgtatcgttaaaatcttgagcaacacctccgaatctatttttgggtttaatcttaaaataaaatacctgagatataaattcaaaaaaaaaaacaaaccgaaaaacaatttaaaatatcaaataacaaaaataaagaaataaatacaaaaacaaaaaaaaatcacaaaaatgaaaacaactttgatctacataaaaccagtttaacaatgaaatatataacatacaaataaataaataaaaaaaaaggataaaaatcggtttcacaacaataaaactaaattataacaaaatatacaattgacaaaatgaaactagtttcatgttataattaccgtaggggcagcatgaatagatgaaccactcggttccgtctgacactttcttcttgtcacagacttcaacagg

SEQ ID NO: 406489 - DNA, 647 bp, Cannabis indica
tctacgccacgtagatataaatagatgtgtgagcgcaacacataggtctacgccacgtagatataaataggcatgtgagtgtaacatgcaggtctgtgacacacagacatatatgaatggcattattgtttaaatagtataatgagcatattaatattgttatgattatatactgtcttgctgggcttggctcacgggtgctctactgtgcaggaaagggtaaggcattagctgatcagccatgagttcaggagctgggcgaagaatgtacatgtccgagccatatcagaccaagcgggttaagggtctaccagcgatgtattttgaaactctattttgccgcttaggccggctgaaagaaaaagacttgtaataaagtttgtaaatatttttgggatcccaaatgttataaagtttaaattattacaagtcttatttccattccgtttatttcaaaagtttaaattctgcgctattttgattagtaatcctgcttaggggattagggtttcgtaaataactcgagtagcgtgcctaattatttagggcgttacaatttggtataagagcgccaaggtttttaaacttcctgtagactggccgaacatgtacattcatcgtcaaagacaagctcaactcatggtgca

SEQ ID NO: 406490 - DNA, 795 bp, Cannabis indica
atcgataccataaaaatggtccacatgtatctattgatacatctctataatcaatctacaataatggttagctccggtcttagttaaagaggttagacatccacctaatttagaaggcttaaaaaaatttatctcttttctacacattttctttattaattttgaaagtattataatttttctaaataagagtctaaaaaatatatttttcataaacttactaaatttcagaaccgatcttaatgatgtatataagagcatctccaataaaaatacaaattagtgatatattactaaaatacaactcaccttgtgtgaaaaatgtactctaataatttgtcataatgtcaaatttagtttaaagaaaaagttttgtgaaattaattttccactgaataacataatgtaaaattcaacaaaataaatgttttaatacttctatatctttttatcatttttattattttatagttacttaattatagtattaatttataaaaaaaatttgttttaaaaaaaaaatcataaaaattttataataataaaatattagaataattatgtaaggcacaattttttgtaaaaaaaaatacatttttacgtttaaagaatttttttatatttttacaatttttcatagaaacaatacgaaaacaacaagaaaattacataaaagtaatacgaaaataacatctaaataatattaaaataacaacaaaaaaataacatacaaataacaaaaaatcaacaatacattaacaagagtacaacataaaaagaccgtatattttgtaa

SEQ ID NO: 406491 - DNA, 768 bp, Cannabis indica
gttaataaaggtgggttcatctctggtacaagatttaaatatagtgttaaatttagaaagaaaaaaaataaatgttacatttattattttactatatgtataatactattttaataagttggcaaattatataagttaattaacacaaaaaatagaatatcaataatgattattgaaaaattaaaagatagctagtagtaatatatgtaattagaaatgtgtattaaatctaaaattaatgattaatgataaatctgtaattaaaaaaaaaagttatatttattgttatcgatccataaaaatggtccacatgtatctattgatacatctctataatcaatctacaataatagttagctccggtcttagttaaaagagggttagacatccacctaatttagaggcttaaaaaatttatctcttttctacacattttctttattaattttgaaagtattataatttttctaaataagagtctaaaaatatatttttcataaacttactaaatttcagaaccgatcttaatgatgtatataagagcatctccaataaaaatacaaattagtgatatattactaaaatacaactcaccttgtgtgaaaaatgtactctaataatttgtcataatgtcaaatttagtttaaagaaaaagtttttgtgaaattaattttccactgaataacataatgtaaaattcaacaaaataaatgttttaatacttctatatctttttatcatttttattattttatagttacttaatta

SEQ ID NO: 406492 - DNA, 864 bp, Cannabis indica
gcataggtggtggggtcaaagaagtactaattttcgaacggggaaagtgaatcccactaaagggttttttttggaaagaaagatgaggggtgtaggcaaggttagccttgcaaagacgactgaccaggacgctggggtgtggtccccacatgaatatggtgtagacaatgatgtagcaagaaaggcagtatcttgttttttcgtctgcccacgaggactgttgttgccacttgcattcgaagaactgatgtcccttttgagacctatcatgatgaataaaaaagcacctgcataagcagttggtgtaggattaagtgggtctacacagatcaagataccaagtttctttttttacaacaagttgtacaaatgagaccgaaattcttagagagtaaagactcatataaagtatatgttgggattttatgccctaaataaaacccattacaatctaatatgatttgtcaacaataaaagattagaaatcatttatgcttacatgttgtattcatgtttatggtttaatttatatacatatatatatacacaaaatctgttaagcccagagcgtatagtcatacacaattcaagtgatgtcaacacagtggaatgtgattgtgattatatgcttcgaaagataaagtcattgtttcatcagtgcattggatttacactgatgtgataatcagcgatgaagtgtacttacactttgtataagtgttatgttctttccagaacattggcatagtatactagtctcgaatgtatggagtatacattggactggaccgatatggatcttagtaaagatattataatacttaccgttatatcttttcaagtcaatgtcactagttgatctta

SEQ ID NO: 406493 - DNA, 658 bp, Cannabis indica
atatcattatattatgagtaatgtaatacccgtgtacgaaaattccttgattttgtgtaaacgggatcaggctgagtaggggaggccctattatttctcatattttctttgctgacgacctcattcttattggaaaagccaatgtggaggaggcaaaggggttcttggattgtcttgagaagttctgctcttggtccggacaaagggttaataaaatgaagacctctattttctttagtaagaacacacccagggagactaagcaaagaatcagggagctgctagggttaagagcgccagagggtaatgttaattatctggggcttcctctgttcagatctagacaaaaggatgcggattttaactttatcttggataacctaactgcgaaattgcatggttggaaggcgaagactctctctaaagcagggcgagctactcttattaagtctgtgggattatctctacctctgtatgctatgcaaactacgaaactttccaacaaacttgctgctaagattgatggtttagtgcgtgatttctggtggggttcggagaaaggaaatcacggaatttatctgaaagcctgggacaaactttgcctccctaagtctctagggggcttgggcttccggaaatctaaggaaatgaaccaggc

SEQ ID NO: 406494 - DNA, 914 bp, Cannabis indica
ctgttattttttagttgttccactgttgtttttagttgttctgttttgtgttctactggtattttataaaaagacagtatttttgaaaagatttctgtgtgatagtatttttataaaaattaacctaaattgtagtatttttgtaagtttccctttaataaaaaggagcatgccttgagaatgtttaggcctttagaaaaaatttaggggaatttttaattatatacttaattataaagtaattaacaaatataccatcaataaattaaatgatgcaataagcggtaactgtaccgcatatataaacaaatatatgttatctattttctgatgttagtgttagattcaagtggcacatttatttattttttacatcattttctcttttatgtatggtgacttatttttttttttgtttttttcttattttcttttgcatctatatctatttttgttttttataatttaaaaaataaataacaattatactgttaattattttgattaaaaaataatattattgtgatctactcctcaagtatcattttgatatatgagaaacgtatattttttttaccgtcaccaaagaatatatttgaaatcaaaagtaattatttagtttcttttataaattgttcgaaaaaataataaaatttttaaactcaaacaaaatcaaatatgtaccatactaaaagtatttttttattgtgactaatctacccagaaaagattaattttatatataaaagttatattattaaaaagtaaggtactatgatactaattgatttctttttaaaaaactttactttgagataatattatctcatttacatttttgttacctaccaattaattacttttaaaatcatattgttgtttacctactgcttagttactttcaaaactataat

SEQ ID NO: 406495 - DNA, 1040 bp, Cannabis indica
caaacaaaaaaaaaataaagaataataaaaaaacaagcaataaaaaaacactagaactaaaataataaaatcacacacctcaacaactctttcccaattatgtcttcaagcagatcagttgattagaacaatcttcacttggtatttaccctttccctaagagttaacaaaacaaaacaaaaccaaaacaacaacaagacacatagtcaaacaaataaaaaccataaaataggaggactaaacaaaaaaaatgaaaaaaaaaaagaaaagagaaatggaaaatataatcaacttgaaaaaatcctaaaacaacacaagaatatcaatagaaaaaaaaatcttatcagatttgggagactttcgaactctggctccaactcaaaatcagagtcggagttctccaacacaggtcgatgatattttgatttagtgctcttcgaagtaccagcatctagttttcttttagcaggaactagggaagtatatagggctaggaagattatctttcaaactcttcttgcccactgatgctcgtgttttattttttgggggttgttttgggaactttttagtaacaggggagaaagatcgggtaacaaccattgttaatgataaaaagtaatatttatagaagaattctaacaaaaaaagtaggaaatgtatagggaagtttaagatcaaaaaaaaaaaaaactgcacgaatttgaaaaacaaaatagaaaccaccaacttcacaataagtgtctggaaaaaaaaaactagaagaagaagatgaacagtaggacatgggggagtgggatttatgttaatattaaatattaaaaataataaagaattaatttttaaattcatttaaattaaaaaaaaaagtaaagaatttgtcatttttgtgacagcccacgtcccaatcaaccttttttttatcaagaagaaggaaacttcaatcttttaattaaaagaaaatgtaataattaattattaaatattaaaaataataaagaatactttttaaatctattttaaatcaaaaaaataaataa

SEQ ID NO: 406496 - DNA, 585 bp, Cannabis indica
tccttaatcaaaccttctcccctaatgaagttagggatgccctgttccacatggcccctgaaaaagcccctggagttaatggattcaataatcagttttattaaagaactgggatattatgagcagtatcgtgactgatgcagtgttgagtatccttaatcatggagctgatttctcaggttttaatacaactattatcacccttatcccaaaggttagaactccctcaactctccgtgatattaggcctattagcctttgcaccacaatttacaaaattgtttctaagattccggctaatagactgaaacatgtcctcaaccccttaatctatccaaatcaaagcgccttccttaaaggaaggctcattcttatggcccaagaactttcgcattccatcaagggaagaaaaataggaaaaactaattggatggcagtcaagcttgatatggccaaagcgtttgacagagtggagtggcctttccttaataaaattatgttgaaacttggattccctgccaagtttacttccttggtcatgaactgtctcaccactgtcaccttcaaattcaacatcaatggcca

SEQ ID NO: 406497 - DNA, 542 bp, Cannabis indica
aaatggccaaggtttaaagaggagcttccatcattctccaccacaccaccgttatcacgacactgctttgccattgttttgtggttgacgtgtttggccggaataattgtttcaacgatcagtgcttagatcatgcctggctggattccatgggcagagccgttgaagaattcatccgtcaagagtatatatataatcggaagtccgtcaggagagctgagaaacttcgtcatcggcggtcaacaatgactggtgtgaaggctgttaatgagcccaaattatgttattttaaaattatttccataattatagtataatctgtttcagcatttagactatttgtagtaatgtgtttattattttattataaacatcatggttatatttttctacttataataataataagttaggttacccataggtaaaacttcatttttttagaatcaattaattataataatttattttcttaaaataattaagtatttaacaagatctcttttagcaattaataattataaataattttttatataaat

SEQ ID NO: 406498 - DNA, 1704 bp, Cannabis indica
aagggtagtgatgatgaaccaatggtagtgactattcatcttcacgaagtaaatatatggaataataataataatcagcagcagcaacaaagtaatgagtgttattacggcgtcgtttttggtttgaacactggagaagagttgatgagtgagactattagtgctgatccatccaaaccaataatttgggatcgtaacagagattatgtgattttggcaaaggataatccaagtgatttggattacgtggatttggacgtcatgcaatttgattactttcctgaatctgaaaccggaacatccacgggtgatagattggtgggtcgggttcggtttcggttacccatttggcctggtcaaaaggaagttctaatggccatacgagaagaagaagatggtgtactcctttataaacctactggttctatcaaaatttgtatcaaaattgaacccaaatctgtgtttattatgaacaagaggaggagacaatcacaacgttataattcttacccttattattacttttaattaatttgttttgtttgggaattaggaggaggtttgttagttgtgttctctcatcttggttatttagattgttcttttgtttgttttaataataataagtgaatcttattgatcacatgacaatgaaaaatataaatgagtttatattatactatgatgtatcttttcatcaaagatagtgtcaatttcattacttcatttgatgttggggtgtttgcaacgctgacaatgtaaattttggtcattttttcaaattgtaatcgcactatcattattatcaaacattacaaaaaaaattaacgtcataacatatacactatgatgtatttttgtaatgagaaatgctaaagacactagtgttacttaacaccttctatgtgtcaatattactattagtccaattaaatatcgagtcgctgcactgtattagtccaattaaatatcgagtcagtacactgtattagtccaattaaatatcgagtcgcagtgcactgttagctaataacaatactcttttgtaatatataatgtggtacaatttgaactacctttattaaattcaaaagcattacaaagtttggccaaatgcaaacaacaccacaaaaaaattaaaactgcttttctatgtggtgtgggcttttgtgcgtactgtttggtgtgcttctctttggataatgaacatgtttattttaatgaaagatttcttattaagaaaaaaaagtacaaatttgttacaacaaaatatgactaaagaaattatttctactaaaagaaaatggaatttatcattatcatccaatctaattatataatatatattaatctaatttaattgaatttgcttatacatatcggatgaatagtctgatctggcgttaaactacaaatcaaagattttagccgctcttaacggggatcataggatttccaacgtggcaatttagtctttccaaattaacttgttttttttacagaaaaatcaattataaaaaataaaataaaatagatgttatattagcaaggataaataaatataataataatcctcgtacggtttgaccgggcctattaatattgctcatattatgatgtcttacaccttgacattttgtttttatatatttcatttgaggaaattacacttagtatgggattttaaaagttcttatgataaat

SEQ ID NO: 406499 - DNA, 617 bp, Cannabis indica
aaaaagaaaagaagttgaaaattacaaataaacttcaagaaatcattaccatcacattaaaaatcaaagtttaaaaaatatcatgtgagtacaccaaaggtaaaaaagttgctcaaattcgctccatggctaatgatttattccgtgatatttctcctctcttaaaggcgtttttctgaatttgtgttatagattttcaggattttttatgagctataaaattttggctcttgcttataggctctctcattatagattagaaagtttgtacattttaatttatttttttttgctaaacataattgtattgaaacgctttgatgttataatgatttttagcttttagtgtaatttaagaagcaacctattcaatgatttcattgtgtattgaatataaccgaatgtgatgttgttagttgcttgtaagaacattgcattaaaactcatctcttttcacaataatgttagtacgtatttgtttttgtttgcttcggatttttaaatttcatggttatatatatccaatagaatttctttatatcaatgttacattgtgtgtaatttggtagtttttatgtcctatttttcaggtgataattattaatattattattatt

SEQ ID NO: 406500 - DNA, 436 bp, Cannabis indica
aatgatgcgccaccccgtcggccgcaccagaagaagaaccaacccaccccctcgagtggtttcaaaaggcagctggctacggtggggaatgagcagagggagatgctgaaaagacacagacctcactcaggacaggatgttgtggaggttgtttcaagtgatgaggcaggcctgtgagttaggaatgagtctcatcagttggaatgcccgggggctcgggagtgaccgagcattccgaaatctctcccttcttgttagattgtataagccctctttactttttgttattgaaactaaattgtgtaagaactctattgatcgttttaaggttaagctaggttttgattttggttttgaagtcccccgtgttggtttaagtgggggactttttcttttgtggacttcggatttggatgtaactataattaactattct

SEQ ID NO: 406501 - DNA, 534 bp, Cannabis indica
tgcgcctagtgggtcatgaggtttttgggtgcctcgtgcctacctgctattgacatcgccccgccgtgggcctgttgtatagtgggtcatgaggttgttaggtgccttgtgactgcctgctattgatataccccgcctaggcctgtcgtatggcttcttcaagtttgattaagtcatatgctctattgaggaactccttcatgttgttagtggatatttgttgggctttgtttcctacataaaactctatttcaatgtaatcttttctattcaattatcaataaagaaatagatttattttcattacttagtgtgttatttggttcatgtgatcatttatatgtttatttgatttataaatttatccaaatccttatcacattgatattcttgtttattatgtcggcagcacaatgggaagtaatcaagattatttgattaaatgtattcctatgatttattagtatacatggtttaactaataggataatctacaatgagtttacttgcaccttggataagtgctatgtcttt

SEQ ID NO: 406502 - DNA, 550 bp, Cannabis indica
ttgagagtgaggtgaccaagctttaagaagtggcaaaggtgccaagtcttcggaaagtactctgaagtaaagcttaggtagcttctcaaaaagaagcttctaatcttgaagactcttctcgcgatactttgaatagaaagttgttatggttgatgacttgagagaccaggtcaaggtcttggagaagaaagtaactactctcaaaggtaagaccctccttgatgttacttattacaatggcatatgctttaataccatttataaggcttgggctgcaaatgatggagccaagtcgttcaactgggaaagttttccttacacagatgtggcagacttcatcaaacagtgtgagcagtgttttgatgcaaaaactctcagggctcgtttggtacgcaggactggactagattagacaggctaatttgtccagtccagtgtttgggtatgttcaatgtctagataactaatccagctaatctcatctggctgggattatttatcccatccagtagggtgggataaataatcccatgcagatgagatttttttt

SEQ ID NO: 406503 - DNA, 567 bp, Cannabis indica
agagaatgagtggagaatgagtgaataaaaaaaattggcccttttagtggggagctcagcattgattaagaaagagagaagaagagaggggaaatggggtaatgtaaataggggtattttagggatattgtaaaatatgtcatatcccacaaatattaaatgttttatgtttaggggaaaaatattaggtatttgtaaggataaaaaatcaaatttccctatactaattatgttaacagtgaaaagtaattacccaaatactttaataaaattttatctttagtaaagaacttgggtttcgcgacggatgtttaaatttttttaattatatatataaaataaattatcatactatttatttaataataaatatatattaaaattgtactaaattttaaccttactaattttccttataattattctttgaatagtatgagaaggtgtacaaacgtcaacttaacccctatttacaaaataataaaactcaaagtattaattaatatgtcaaattaataagtgaagagtcaaaagtatgacataactaaaaaaaataatagtttactc

SEQ ID NO: 406504 - DNA, 565 bp, Cannabis indica
ttcttgtcgtgtgtttctcgaacgcctttaattttcaattttcagggcgttctctaaaaaatacatatataataaagacttaactttaatttgcagttacatataaatacttttttatttttttacggtaataataatacttaagttatatttctagaacttctgtaggtactagttaagtaaattaccacgtgacaatttctaattggtccaaatcattaaatttttagagcattgctatgaggcaccagtagtgcctagcaccttctcgacatgtcacgttgcgattggttagtaatacttcctaaaagctattatattaaattatatgtaacccgatacttcgttggaccaataacgatattgacatgtaagagggtgctaagcaccactggtgccctttagcattcctcaaatttttattatgtttaaaaaaaaattgttcaaaaataccaataaaaaaatgacacgtggatttaatggcttaatatttaacggttaggtacatacagagttccagaaatataacttaagtattattaccgccaaaaattaaacttaagta

SEQ ID NO: 406505 - DNA, 359 bp, Cannabis indica
tgattcctttaaaaggatacgtaagcaacctaagtgccaagattaagtacaatcataacttctaaaattctcaaagaggtcattcacctcaccaaaattcaaatgaggtcattaacctctatgaaaattctaaatgaggtcatacaccttaaaaatcccaaatgagatcatttacctcaaaatatcaaagtgagttaattctccacaaagttatcgaagatacaaaatcttttagcactattggaactgttggaaattattttaccaggatcttagatctactcactagtatgttgattaacaccctaaatgatctttcttcacgtatcttcctcactatgattgaggtattcattgct

SEQ ID NO: 406506 - DNA, 705 bp, Cannabis indica
aattattaattaattttttataatttgttactaaataatgataatttagcaatttaagttttttggggtttttttttttttttatttttttttattttttacacttcaaaatatatatatatatatatatttttacatttttacgaaatttcacatagaaactcttatagcaactaacgaagcaaatataaaatcgcaaccaaaatccgcatagcaacccacatagaaaccaccgcagcaacccaaaccgtaaatttagaaaaaaaaacaaaaacatagtatatgtgggaaatatttatggcgaaacctcttataattttaacttataaaacctgacctcataatttaaaattttgttacacatgtaactttaattaaaaattattacactcatttattttgtttattttatttaaaatttttaaaataaaaattcatttagaatcatgtgataaaatataaaatgggttgaatgtatttactcaaaaataaataaaaaaaaaggttaaaatgagaaatgagtttctctgagtgttcttacttccgctcatctcgattaagatatatgtgaatttaatttagataaaaattattatatgttattcatcttcactattgcttgcttctgaattaagatatatgatgaagtctaattttgtaaaaaaaaagttttattgtaaatattatagagtaatttgtggcata

SEQ ID NO: 406507 - DNA, 587 bp, Cannabis indica
tccgttgaagctcttttacagtcaaaggcatatatagagtataatttctcatgttgcacatcctactgctcagcaaatacctgatgaagcaaatagataaaagaaatatgacaaaaatcataaacctcacaaagtacacaaatcttctgtttttaaatttctctgttgagaattatggggttccatctcaaaaccaattggtgatgagtggagtagcccatgctcttatatatggctcaatacttttacatttaatccatgtaggacaatgtcctccagtaattagttttaaaaaggctaattaggattataccctccaaactttaacatgtacaaaatcatgccccctgaacttttttagatgttaaaattttctcctgaactagtgagattattagatttaaggtcgtttgtttaatttcattcaattttactatttcagtgattatttatgtactaaatcatgctcctcagactttgatatctaccaaatcacgcccctcgaactttgatatatactaaatcatgccttctgaactttcatccatattagtactttttttttattaaaattagacaaaagtcct

SEQ ID NO: 406508 - DNA, 864 bp, Cannabis indica
aaaaataatatcacgacaagtataatacaactataaaataactaaaaagacagttaattctttaaactgaagaggtacttttgtaaataaaaaaatttaaagagtaaaaatgaaaatttttccgtatttttgtaaattttttcacattttttgttaaaatatgtaaatttttctatcaaatataaaatttaaataacacattacttaatagtactattaaaatgagaatttttatttaaatgttaaaaaatatatcaaaatgttattttatgaaaaaaaaaattatttttactatttatgaagagattgtgtgtcactctgctacctctctgtcatacacaccataatgaaaatcataaaaatattcggagctttaaacttgtatacacaccactcctaatctatattaataaaataataattagctataaattgagtataaagctctttttttctttagtaccttcaactttaactagtgattaactttgtttaagatgctcttaattttttgtatcattactagttaaaagggaataaggatccattccatacctaattcatccattaatcactttaacataacataattattgtatgataaagcatcaatctttagggaaaaaagattgacataagaattttacagttgttttatttatttttcaaaataatatagttattgttaaccctaattaagtgaaaaaacattattattaaacatctggtgttcgcatcatctataagtgacacattgtgattaattaatgttaacaatttttcataaaatttattatattaaattatataataataatataacatattaatatcttttaatatttctcataaataaatatatat

SEQ ID NO: 406509 - DNA, 1109 bp, Cannabis indica
atgaacgtgctgcaactaatttctactgttgtgacttcgaagtgatgaatagaatagaatataggtgttcttaagattattgtgatgctgcaaatctttttcatttgattttattttagttttttgtcaaacgatcttggaattaggcggctgattatttggctcgtttttctaattctaatcatatggtcgtgtctccaacgggaagatgttcgattggagtataggctattattttaaatgattgctgttaataaaattctattatttattctaaaaaaaatctaacattgttaaatcaattacttaattattatttttattttttttaaaaaaaatagttttaaacatttaaatttaatttatgagtatcaataaaattagatatttttttatataaattttaatttaaatttaaattaaacgttaattcaattaaataatcataccttataagaaatttattagttatattatttaaaatatctaaacttatttagttattttattatttaataaaattaattaggtaaatttaaaaataaattaaatttatatttaaaaatataattgaattgtattaaatttaatctaatattattatttaaattaataattaagtaatagtaattttaatataactctaaccaaacatgcatatgatattactaattcctagtatatatatattaatgtcggttatgtatttttatggggcttttgtcactattataattagtgctaaactaaacttaatatatatatatatatatttcttatatttatttaataaaaattattagttgaacgattttttttctgttaaaattaatgaataaaactaacactgttaaatcaattaattaattatatatttattaaaaacaaaattaattttaaacatttaaatttaatttagaagtatcaacaaaattagataattattttttaacgtaaatcttaatttaaatttaaattaaacgttaattcaattaattaatcaaactttataataaatttattagttacattatttaaaatatataaatatataaatttatttacttattttattatttaataaaattagttaaatatatttttataaa

SEQ ID NO: 406510 - DNA, 583 bp, Cannabis indica
catgggagaaaatcgagttatctggggcctggagggttgacataccaacaactaccaatataccttcatatgctaaaaataacgaattcaaggacagttattgaattgattacggacaagaagaactggttcaagtacatgttccttgcattgtcaaattcaatcagaggatggatacattgcagacatgtaattttggtaaatggcacattcttgaaaacagcatatggagagacattgtttacagcctcaacagtggatgctaataatcacatattcatattggcatttggaataggagactcagagaatgattcatcatgagaatggtttttcaacaaactaagagaaacattcggagaaagagaaggtaagaaactggttcaaacaaaatttacagctaataaatctactttagtgtaagagttttcctattattgttagacttacttaacataaataatcggtttaaaaaataaaacaaaaaaccggttaaaacagacataaactgatatttgacaaatatagacttacaggcatgacaatcatctcaaaccggcacaaaagcatagaaaaagcagta

SEQ ID NO: 406511 - DNA, 697 bp, Cannabis indica
cgaatattagatttgtatttttttggggggtatttatgaaaaaacatctttgttatattagtgcacttttgaatggaaatttggctctaagtatgggacctgcgtacctgtctttaatagacttgcgtacctgtctttaatagtagagattctctatctaactgaagaatggggcggagacatgaataattttctatagtaaaatgagtgagtggatgaaatagaatagtacaccttaacatgggatcgttaaatattttatttattttaaaatattattttaattattatacttatatacatacgttcatgtatgtatttttatagtttattaataaattttcaaataaattattaatatttataatatatttaatttttatgtaatttttttttaataaatgagttcttgtaggtaatagagatggagacaagggaatatttctcgtctattaatgaccttatttctattcctacgtgaagctgcaaacaaagaaaaaaaaataatgattaatattaattatattaatataatttatgtgtgtatagtattataaaaaggaaaaaacaaaaaatacaaaaaggaaaaaaattacaaaaatactttgggccggcccattaaacatttatacagtccacatacaaatatttacaaaaataccacatgcactaagccttcagctgtacagagcgaacc

SEQ ID NO: 406512 - DNA, 672 bp, Cannabis indica
tatgcgtgttggtacagatgttaaattatgtatgcatgctgaataagtaatgaattatgagtaaacatattatgtcgtgttgtgattacttgtgtttgtcattatcttgatttaatagcttttcttgctgagtcaatgtgactcacgggtgcttcgtggtgcaggtaaggaggaagaagctgtggtcgaccatgagtcagaggtctcccagcgatgtacatatcaaccttggtgttttggcttccagtggataggatctacctgttaattatgtattatattgtagctctattttgtaatatcggttttgagacaaaatgtaagggtttgcaaacaggggatccccaaatccaacaatgctttgattaatagttatgttttagtttaatccaaaagttttaattaaaccacacttttcttaacctgatagattaattataaatcaatttgtaaaagcacacacgtggcgttcttgtgagacagggcgttacaacccacatgccaagagtgccttgaagacactaaattcaaccttgggactttgaccaagatttataaatgtgtcaaatgagttaagatatccttcttgagggccccatagaacttttagaagactcaaagatattaaccaaccatttggtgatgggactcacacacccaagtgtgcccaaa

SEQ ID NO: 406513 - DNA, 928 bp, Cannabis indica
agtattaatgatcaatttttttttttgccaaaattaccttcaattactgaaattttaaatttagtagattttatttattttattttattataaaacctttttatattaaaattagaaaagtttttttaattttaattagactttaggtggtcaacaattataattttatctatcttatttaattttgtttaaatattttttatgcccacatttaaattttatatgcatttccaattaatcttggaaacattatttcatcatttatgttaatcatcttttattttaaaatctaattaattacattaaaaattcttattaattaccatttattcggttatttatttcttaatttttaaataattttatttaattatataaacttatagatagctcaaatcagaaactaaatttcgataagatgactctctattttcgtctctaatttatatttttttttccttaaagaagctttattggttatttaagttttagtttatagtatctactgaagattattttttacctataagtttcgtagtttgtttgtgtaaattgtgatttgttttgtatcttatgtagtagtatgtttatgtgtttaatttatcttgtttggtaccatatatgatagttttccatatatgatagttattttagatttatactaagaatgacacaaggtagcagtgacaaactatctgttctacagataacaaagataaatttttcttcataaaataatattttgttaacatttaaataaaaagtttcatttaatttaatattaccaactagtgtgttatttaaattttatatcttctatataggtgtatttctatttaactcacttggacatcttaagatataaggacttttaaaaataagttttaggagcttttttatttttacacttcaaaacggtttttttttt

SEQ ID NO: 406514 - DNA, 897 bp, Cannabis indica
gattttttgttatctgtatgttattttttgttgttgtttgatgttatttcctgttaatttatgtaattttttgtgtttttgtattgttttcatagaaaacagtaaaaatatataaaaaaaatatataaatgtaaaaatataatttcttttataaaaaatagtgtcttatgtaattattcttttttaattgtttttttgattataaatagtgtctttattaatatttaaaatttgaaaatatatttatattaaaagattatacagctaaaaaattaagtatatttactaacaaataaaaagaaattggttataaaattacaatattttagcttctaaaaaacttaaaaataaataattagacatataagtacaacattttgaaaatatttaatattttagccgggatttactctagagttttaaacatacaataaattaattctcaactctttctttttttttctcaaatcaaaatgattacacaaagctacttttctcaactccaagcagtcattggggcagacctatttgcccaattaggtaacttttcaaagggtaattatagaaaaagaaaaagaaaaaaaaattagtcctacaaaggtcaatagctattgaagccctaataatttatttattgaggaatatgaaataggcatctttttcatatcatacattatagattatacattacatgtgtcaaagtggtactgttatatacaaagtgtgaaacattggttagatagtatagatagctagggtcagaggcattggatctggtgatagaagttaatgaaagattaattttttgcagagcttcttaactttctccacatgggtatatttacaattttttatgttttatttttttacattttggggtttcttgaaaagagtgaa

SEQ ID NO: 406515 - DNA, 1014 bp, Cannabis indica
ataacgtcttatattaagtaaaatatttttagaaaaaaaattgagtttagattagaaaaattaattactttcaaaatacatttttatatattatgtacgaaacattataatttttttttaaaaaaataataagagtgatagatacaatattcttaatttgtagttaggagaatatggttataattttagtgtacaaattattagaagcatatatatcattaatcatttgtttatatatattttatgtatagatattattatatatagatgttaattttatttttaaatatatgtaattaagttaatttttttatataaaatatttacataatttttatttttaaatatatatatataataatattataaaattaaaaaaaaatattatgttaagtaattgggatattctgttaacattaacgtagaaaactaaaaaaactccatcaaaccaagaatttcgttacatagccacattttatataaatagatatatattagtttagtattacgtgcttcattatatttttagtttttaatttggttatgtatatttttaattgtataattagtttttttaatgttatttaataaacaatatcattatttattaaaaaatatttaatttaagtgatatttatattaaaaaaaacataataatgttcaaactttattattgattataattttaatttaaccataatatttttaattttataatgcttttcgtttttttagaaatatcatgaacttttttatttttctttttaaaaataataatataaaattatttttttggtaactgtaaaaagtaatacattacaacaataattctttaagaaatatatatacattttttattattattttattgtttaaaaataaaaacaataacaaaagtatatattttttagatatgtggattggataagaaataataaagaaaaatattttttttaaatatgttcaataaatttaaattttaagtacaatattctaaaaaatactttatattac

SEQ ID NO: 406516 - DNA, 467 bp, Cannabis indica
actctaattagctacaatttcacattgaacaagatgaggcaccaaaaaattgaagataaacaacacacttgccttgaaagtcactgatgtaacaagccctcatcaaaacaaaattacttatagatatattcagtctaactacttcaacttatgccggcccaatcattctcgatctaaaatcacgctacaggcactctgagtcaatcatgcacacctacgagtaatgctctttaatttgagtataactcaacttaaagagcaagggacaaactgtagtggccaaaaatttctctaagcccaatgaaaagacccaacgatcgaagtacttacaaaacccacttataagtcagaaacaaggaactcgtaagcccaatggctcacatgggccacgcccaatccatgccttttgggtcatacccatattcgaatgtccgacccacataaagcttgatcttaaagtgtaatgt

SEQ ID NO: 406517 - DNA, 497 bp, Cannabis indica
cgctcacgaggggctttactcggcagtcacgcggctttagacaagccctgtccgatgaatctcagacacgagctgtctgaagcctgtgtcacgccgagttctctcgcccattgaggttgcgtgcaacctcctgtctcggtccaatgcccgattccgcgcgcgcaatgattgcatacccttgtgccccaaacttgtttttgtcatattttttgattcaaagatcattttcattgaaaaaaaaatcaaaatttggtagaattttgtgcaaaatctgaattttctattagaaatctaattgtcagaataaaattagtttttttttaattaatcaaaactagttttagatattagcagtctttgaatttgaaaatttgatttttccacaaaactagccttctggttaattttcaaatttttgattattttatttattttaattataagatcagatattacttatttattattaaaatttgaaatgatcttattttgatact

SEQ ID NO: 406518 - DNA, 597 bp, Cannabis indica
ctttactggtttttacggggctctcgaggctgctaataaatcggattcttggaccttatttcagcggtttggtgatgttgctccacttcttccttggctagctctcggagatttcaatgagattttatccaacaatgataaatcgggaggtgggttgagacgtgagtcccaaatggaagcctttaggactaccttggataaatgtttcttgcatgaagtatcttttattggtgatccttttacttggataaaaaaccgtactgctgtcaatactcttaaggagcgtcttgattggtgttttataaacaacctatggacaactcattttcaagcaccaacagtggaacacttggacttttttcattctgaccatcgggccattgctgctggtttttcctgcaccacgcaagctgatatcccacagaaaagcaggagtcgattccgctttgagaagttgtggcttgctgaccccgagagtgctgaaatcatttccaacagttggaactatgaccatgctactgaccccattgctgccatgcttcacaatttaaacacatgtgcaaaaagcttgcaaagttggcatataggcaaatatgg

SEQ ID NO: 406519 - DNA, 906 bp, Cannabis indica
gagacttttagactacaccctcctgcaccagtgttacgtccctagagaatctctagagcatgtcaccatagagggatatgatattccagccaagacaaggatcattgtcaatgcttgggcaattggaagagacccagaaacttgggaagatccagaaatatttaaaccagaaagatttttgaatagcagcattgatttcaaaggccaagattatgagctcataccttttggagctgggagaagagtatgccctgctattacatttgggattgcttctattgagattgctcttgctcagcttctccatagttttcattgggaacttcctcctggtgttactcctaaagatttagatatgactgaagtttttggtatcacaatgcataggaaagttggcttggaagtccttgccaagcctcgtttttcttgaaaattgcttatggtaacaataaaggattttctatatggttgggtgaactgtattattatagatgggttatattttcttaacttgttctgaagtgagatcactcgtagcactcaataaagttaagattcatattattatttattattaatatgaaatcaagaatttatgttgtttattagttttttctaccgaaaacatatatttgtaacccccgagtgtaacccgaacatgtgtcctatacttagaaagggccctgtgtagtgctaaaatgggctgagatgcaaaataactctaatttagaaaggctaattaggattgttaccccttgaactttaacatgtaccaaatcatgccccctgaactttaaggttgttgaaaatgcccctgaactatagacattgttggatttaaggacttttgtctaatttcattcaattttactatttcagtgattgcttatgtactaaatcatgttt

SEQ ID NO: 406520 - DNA, 626 bp, Cannabis indica
acccgaactattagactaaatggaggagggctgggttctaaaaaatcgtacgcactactaaatggccccctatctactaaatagacccaacagtcaagtatttgaccattatcttctcggtcaaaccatgtcacataaagtataatctatctaatttaaataatgccaaactactatacattatttaaataacataacaatcataatcataactttgtttaaataatgtgaatccatgtcccgtcaattattcaaacaacataactagtttaaataatgtgaatccattgtcccgtccattattcaaacaacataactagtttaaataatgcgaatccattatcccgtccattattcaaacgacataactagtttaaataatgcgaatccatattgtaccgtccattattcaaacaacataatataataatgaacaaataaaaaaaaataggatagaagtcttatacctcactcccactccttttgaacattatttcatacagaaaacttaaaagtttctacttaatttccttacctcgaatgtggagtcctagccttgattgcaaagagagtgattcttgagaaataattgtcttacgaaaaacctaaatttcatacttattaat

SEQ ID NO: 406521 - DNA, 525 bp, Cannabis indica
taaaaatactataattatgatataacacattactatttaatatatatcctatttttaactacaataattttttataaaaaaaaaaatgaataacatcaataccacaacatagcatccatacaaatttctagaatgatatccttttctctctaatggaataatatctcaatattttgacacataatatatcggcattatttcacaaaagcataaaaacaacaaaaaaattacaaaaatacggtttcacgaaattttaaatatttttacgattttttgattttatttacagaaaatacgatctttttatgttgtaatcttgttaatttgttgttgattttttgttatatttatgttattttttgttgttattttgatgttacttttatgtaattttcttgatgattttatgttatttttgtgttatttttttagaaaaccataaaaatatataaaaaaaaaaatatatattctttgaacgtaaaaatataattattttacaaaaaaatgtgccttatgtaattattc

SEQ ID NO: 406522 - DNA, 696 bp, Cannabis indica
tcatgtagaattgttagtttttagttttttttgggttaaaatgtattgtatgttacagttactccattaataacatagtcaattagtcaaagtctcctaaaaaaatcagttataaaaagaaaaaaaaatcataatatcatgttaagaaaaaaaaaatctttgaaaaaacaaaaaattacttcaaagcaaaaactaaaaattgttatgtgttataattgtaaaaaaaaggcaatggcaaatgaagaaataaaatcttagggtgtgtttggaaataactgagtaattattaggtacggtaattattagggtattaattacacagtttagtaattacattatattttaaaatgcaaggtgtatttggatatgaggtgataattacatatgaattctgaatatcttgtttggcaaaatagttagcaattacatgagaaaataatattttttaatagctaatgtttaatatgaaaagtttttagtaattacacagtgtaattacattcaattctcataaggggccatgagaattggagagtgtaattggaacctctcaattactttcaattacatagttacagtgtaattacatggtcagacaaacatgtcaaattgtgtaattaactctaattacacacaaatctaattacattgtggctttccaaacgcacccttagttatataacacttttattttag

SEQ ID NO: 406523 - DNA, 298 bp, Cannabis indica
caaagcttggagctcacatggaatttttagtatctgtgtgttctgggctgttttagtgctttggatttgttctttagggtatttagaacaggtctggaagtgttggtatggtttggaattgatttgagcaatgtgtgaatttttgaatgttttctgcgaggaaccagaattccggttgtgcatccggaattgcggatggggttctgaaattttccagaaccggaattctggttgggcaaccggtctgccggttggatgattttcaaaaaccctagattttctcgtttttatgatattt

SEQ ID NO: 406524 - DNA, 616 bp, Cannabis indica
tacactagctcatatttagctaaattaggactaggattagatgagagttattgatagtcttacttctttaaactgttagctttgtacctccttttatcaatgaagcttcaagtttttacaaaaaaaaaaaattaatataataaaagacaataattcaattctattttttttaagttatcaatatgaccatcgtcaaggataattatattactacggtaaacaaagtaatgtttcacattactactcccttgctagcattaactcattccgaacaaccccatattgatcaaaaactatatctattttatattgcttggttttgtcatatatgcagtttccctttattttttggtaagataataaatacaatatttaatgtattgatttctttcaaattaaaaggacaaaaaaactattgccaaacatgatagaatgaacaaaactagattaatttgataattatttttcgttaaccctttttcttttgaaacagaatgcataattataactcaaacagtacaagaatttggcaaatcatgctcaattgcatgactagcacaacagggtactgttggaaattattttaccaggattatagatctactcacaagtatgt

SEQ ID NO: 406525 - DNA, 663 bp, Cannabis indica
gacatgctagttacctaataaggagtgtcgtttaccatatgtaaggtatgcagtatacctaataggcgtgttgttctgttatttagatatgatttactttatattaatattgttttgtttaccttatttaaggcatgtaatttataataaagcatgtcatttatcttattttaagggaatagtttacctttttaatgataaattatgttttcatttatcttatttaagacatgcagtttacctaataagacatatcatttagcatatgtaaggcatgcaatacacttaataaggcgtgtcgtttccattattttaagatagtggtttaccttttaaatgttaaattatgttttcgtttattttattcaaggcatgcagtttacctaataaagcaagtcgtttaccttatttaaggtagtagtttaccattttaatgataaattatgttttagtttatcttgtgcacgaagtttccttaataaggcgtgttttttttatgactcttaataagacgtgttgattaccttattttgaggtcacaacgtttacataataagttgtgtcgtttagtcttaattaagggtagcaatttatttttttaatgataaattatgtttttatttactatcattaatgaatgatgtttacacaacaagacgcgat

SEQ ID NO: 406526 - DNA, 624 bp, Cannabis indica
aaaaaatttatagtgtatataattattagaaaatattgaggtaatactagtaatgataaatcaataccttattccatttaatttcccattgcatttgcagagcatcaccaggaataggccatctttgcatattttgttggtcagtatttgatgcagcaatatgcaatgcaccattaccgtctttatcaactcttcgaaatatactctcatttttggaatatttttgaagcaagaacttgtacaatttcacttgcttattctccaaagccaacaacacaacattcttctcatcttcattggtgtcataaattgccattggaaatttcttaaggattctctttaccatttctgtgatgccatttctagctgcaattattatggctgatttttctctttttaatcacttcactactctttttatcatcatcatcatcatttcggtctttaccgttgttttccgctgcaaaaccaataatcttattattaaattaattattgaaaataatattactcgaatttaaaatcatatacttataatttataaaagtggaaattttttatttttataatttttaaagtataaagtttgtaaaaaatattgattttttttttctctaaaaaaaa

SEQ ID NO: 406527 - DNA, 710 bp, Cannabis indica
atgaaaaacatcgtctaattttttaggcactattataaatcgtcgtgaatactaattttttccgacatttttagacaattacttaatttttttagtaacgtttcctaaaaaaatcgtttttagaaccgtcgcgaattcttccttttgtagtagtgatctttatatatagccaattttaacaacttttgttataacttagttggattaagttatctttatgtataatctgtaattaattaagttattatctttttgttttaataagatattttaagtctgtaattaattaagtataagagcattttctttgcagttaatcaagatagaaatatcatagtaggttttcaaattttttctatagtttttgttaattctaaatttagcattaataaattgataagaatattttataaaattaaattttaatttcagctaaattgtattttttatttttatatatttgtttttaattgattaatttatataaggtgtgaagaatgattatcttttcttttctatacttggaatatttgtcaaaaatggtaagtttaatgaataaatcaatttctatcttttcatatgtgttattatgatcccatatgagtttcctaattagtttgatcatatttcttgttaagaaaaacaaattaagactttcttttttctataaaaagaaaatcgctcttacaattcacgagtctgtaggtaca

SEQ ID NO: 406528 - DNA, 415 bp, Cannabis indica
gctccggttgattgggagcaaagatttgtcgagatgcaagccagaatagcacaacaagaagatgagattcggagactcaggcaacggggcgctcctgttgagcttcccctggaaccgcctgttgcggttcctacggtgccagcagagcaacaagttgctggtgaccgtttggagcctttatatgagagatataggaagcaggcacctttagtgtttctgggaggccctgatgtacttaaggctgaacagtggctgactgttattgaaagaatattgaattacaagggagtggtcgggaatgacagggtggcgtgtgccacatttcaattccaagaagatgtcttggtgtggtgggagatggtatccctcaccaaggatgttgtttgaatgacttgggaggaatttcgggatttgt

SEQ ID NO: 406529 - DNA, 743 bp, Cannabis indica
ctgaaatagtaaaattgaatgaaattagataaaagtctttaaattcaacaatctcgatagttcagagggtatttttaacgaccttaaaagtttaggggtagaatttaatacatgtcaaaatttaaaagaaaaaaatcgtaattagccttaatataattaagtatcgagttttatataatacaattaaaaaaataatttttaaaaaatattgctaactaatcttagcatacccttataaaaaaagttgagtattattagtgtccaataagattgatgttgctcttgaaatagggagaaggagaggagaatattgatgatgtcgttgatagtgatggtgagggtgatgatgagtgtgcctggcacagcacgccaacattctcaaactctcttttcttttgaattatattagccaagatagatagagcagcagcctatatccaatgctatcatgatccttgctgcacgctcgatattaattctatatacttacttatacatatgaatgaatattacacatacatacatctctctctctctttcaccaaaacccataagtttatgtaatacccttattcaagaaaggaataatattaccaggattatcgctaccttgtcagcctccttttcaatcattatcttttatcgttttcccccttcttataccttctccttcttcttagtaactaaaacacattttcccatacaaaactatacactttattatatacaatactacctacagt

SEQ ID NO: 406530 - DNA, 973 bp, Cannabis indica
cattctcttttacactattcacaacctaagccaggtttggctctttatcttgccacaaaaattcatttctcatttttcaaagattgtacactaaactagcaacacaagcagccattattatttttttcttaaatatgcttgctttagacctttggatccacctggttattcgaggtaaagaagcatcagctactctccaatgcatccaatctgcaatctcagagaaacaagccctagatctgttgcaatcaaagaataaatggttgtgtgtttcctcctgcttgttatagagaacacggaagggatcttcaacaataccaaacatgtgcaagcttgctttggttctcaacctttcctacatagcaatccataagatgaagctatgtttgggagtgctaagcttccccaaacctattcactccatccttttttatcctgagcaaagcaaagtaacttgtaccctgctgcaattttgtatttctctgctaagaactgatgtgaatcaatgagaggctatatctagtttttttagagctacaggttgccttcaataccagctcccttggggagggataaggtagctccaccaactctccttatgatgtatttattataaagtaaattttgcatcatgccatattataatttaaatttagatcaacttttactatgtgacaaatttggatcaattttaatacattattggagcaaacttttttataatacgagctatattttaacagatagatcagtaatttgcattttctttgaaaatgctcttagtgctcgattatttaagtattatatcttagtgcagtacgaaactaaataaagtataaatattttttttctataattaaagtataatttgaagaaaaaaaattattaataaaaataatgtttaataaatattttttttaagaaaataaataataggctaattaacattttttttcctaaactttgacatgta

SEQ ID NO: 406531 - DNA, 539 bp, Cannabis indica
ttttcataactcatttgcatatctttctttatatcagaggccatgattcgagccatcaattatgaacttatccttaattagatgggcaactatcaaaggtgatgcttgacggttatctttttttcgaagatcaagggaacatgcatgtacatgttgaaatgtagtcacctaaaacatgttacaaagtacgttcttcttcgcttttaatctccaccaaaaatttgtatccttacatgtaatgtaccaaacaacagtattgtacttcctaacaaagtagtcaaaccctttcttcattgcatacaagccaacaaaccatctataaatgctctttgtctctaaaaaactttttaagatgtaactccgcctggtgtgctacccatagatatataatgactatgatcctcgatgtcttctcttgtaaacatcttctccttgaatttaccgtagcttgcttaagaagaaaatagatcgctaaatcattggtccctctagctgtaaagcccgcttagttaatttggaaattagcagttatttatgtt

SEQ ID NO: 406532 - DNA, 781 bp, Cannabis indica
atacccacttttatagatgatatctccattagatcccttaggttagtgtaaattatatgctagacttaaatagaaagtgaagatatattgggcaacccactctaaaaaatgggtatattttaataaaatataatatgaaggtatttttgattaatggataaaaaaagaaatatttttaacttattcctatatatatatatgtgtttatatatataaagtttgtaaattttttgattgattgcttatgtcacttttgtgatagtttttttttacttaaaacatttgtatttttcattttttttttaaaatttgggcaagcccatgtgatctcttgtgtttatatatataaaaattaggactgtacgtcggtcggtttggtcggtttatactatatattttttaacccaatgtaaatgtcaggttacaaaattctaagtacaacctggccaatttaaaagaaaaaaaaattgtaaactgactgacgggttggtcgggtccgacgtaaaaagttttttttttttttttttaagttttaaagtcaaataaaaaagtatttgattgtaatcattagtagaaggaactcataaaatgtattactcatcatttttatgcatacatatcagatatacatatgtgtatgtatataatcatatataaataatcaaatatacctttaacaaaaataataattgcataaatttgataatttattatacctatacatatatagagatatgattttgttccgttattgtactttcacggattgtaatccgtgatg

SEQ ID NO: 406533 - DNA, 750 bp, Cannabis indica
ataaacttaaatctaaaaaaaataactataaaaaattcgtaaatctaaaattaaaaaataattaaataacgtatatattatatacttgccggtagtagctttggtgctcgacggtctctcagtggtggttaggagctcacgactcacgatgactaaggaagaggatagtgagtttctcggtgcggctcacccatggaggaggataatgatttcttgctcgctgggctcgtcaacagaagaggagatgcatttccataggtctcgtgaagggctagacaaggcttgctgagtttttttgggaccaataagtgagcggtggtggtgcgccattggactgtcagtcagaaagtaggttgggtgcgtcgtcgggtcatcggccgagagaggtggttgagtgctcttggaatcgcactactagaaaaagggatttttgcttcggttttgaagtgacacaaaaattatcggttggaggtaaccgacgcaataaccgtagacgcaaatagttatattttttttcttcattttataactgatgtaaaatgttttttttttcagttaagaattgaagcaaaaaaaaagtttttgcttcagttcataactaaagcacctaacaacaaaatcacaatactctcaccatcccatccgaccaccaccaatggctcgtaaaaatagagagagagagagagagagagagagagagagagagagagagagagagagagagagagagagagagagagagagacgaga

SEQ ID NO: 406534 - DNA, 1064 bp, Cannabis indica
cagtttttttccaaggctgcaagaatggaagtgtggtctgtttagaccaccggcactgtcagaggcttgtctggcttggctgtcataggtagaagatatggataaagagatgagttagggttttcctccttgcataagaaattactttgaagaaataagaagaatgaaaaaatttgacaaagaaatttaactgtcgcagagcatctttctcctttttggataacccatataaaattgaggaagttacactatataccttttttaaattgatgtctttgatttttacctcatttttttagaatctattatttttacctcttttttcaatcattctaccaattttacccatatcatttcacgatatttttcatttttctttaatcaaaattttgccctaattttcccacaaacctacacatctatttccaaagaacataaatatattatgtttaaaattatgtcttaattatgtgagggtgtgaggataatttgagtacaatagttataaaaagaggtatatttgaattaattataaaataatattacgctacactcaaaaaaaaaaaagttggaagtaaatttagttaatgtaataaaaaaaaaaaaagtaattcttctacttctccctataaaatttacataaatttgagattattagaattattttagaaaagtacaaaattacaaaaatacaattatacgaaattttaaatatttttacgatttttatgattttattcacataaaatacattattcttgatatatttttattgtaatcttgataatttgttgtcaatattttgttatttgtatgttattttttattgttgatttgatactgtttggatattattttcatgttacttttatgtagttttttttttggtaattttttgtattgattttataaaataccgcaaaaatataatataatttttttttacaaaagacaataattatatcattatttaaataagtaaaaataaaaattaataatttatttttgaaatcaaaataagtgatctcttgcttgagaatttattttgggattcggagcctagt

SEQ ID NO: 406535 - DNA, 573 bp, Cannabis indica
taatttacggcataaatacctaaatttagctcccaattgcaaataaatacctgagtttaattttttaccgtaataatacctaagttataattctaaaacttttgtagatatttgactgttaaatgttaagtaaattatcacgtaacaattcttaattagtctaagtaattaaatttttgttttttaaaaaaaaataataatttaaatatatcaataagaacatgacacgtagataataaattaatatttaatggttaggtactacagagttacaaaaatataacataggtattattaccgctaaaaattaaaacttaattatttatttacaatttgaagttaaacttaaatatttataccgcaaattattttaaataaattctaaaaaactataaaatattaaaaatttcgtagagtacttttataattatttttatttgtttatgtttttctttttttttgatttgaaattatctcgccattttggaccatgtattttgcaaaagttacagattcgactctgtgttttgttaaatgataaaatggaccctgtattttctaaaatagtaaaaa

SEQ ID NO: 406536 - DNA, 592 bp, Cannabis indica
cctaggtcagggttgtctcgtatcctcattcctgcgaggcctctggtacatcattatgtttattcccttggttcataaatcctcgtgatctttgaggaacgtctcgacattgctcttgattattttgctgtttatccactggaacatccctagtacccctagattgttcctcctaggtgttttggggattttcttgattttcttcttgtctcctggttcttgaacctcgaggtctgcctcgtggtcttctcaccccaagattaggttgattctgagtattagttccttgagttgccctagccgctgctgcctctctttccaactcagtgtttcgttagttagattcagctaagcgttgctagagttgtctattttccaattccactaatggtacatacctagttggattgtatgcatcctcacttctaggtatatatcatgtagaattattggtatcttcattctttcttttagggttttgattatcaccaccatagtttctttttgaacgtgacgtttcagtagtatggggtctttgagaacccattggttctttcccaaggcgatgcgtagtttctttagggcgatttcc

SEQ ID NO: 406537 - DNA, 779 bp, Cannabis indica
tataaccttgtctacttgcatcaactacacatctcaaaaccctgtctgggtgcatcacaatacaccataatttttctgatcggttggcagggctaaaaactgggttgtaattaattgctattttaattcttggaagcttctctcacacttatctaaccttacaaattgttgattctatctagtcaacccagacaatggcattgcaatcttagagaatccttccacaaaatttcaattaaaacctgctaaggcgagaaaacttcgtacctcagtgactatttttggccttggccaatttttaattgattcaagttttcttggatccaccataatctcatctttttcgataatgtgtcctagaaaagacacctgtgacagccagaattcacactttttgaattttgcatcgagtttatgatccctaagtcgttgcagaaccatgcaaagatattgttcatgctctgcttctgaacaaaagtacacaaggatgtcatcgatgaatacaattacaaagttattgaggaaatccttgaatactctgttcataagatccatgaaagttgttagagcattcgttaatccaaatgacataaccaagaactcataatgactgtacctagttcggaaagctttctttggaatatcttcttctcggattctcagctaatgatagcctaatcgcaaatcaatcttggagagaacggtctaccttgaagttgatcaaataggtcatcaattcttggtaaaggtacttgttttaatggttaacttgttcagct

SEQ ID NO: 406538 - DNA, 866 bp, Cannabis indica
gggtggcgtcttcttttgtatgaagactctctcgtgggacgcatctacaaggcccgttactacccaaatggaaatttccttacagcagagataggtgataacccaagctttatttggcggagtgtgtttgagtcccaacagttggtccgtgatggtgctagaaggaggattgggtctggtatgtttacccctgtgcttaatgttccttggttgatttctgatgtgaatccttgttgtttctacccatcctgctctggcgaatagcacagtatcacagttgatgcatattgatcgtaagcaatgggatcttgaggttttacatgatttgtttgaggcaagggatattggcttgataattcaggttccactaagtgatcatgttaatgttgattcttggttttggagtaaggagccgacaggtttttactcggtcaagagttcttatcactatctccaagagttgaaaggtgaatggggccttcagttggagtctgaattatggagggctctatggaaagtcaaagttcctcccaaggttcttcactttgcgtggaaagccatctcggggtgtttaccaactcgttcccagttacgtactaaacatgttcctgttgacccccgctgtgtgttctgcaactctgatgaagaaaccattgtccatgttttggttggatgtcattttgcacaatcttgttggaataggtctggtgtggggctgcagttttctgcagaagctacttttgctgattggtttaaggcgtttttggtaggggtagagtggccttggtggatgagctattgatggtggcatggggtatctggaaagcccgaaatgagcttctttggcagggtcgttcttctcaggt

SEQ ID NO: 406539 - DNA, 710 bp, Cannabis indica
gaaaaaattagatctaaagaaacacataaactcgttaccaaatcaaaaaaaaagccaaaaaaacaaataaaaagccacacagaaaaatacattgaaaataagaggaagaagggtttggttgtacctgtttggagtagccgcacgaaaagagaaaggttgtggtggtggtcgcctatgagaggagaagggggtccgatggagtagccgcacgaagaaatgaagcggaaaagggggtctgatttagggttagggatttgaagaagaaaagggaaaaatgtgggttgtgggtctgatgaggtatatatagaccaattagcgacagactattagtggcggagagtccgctgctaatagttaataacgactttttttttaatttttaaattatatgaatgggcgagatttttttccgcccacttattagtggcggggtattagcggcggaccccgccgctaatattattaccagcgggcaatagcggcggattgcccgccgctaataatatttttttaataaaaataaccccccaattagcggcgggcattgggattcgccgctaatactaccattattagcggcggaattggtccgctgctaataattctgaccgctaattggggaatgtgttgtagtgttgttagctactagtactcttccaaaaccagctacaatcagttggaggtccagtgttagaattattttacctagg

SEQ ID NO: 406540 - DNA, 810 bp, Cannabis indica
gagattgaacaagaaggagtcatagctgacaacaccaactatggcaacaatgggagcaacggaggaggcgtagaagaccaggctaatggacacaacaacaatgaccgtagcctgagggattacttgcttcctaacttgacagtggcccgatcctgtataaggccacctgctgttgacgccaacacttttgaaatcaagccagccatactacaaatggtccaatcttcagtccagtttgggagattgccgtcagaagacccaaacatgcacctcgccaacttcgaagaattgtgccggacattcaagatgaatggagttagcgatgacgccatcaggctaaggctgttcccattctcactaagggagcgagccaaaagttggttggtatctttgccaacccactctatcaacacttgggaggaattggccctgaaattcctttcaaaatactttcctcctgcaaaaattgccaagctgagagctgaaattaacaactttacccagcatgacaacaaatctctttatgaagcctgagagagattcaaggacttattgaggaagtgcccgaatcatgggattgcgaagtggttgtaagtgcataacttctatactggattaatgagcaacacccgaacattgatagatgccacagctggtggggattttatgaggaaaagtgctaatgaggcctttgaattacttgaagagatggccataactaatcaacaatggtcaacagagagaggcccaactaaaaaggttgcgggaatgcatgacgttgatgccataaccaagttgacagcccaggta

SEQ ID NO: 406541 - DNA, 782 bp, Cannabis indica
tctaacatggtatagagcaaaaataaaaaagaaatctctagcgactatcccaaacccccaaaaaaataaaccgatacgaagtagagaaccaaaaaaaaagagaccacacccaaaaaaacccaaaaaaattagatccaagagaccaggtacaaaaagctactgtaattcgggaataatgtgaccaaaaataaaagagccaaccaaaataccaaaaataccgataccaaaagtagagacaaaagagtcacttgtgatcgagggataagttgaccaaaaaaagagccgcttatgatcaagttgtactaaaatggtgagcaaataaaatagctaccatctgagggggatgttagagagtaccaactcctcccattgccaattaattttgagatggaacccatttactttattcccatattctaactctatacttccaatgaagcttatatctgcccaagtatgcatcaagcagatcatttttccaagacgctggaactttcatccacaaattgttaaaagaatcttttataggagagggggaaattgttaattatcacatataattattttttctatatttgaatgtatctctctaatattaattatggctatttaacataaattttttgtttatgatttttttttcgtgtaaagataaccgttaaacactactacaaaaacaccctttagaggcggtttttaagccctttaggcgtcggttttcgcgaaattcgctaccgacgcctatcagggcgacgctaaagggtttgatttgaaccgacgcc

SEQ ID NO: 406542 - DNA, 733 bp, Cannabis indica
tatcatttaatatttttattatcaaattctacaatataattgtaaaaatgcttatttttattcttaatttttgtttttcttataattttactctcttattattactttttttttttattattatttaaaggaacttatcacttttggtcctccttgttttagttttagttttaagtctcagcaccaagttcaatatgagtttctgaagaacagaaaaaactaaaaaataaccacatgttatttttaaacgtaccaaaatacctcacttaaaatgcattgattatctttattatttttcttttccagtaaaacttatatttattttggattttatttcatttaaattttatgctttgttagatcggattaataaaaaatataatattaatgtattttaagtgatttttttcttttttttttacaaaaaaaaaataataactaaacaatatgaagacacgatgccatttttgattatataacctaattaatctaatgtacaaccaaaaatagaattatgttaattcaatgtttttgattcaacggcctaaattattattagaaattaagtaatgaaattgagcataaaggaatacttgcacatgacaatttctgaacttcataatattaaaggtaaataccattttggaccctctgttttacaaaagttatcaattggaccctgtgttttgttaaaatgacaaaatggaccctgtattttctaaaatagtacaaa

SEQ ID NO: 406543 - DNA, 559 bp, Cannabis indica
agtacccctaccacaaccagcacctgatgttggcttccatgaatctcttctagcaatatttttctttcgtatctgagcttctacaccctcaaaaactacggccggttcaactatctgagcataagttcgagcaacccctggtgtttagaagcaacaatcacatctcgtgcgatatgttcatccaaccctcgaatgaaatttgctttcctagcagcttcaatagccacctcagttaaagcaaactttgccagtcggtcaaacttagtggcatactctgtcacagtcatgctgccctgagtcaatcgtataaactcttctacctttgctgcccgaatatactcattacaatatttctcataaaacatggcccggaaggcttcccaggtcatgttattcagatcatgaccctgagatacaatcctcccaccaaaaacaggcatcatctcgcagcatataagtagcccacctgacccaatcattatcttcaacccgcataaaatcaaaaattgatgttatcatactcatccattatttcgccttgagtggatcagcaccaccc

SEQ ID NO: 406544 - DNA, 850 bp, Cannabis indica
aattattttttcttaatacaacctttcatttttccatctcaacttgtttaataattttatataattatctcatgaccattagtttacaatcttcaggataactctaatggtaaaatttatatggtattaaatcaacactaaaaatatattattttaacactaatttttttgttttatattccaaccacaacactaaaaaatatattatttattatattattattttattaatataacataagttttgattataaataaattatttaattatttgttttattgtataaagtggttattaaattattaaaaagcaaaaaaaaaagatgcagtggtccatagtgtcccactaataatagttgaaaattgtagactcccacatatatatatttatatatatataaatagagtaatgtttagtgtttggttggaataatattatgtaaaaacttcactatatttgagattttacagtcccattagagaagcagttacacaataataatatagtatttaatagggattatttcaacaaaaacataaaaacaaacaaaaaaattacaaaaatacagtttcatggaattttaaatatttttataatttttttgattttatttatagaaaatacggtcttttatgttgtaatcttgttaatttgttgttgatttttttgttacatgtatgcttatttttttgttgttattttgattattatttttatgtagttttcttgttaattttatgttgttttcgtgttattttttggaaaaccgtaaaaaatagtaaaaaaaaaaaaaacattactttgaacgtaaaaatgtaaatattttacaaaaatagtgtcttatgtaat

SEQ ID NO: 406545 - DNA, 734 bp, Cannabis indica
aaaaaaaatcaatacatatataagtagtaagtagtgatttaaaagaatcactattatacttgaagtaattaaaaatttagaacaactatcaatcctttcactatgtgctaaattaatttggataataatagtatgtctctctcttttgagtgtattggtatgtatgtaaaagtgcttgagtggtgagcctttttcgtcccaggttcttggcttgtttgtgagtggtgagtcttgttgctgtttgatcacaagggggattgtttgtgtcgcttggtgttgttcgttatggcatccagtagctatgtaatgggtgaccttgctgaacaatatgagaactttcagattgatgatgaagaagaaggtgttcttattgaaggggaggctgatggtgatgaacagacctttgatgatagatggtgtcttgtcggaaagttccttacgggaagatctattgattttgatgccatgagacatttaatggcatctctatggcagcccggtaaaggtgtgtatgttaaggaattagaagctaatctctaccttttccaattttatcatgagattgatatacagatggtgatcgatggaagtccatggacttttaataaggttcctcttatttttcatcgattgaagagtggtgagaatcctagaatggttcatttgcacaagcttgatatgtgggtacagattcataaccttaaaactggattcatgatggataaagtggtgcg

SEQ ID NO: 406546 - DNA, 905 bp, Cannabis indica
aaaattgtgccacgtgttctcggtccagtccaacctggcagttaacagctaaatttcgacggaagtgtgtttttgctaacagaatagtggttttgggggtttacccgcagaaatttgggttgtgggggtttaatgaaactaaaaccaaagtattgggggttttgccgccatttacccttatagaaattataaatcaaatttttctataagattatgtagattaattatagcacatatttcacctattttaaaaaataagaataaattacattgccaaaaataaaaattaaatattaaatattgtacttgtgcttagctttttagtgaagaatgtagagaaatggaatgcattgaaatctgagctcaaagagaggctgagtacaaatcattatatttatactgagggaatgaaaccctgatgattataatagcaaaaagagaggacaactggtacagagaataacagaatgagtaaaacaaaatagtacaacagaaacgtgggaaaatagagaggcagagagaaacagaggccaagagagattaagagcagtatgcctaataatcctgaattagctattccaaatttatcttaacaccacccctcaaatgcagggtgaactcgtcactccaagtttgtccaccaatggttgaaactttgcatggttagtcctttgtgaagcaatcaacaatctgttcctgtgttgggatgtatcgaacttcaagtttcttctgccgatttaatctcgaacaaagtggatgtcaagttcaatgtgctttgtgcgtgcatggtacacaggattagaagcaaaagcattggcactcatattgtcacgctagatgactgttaggttattttttagtattaaatttttgattaaatttagtatttttttaattgtgcttta

SEQ ID NO: 406547 - DNA, 563 bp, Cannabis indica
caatcatgcacatgtgaagcatggtcctcttcggcttggagggtagtgcctcatcatacgagcttctaaacaacatcttgatgaggcttggatttactccttaaaatcgagcttactcatcaatggaggttttgaggaattttaaaattacatttatagatcgatatttttagaaactaaataactgagagcttcaagaatttaaataatgattaagtaaaagagaaaaatgatttttacgtagtttaagtaaaagaaatccttgaataaaatctgcagaccttgcataaaagaataaaaggagttttatagactaaagttcgagttcgggcatacccatgactcattcaagttttttttataaaagcaagcccacttatggggtagaatacataaatacatgactatgaagcctaaggatttctagctcgtggggcgacagttttgtactgattaggagatcgtttgttgtaggacatgttggattttgtgccctaaataaaacatattttaatataatcagatttattaattcataaagatcagaaattattttatgttgc

SEQ ID NO: 406548 - DNA, 554 bp, Cannabis indica
caaacccgaacccgaacccaaatggttcatgttggtttaaaatattgattttttttttaagaaaaaatctaaaaatagttttagaaaacttgtgtcaaataccattaaaattttaaaatgacaaaaaactaattttaattctcacttttagaaacataattttaaaaactaaaaactactaacacaaccagtttggctataagtgttctacttttccaaaccaagctttcccttttctttttaagcaaaaaaaaaaaggctaattagtaatttttccccctgaactttgacatgtagtaaatcgtgcccctgaatttttttggccgttaaaaattctcctctattgagattcttaaatttaaggacttttatctaatttcattcaattttactgtttaagtgattgtttgtgtattaaaccatgctccccagactttgatatttaccaaataatgtcactcaaactttgatatgtactaaatcatattccttgaactttcatccatgttagaatttttttactaaaattagacaaaagtccttaaatttaacaa

SEQ ID NO: 406549 - DNA, 526 bp, Cannabis indica
atatataaattaatcctaagtcacaaaagtgaataacaaaattcattattttatcaatgactaggtgataacttatctcttttaattttgttttaagagaatgtaataatgttaactttaaatctttcgatgaacactaagttttaataatataacaaatacatgtgaataacccaatcaagattcgatatataaaaacatagtacttggctaaattataaagtaagtaataacagatcaattgataactctatgaaaatagagttatttatatctttttgggcattaaattagttttgttctcaagaatttttagtttattttagtgacttttatttggttttctttaattttgcataaatattaattttagtattttgaaattagtttttattaattttattaatttttatttgtttatttagtctcccaattaattaaatacaattatgtgtggtgttgtaggaatttaaatataaaattggcatttagtattatgggccatgatgttggacaaaaaaaaaaa

SEQ ID NO: 406550 - DNA, 552 bp, Cannabis indica
gattatattatgttatttaaaataattttaagttactatcataaaaaatatatatagttataataaattacatatcttgttagcaaaatttttaaaattctaaattagttaccaattagtatttctaaagttatacttataatttaagatacattttaaaaattttagtttattgtgaaaactaattaattatcgtatagtataatataattcaataaattaaattctaaaataaatattaattaagattaaaaattatagaacgctaactaatcactatatgattggtatcacgagtaatcaaatagtttctttaattatggaaatagtaaaaaaatataggaaaattctacaatgcaccccttaaaatagatatattgatgcacccctatctattttagcatccgaaataattttttagttaattttttttcatggttatgtacgttatagttatttaagacatcctacaaaattttaagaaatttggaaaagtttaacacaccgaaaattatgttcaaacagtgtgttgcacgcgtgactgttttattt

SEQ ID NO: 406551 - DNA, 1000 bp, Cannabis indica
agcctattttgaattgcaatccaagtaatgaaactgtatttgggagtgttcaatctcccccaaacatgctggctccaagtactttctccagatttggccaaagcaaatgataacctttagcaacacaataaggttgaatggaagtgtattgacctgcaataatctcaatgaactggctttcaatgttacaagtctactccaataccaactgccttggtcaggagacttgtaactccaccagtttctcactttcgaatatagacatagtggatccatttcatccacaaactatcttccttatgtgtgcttatcatttttatagggtgcaaaatagaactccccaaaaaaatatgctaatctttattttaatatcaaacctacccctcctaaacttaatattcaatttctctcacttcccactttctcgacctaattttctttcttttcttcttacctgacaacaaccaagttccactccgacatcgaccaccacaaagcacttccagttcgaccacgacagcacaacctggctccacctcgacaatggtagccacatgatcttcgcacaaagttgaagcacagtggcatttttggaccccaaaattttattgtcggccaaatggataattcatagcgtatctatatcgtggaacatatagagcgttctatataattgagagtgtaattccaaatctatagtggtgcaaggaggaattaataagttaggaaatttacttggtaattctagatctacttattggaagctcgattatataggcccatggtccctatactagttgagacaatactgcttgtaagactcagctaattaattttaattaatcaattataattctaaattagactatgtctcatttatgaattttcactaagttatggcttgattgtgaagaaaaaagattttaggatttatttattaattaaaagactttgtggagtctaattaataaataatataaataacaattttatttaataa

SEQ ID NO: 406552 - DNA, 606 bp, Cannabis indica
attagcgagacacccatctcgctgtaggaagtcatactcctggtatcttcactaattagctccagacatctttcaatgagatccactgctctgtcacgtcagctctctctcagatagaagctgacatttaaatgaagttggctactgaagttcaccttgtcatcaagaactgcgattgtcagatggagcgttatgtcttcaatcgcaaaaatgacgggatttacattatcaacctcggaaagatatgggaaaagcttcagctcgctgccaagattattgttgctatccaagttcccagcgagatgccccaacgagatacactttacaacgtatctaaatccacgtcaacattgacccgttaaaagcggataaatcacagttgtgtgattttcaaataattaccgcatttatttacgtgggacgtaattaaagcccacaatttcagggaaatattgttgttggattcaaatctgattgtaattaactgtcaccctaggggcagaatgtacataaaaaggacgaaaattccttgagagaaaaaacctagtttgtatcagaataatctgaataagattgactcgtggactatgcagagttaactacaaa

SEQ ID NO: 406553 - DNA, 598 bp, Cannabis indica
cactataagattttcatttagcgttcaatccactttaaacgcgcaattattattttaattttttgaaaacccggcttaattaattggttttacataacgagagaggacataataaactgtaatttgataatgatgtacgtatttgttgtgcatatatgagtattaataattgatattaatttcgtagaactatttattaaattttcgaaagcaagaaatagtgaaccctacacaaattataagaaaaaaaaaaaaaaaaaggaaaatttctcctattttttatagaaattggtactactttttttttctaacttattttattttaattttaattttattaattaaaaaaataaatacgtcctttaaaaattttaaataaaaaataattaaatgttttaataataataataattttatcaaattaaagtattatgattatctttctggtaaacaaaataatatagtttcaatttttttttcgaacactttattaaataacataataaaatattatttctgattattttttttaaaactatttcatttcttttgttgatttatttgattccagttgcagtttagtaaacatggcaatgag

SEQ ID NO: 406554 - DNA, 659 bp, Cannabis indica
cataaccccaaaaaaccaatgctatcccacaaaccaaattgccacctttttgccagtttctctaatctgggtttctttattattgtaaatgtgttctagacagaatcaaattgagctgaaaaaagggccaaaaacccataaataaaaatgcaaactttaaagcgttagaagaagaagaagaataatgaatttgatgaaatgatattattgaattcgtattcgtattggtaacaatggcgattaagacaaacaatggcggaaaagaagtggtatctcacattcaatccaagaaaaaaaaaacccaaaaactaataaataaagcataaagcttaaagctttgagcgatgaatgaatataataacaatacctttgaaaccctagaggcagaaatggaagatgggattgagaattgagtctcgaagaaaggaaatcagctggtgtggtctgagacgacgaagatctgctttttggtgtaatcgtattattatcaatatataatatcaatgaatcgaaatgggttatgcctttttgttgtattgtattgtatctatatgttatatatatatatatacacacatatacacatatagatacagattggtgtctgcctcagtggctctgcctcctcttctctcttccttttctttctctctctctct

SEQ ID NO: 406555 - DNA, 880 bp, Cannabis indica
cctgttgatttttccagcaacaatgctaattttgatgacttttcagggccggcagcaactccgacgacttttccggcaccggcagctactccgacaaaattttccggaaattttcccgcaacaatcgacaactctggcgatcactatagtcttatttagtttatattttaaaaaaaataaatatgaaaggaattttaatatttttatggtaatttaattagtttttattttttataaattttaaattcagatttctttttaatattttatatggtttttttatatatttttattttgattggttagataatgccatatttagtggtatatattttttatgccatatttattataaccttaataatttttctcatatttttgaaaatagccctattatatatcttaattacatagataaaaaaataacacataattgtaaaactgtatgtatgtaatcattttttaacgctcattctacttgtttttattgtatttgcatcaatttttagtattaatagtctaatgcataattacaaaactttatgtaacttttttttcttttattcttttttttttttttttttatgaataattgtcaataaatgaactttacctcaatatatccttgtataaatataatttttttcaacaattgtttaaatataattaataaaagtaagatacatatctactatacgataagaatgaaaaacaacttgtttttgtcgtttttcactttttttttatctttaatattttttattatttttttacaaattattttttgtacttgttattggcatcttaagatggtcaataacataataatgtggtactcaataattagctagaattttttttattactttttatgaatgat

SEQ ID NO: 406556 - DNA, 760 bp, Cannabis indica
ccccccaaaaactcacttatgtagtacatgtgggcccaccttttctcacttacttcaccaactcatcataacggtacataaaagattatttctctgtgcaatgaaattagactgtcaagacaaaatgcttcaacacacgcaccacattttattcagcaaaggtgacaatagtccccacaacatcaatattgctggtaaagtccctatctgtacagatgtctgtacagggacttgggggaaaatgttatcccaattttggtcctcatgatgtggcatgctttcatggaaaaaaacctatgccccgtggtagtacaactcactagaagaaaggtcaagtcagcatccgagccaacaaagaccttgacactcaaatagggatcaattgatagactagctcactcccaagagctggctagccacccctggccggccatgccagagacacatcatggctgcccagcctggctagcacaaagccctagctggccaagtatttctcaataggtcccacaggactctcctgcacgtggacaacattagtgggctgcgaattgggctccaaaagcccaacagacaggctgaataatttctagaatctaagagcatttttggtcttttgtaaaatatctagctaactattttattttcaagggatttgaattgtaaacctaggctttaggcctcctctataaaggccttaacctctagctgaaaacctaagttgtctaagcctcctctaagctagaaatctcaaactctc

SEQ ID NO: 406557 - DNA, 1094 bp, Cannabis indica
ttaaataaataataaatatttaatacacattatgtacataataaatttgttatcattactctaaaatatataatttatataacatataatattatatttggtgttgattacatcttaaatgtaatagaaaatactagatagacagagagtgtaaattattttgagtttgtttgtactaataacacaaaagcacatcaactaattgatttgattgtcaaataatacccaaattaattgtaaataatcaaaagtgtggtttggactttggacttttcaaaaaatagaaactactaaattagtaaaaatacttgaaataaaacaattcagttcataaaatagaaccaatatcttgtctttcagtgataaaagcaacagagacattattatattatactactatagaataaaaaataatcataaacaatggaccaaatctaaaaggtacccaacattcttagaaaatctaaagtcaattttgtcagaaaccaataaaacctatattatataattaaacaataacaatgaatagatttgcacttttctttttttttcctttgttagtctaatgattggtgcacacaaaatatgcactaatatactatacctagtaacttgatagtatttttgaaataattatatattatcaaaatgtaactcaaaattttaaaataatattgttatattattaagtataatattttagtgcatatattatttttgtatttgttgttgtatggttttacaccttttaatttttactagtggtttagtttaacactatttagattatgtacgatggaagatgtaatagtattatttaacacaagaagtaattttgtggtgattttacattaacttttattattgtactacaatatataattataaattttaatgtaaaatttaatatgccatgatcacttaatattttattaaaaaataaataaaaataataatgcaaaagtaaatataaaatttaataataataagatgagtgttactgtcaaccttttattacaacctcgtcaattttcgtgcccgaaaatacatatcaaaatatttttttatagcgatattcgttatactcacaacat

SEQ ID NO: 406558 - DNA, 624 bp, Cannabis indica
aagatgttgtagttttcttattgtgtaacatatatgtaattgtataaatattaaaaccatatagatgtgtatgatggacttgcgtgaatcaccaatatatatgtatattgagatgtgaatatctacgtttacaatgcttctgatttaataacttttcttgctgagtcattgtgactgacgggtgcttcatggtgcaagtaagaaagttaaagctacattcggccatgaattagaggtctaccagtaatgtacatatcagtcgtggtgtcatggcttctggaaagcaggatcgatttcttttcttttatgttggaaatgtaactttgattttataataacggttttgagatttgatatataaaattttttataaatagggatccccatactttaatggtattttataaagaagttttattctaatttaatcaaaaagtttttaattaaacctcacttttcataaactaatagattagttagagataaatttttaaaagcacacacacgtggcgtccctgagggtcaaggcgttagaatatgatattagagccttgacccagccagaagtgtggtcgatgaggacgtcggaccccgtaaggggggtgattatgacagtcagtagtc

SEQ ID NO: 406559 - DNA, 363 bp, Cannabis indica
ttttgaaatatattttaagaacattaatgctaacaagtaatcactatacaccaattctattttctctaattacaattattttcttaaagtagtatattccattcctcaaaaaagtatattctaagtgtattgtcacgtttttcaccaactacaatatttatgagaattgaccagaatattattgtaatatattattattattagtgtaatttaatattaaattttatatattaatataatatacaatattaaaattattagtgacaagaataataaaataaatttttttgctatacaattgtatgatacttctaataattaatgaacaacaaaagaaattgacatacagagtcggctctaggc

SEQ ID NO: 406560 - DNA, 760 bp, Cannabis indica
atacaatttgaaatttgatcgcaaaattttctacacatatgcactttctcatagccctctattggttacttaagctaacctatgtagttacatttttttttttataagttgaatttagtgcatataggagtactaaggtaacactatatgtcattgcactgttttttttttcattatttaatatttatatttataagattaaataattttttatgttgtatataaattaaaatgtgaatacttttaattataatttaagtaaaaaactattaaattttgtatattttttataaaaaaaaattacacaatacaaacattttaaatttaaacatacattaaaattaaaattaaatacactaaatatcatattcttattaattaatagtacacatattttatattacgtcactaatagaacattatacttacttacacttaatttctttttattagagagttgtgattggagtgaaaaatttaatatataagttagagatgctcttagatattatatttacactttaacaatttatagacacctcaatatttaaaagaaaattactctcaattatttttttaattttattttacattgttttgtgttaatttcaataataaaaaattaatcttctatttcctggctcattttttttttcatcttaatatttaaaaatatatgttatattttcagactctcctcttgatcaataagaaaccagaatgaggattgaaagattattattaataaatggactttgat

SEQ ID NO: 406561 - DNA, 569 bp, Cannabis indica
taattaatgatagtatgatatgtaattataacttacatattttaacagggattacgtgtggcacgtagtactccacactagtatatatatatataaaaatatatatatagggtcatactatggtaggacctagcaaaagttccctaccggttgtgaactttttttctaatcgttgattttagatcttgtggttattatgaagtaaggtatatactcttactataagactgcttgtatacaattaaaactttatacatattataataatattttaataatatatttattttaaaaaataaaataatattaataattaaaaattattaatttttattttttaattattattattattattttctaaaattaatttaaattatttttatatagatatttattttcaaaaattcttctgcttgaatgattttatatgctctttaattggaaccgtaccaacttatttctcttaagctcaatttttttggcagaaaaaataatatcaaaccaaattaattaattttttttataagtggcgtctcaaaagagcagccaaataacaaaataaaaac

SEQ ID NO: 406562 - DNA, 721 bp, Cannabis indica
acactatatatacactcataaataagtgttccaagaaatgtgggactagtcctctaaggacttcaaaattcacatttccaattttttaataatttacaaatatgtgccaacaatcccccacttgaattttaaaaaatattttcatcgagcgataatctaaacaaaaagattgagcatagacatgggtatttgtcaatttgaaactttgtgtagtgaatacaacttagaatgtagtcttgaactctatttctaatgatgtaccacacacaacctttctagggtgtagtccaaaagtccattctaaaatggtcatgcacgtctatcccaatattgaaagatttacacttacatgataaaattaaataatctcttacacttacaacccaagcaactttggtcttagataggtagaagaaccctttggcaacccgggtgttaatagggcttgctgctgcttagatctatttttcatctccttttccttgttccatctttctgccttaacttgctccttcctcaaactctccatctcttcttccatggttttttttcttttcctattgtttcttcatatgctccaattatgacatatcagtgttgaaatagttgccgcagaaattaaaaggaacgaatttaccgaattgaaatttggattgagtcacggactaagtcgttctctttaagacgtccacaacacttttcagaattgtgcaagcagact

SEQ ID NO: 406563 - DNA, 539 bp, Cannabis indica
atcatataaattattatttaaatatatttattaattagagaccgcaaagtgtcttaattaacaaataaacccatatctcttttttcttctcaaatcggcccaaacttagtgaaaatctcaaataaaacatactcttattttagaattataattgacttattaaatcaattaattgagtctacaaggtagtattgtcctagataatgtggggaccatgagcttatgtaactaagctcccaataagtatattagaaatttaccgagtaaatttcctagcttattaattcctcctgacttcactatagattcagaattatactcttgattacatagaacgctctatataccaaatataggtacgttatgaattattcattgtttcaatctaaatagccaatgatcttctatagatggtctacatcgagtatggataaatttactattttacctttctattgtatttatccttaaaacatttagctccttttaaatgatatttctaaaaacttttataatgactgaaataagagctcttccat

SEQ ID NO: 406564 - DNA, 545 bp, Cannabis indica
gctcaaatttttgatctctgtcaggaagagtacatgtcactgcagttcatactttcagtaaattaataagatgggttgcattcaaaccagatttaatggagtggtaaatttgtccaattaaattagcaaataatcttttttttaattacttttattctacacttaactcattttaaaattaatttaatattaaacaaattaattaaaacctcataaacaaaaaacttaaccctaatttttttttactagagaactcctctttctttttattcttcttctcctttttctcctcatcctctttcttcttgctaataagacgaaaaagaccatgaatggttacaagtgaatcattcttcttcttcttcttctcctcctcttctcgtcttctttcttcttcttgctggtaagaccaaaaaggctagccattactcatgaatggtggcaagtggtagcagccatagacaaaagaatttgagattcattctaacagaggtaaactccaaataattttcttgtttcttttctttaatttttttttttcagtt

SEQ ID NO: 406565 - DNA, 1006 bp, Cannabis indica
tataatttataaataaaagtagacaactaatataatgatatttaacctctccaaaacattgatcccactaccataacattacttcaagagaaagcaatttatcagttaggtttacatgatttgttttgttaatttatttatttataaaatttagtgattatttctataataccattatcattattgtctagattctattgtttttataataataataataatcatatgagacaacaacacgtatagaccctaaaaaatattacacattagcatcacatggccattctatgcatttttatgaataaaataaaagaaagaaaaaataaatatttctttttcaatagccttattgcaaaagctcaaaagactttaaaacaaaaaaagaaataagtataaagataaggttctcaccacaaaagggacttgaattgagataatctgtttgatgttatggtgttattgggtgaaagtgttattcataaaagtaatggctcaacaaaaaattggttttaatttatacttaaataattatacaattaagataaaaaattaaaagtaaaatattttttaagttctagtaaattaagcatcattttcttacacagtctaattacatgtaaaaataattttaattatttaattaaaacaaaaaaaaaaaacatgtccactagcaattgcaaaaataatgaagcacataataaaataattaaattagagaaaagaaatggtaaaattggcccaaattatgagtaaacacttttatattcccatctttgagacaaaattgattattctaattattttattaatattaaaagaaaaataaaataagagaaaacataacattaagataaggaacgtttggatcggaaaaacgttgtcttgttggcgaggagaattggtaggcccgtccttgagcatagacaggcttggcctgtgcctagtgcccatctaacccaaggttcaaatttttttttctctagtttaaaattatacattttttttt

SEQ ID NO: 406566 - DNA, 550 bp, Cannabis indica
attctaagggccaagagacggagtacacgggcagggtgcgaaatcgatcctaaagggtcaaagaatatggtgcgaaatggctgtgagaaaatgaacctctttggttcgtttagggttcaaatggggttggagtctccgatagagataggagttgggattgggccaccatcgccgttgtgtgtgaagcaaatgttagggttgggttgagtctatcagggtgaggataggtggagtcggtgagctgaggttgtgagagaaagctgagagagaggttaacttggggaagaagacaagagagagtgctaattgtgccatcgaaggcccattaatgtagttaaggtagggaattgaaaatacagagggaaattttggaatttaccgccaaaaataaaatttttagaaaatgaatattgtgtaccaagtttgtttttagtaatgaataattatatatttcttaaaaaaaaataattatattatttattatctttatatattggttaatattttaataaaaatattttcatattatattttcattatattaaaaata

SEQ ID NO: 406567 - DNA, 515 bp, Cannabis indica
ctcactagattaggtgatgcgatatcctggtgatgtactaggcgtaagtacaagcgtcaatgatatatgatgagtactgagcgtaggtacgagctcacctcattaggtgatgcgattttcctggggacgtattgggtgtaagtacgggcgtttgtgatatttaatgagtaccgagcgtaggtacaggctcacctgattaggtgatgcgattttcctaacaacatacttggagtaagtacgagcatcagtgacttatgataagttccagtcataggtacgggctcgtctgattaggcgacgcgaatatatgatatatgggtgcaggtctttggcacaggatcacctgattaggtgatgcaattatatgatatatgagtgcaggtctttggcatatgcttatctgattaggtgatgcagttttacgatatatgggtgccagactatggcacaagcttgcttgattaggtaatgcaatacaggattatcaaattaaagcatcaacttgcctgattagg

SEQ ID NO: 406568 - DNA, 642 bp, Cannabis indica
aagaatgtcaaggagtatcatcactgattttttttctcttccggttttcatgccgtggaacgcccagaactgctcatggagtgggtcaggattcccccgatgcaccgcgccgcccctacccaactcttccttcggcccgccaaggtcttttccacatatgacaaagacagtcttaattgggggacttggtcacaacggtgaactgtaggaaggctaagctcatcacggagggccaatcggtggacaacttcaacctctccaaggtcctttgccccaacattcgcacccatgatgccgaaaaggtactccaggcagacattatcgcctcagcggaggaccggtactagaagtacctctttaggagggaacaagggctagcttacattaaggctcaagccgatgctgggaggactctctgggtagaggcgggcaaagagcgggtgtcgtctcggcccaagttgctgctcccggttcccaacactagggctcctgatgccagcacctccggatccggttagtctcccttagttattcatcgtgtcccttctactcaagattattctcgatgtagacctatagaatttgatgaacgtctccttagatttaagatgcctcctacccgatggggtgatcatgccaagg

SEQ ID NO: 406569 - DNA, 948 bp, Cannabis indica
gagaaaaagcagatgtaacaaaattgtgtaagaaagctgagttgaatgtttggtaaattataaattttaaaatactgtgagttgttaagatctattataataataatgttataatctaatttattataatcacaaatatagttaaaaaaaaaaccttatattatatatattttattttttatatatattttttgattttttttaaatataaatttatatgcatttgataaaaataatttatagtgtttttttattatattttatcaaatgtaaaaaaaattaaaaactcaagtatataagaaaaattctaagttgatgttgtttgttaatattaaaataaaatataaattattttttaaaaaaaataagagatttaataatatttattttattataattagtttattctaatttttttttatttttttaatatataataaataaataaatatggttttagtacaaaaaaaaattattttagtcttttaatcaaattttttttttctaaaagttggtttggagcagctttagcttctcaaaaaattcttcaaaaagttatttttttaactgcttaccaaacaaatttttatgacaactttttcaaaaagtagcttttagtttttccaaaagctgtgccaaaaaaaaagtatgcatattataataataataataataataataataataataataaaacaacaaaataaaacaaaagtatgcattgtggaaacttgattatgaactaagaacatcttcaatgtatattataaattttaggaattattacatagaaaatataaattgacattttatttacaaaaatacctccataaggtaaagacaatatttataccttttatgtaattttaattacaaaataccacttacactatcaccacttacacaatcagacgatggttgcagggtagttgctgcgtggttgcacgg

SEQ ID NO: 406570 - DNA, 517 bp, Cannabis indica
tatatatatatatatagaaatagagagagtgtaaggagggtgattgggattttaacttataaggaggttagttacttactctcttttcaagagagtatattcgatttttaataacccaaataaaacaaacatggcaggagttaaaagagcttccttactattcaattttttatgttgaatagtaatcctatttatatttatattatactatgggtagacccacgtggagccgagggagcgactacaacatatatattttgattaattataatatatatacttatatatataatattaaggtttattagtaatttttctcctaaactttgacatgtagtaaatcgtgcctcttgaatttttttggccattaaaaattcccctcgaactattgagatagttaaatttaaagacttttgtctaattcattcaattttattgtttcagtaattgtttatgtactaaacaatactccacagactttgatatctaccaaatcatgccccttaaactttgatat

SEQ ID NO: 406571 - DNA, 689 bp, Cannabis indica
gttgtcactaatttaattttattcacaataaatattgtgactaaaaacacattaattagtctcacaacaatttgtaatttttgtgactaatacctttagtcacggactttttagttacaatataaaaatgattatttgtaattagtcacgactattttacttttagccacaagttttgttgtgactaaaaataaaaaaatttgtggtgactattataattgcacacgtgcaaaattaaaataattatatgtgcaactgtatatttgaatcatatttttgatactgtaaattattcaaaaaaatttcaaaaataaacaagaatcaaaataattaatataattataatttataaaatcatataaaattaaatagtttacaatttctctttatattaacaacaaaatttgtcgttaataaaattgctattagaagagttgaatgatgctttcgtttttttattaggcgatcttggaatagtattgttcatattagtacttttagaacatcttattttgttgttgatcgtgttatcaagagtaacaatatttcttctgactttaataagtgatgtaatcttgaatgattgtcgttaataaaattgattaatgatttcttgtttttttaaaaaaaaaaaaaagtaaatacaaaagttgtcactaaaataaaatttgtatgctctcacaaaacat

SEQ ID NO: 406572 - DNA, 691 bp, Cannabis indica
aatatggatactaataggagcaaattaatgaaaattaaatatttatatgtacccgccatattttgttttttattttcaaaatggaaggcacattgatgaaaaaaaaaaatcaaaatgaaatgaaggtatgatattaattttgcaggtgaagaagactcacttgactaatttaattagtttttattttattactattatttcttttttatgtttaactgagtaaattattgggaaaaataaaaaataaaattcacattcattttggaaaagcattttatcattagacaaaacatatatgaaaataaaaattgtagggaaaagaagacaaataaagaaattaattacctcaagccattgtaaaatactattaggatacactaaaaaaaaaaaggaattaattacctcagttaaagttccaggcaaagttcctaactcagtaaatgaatctacttcatcgaatccctcaagaagtttaacctgcctcttgtaatattcagcaatttttctttgcctccctacaaaaaaaaaagtaaaaatataaaaggaaaaaacaaaaactaaagtagtgttcggtaaccattaaaaaaatcagttgtttgattaattaatcaaaaattatgaagaaactacaaaattttgttaagtaaaatttaaaaaaacaaaaaacaaaatggttcccgaacagaaccta

SEQ ID NO: 406573 - DNA, 507 bp, Cannabis indica
aaaaaataacttcatgataactataataaaactacaaataaactataactaaaataaccaaaaaaacagtttattatttttactgaaaatgtatttttgtaaataaaaaaatttaaagagtaaaaatgattttttttttattgatatatttttgtaatttttttttaaatttttagtgtcttgtttttaatttatatgataaattgtatataaaaggtactgtatattattgtagtaggatacatgggataataaatgtagttcaattggagtcctttttggatgtctaaatgttagacacacttaaaatggttattttgaaccaatttataaaacatggaatccagaaaggaatttttcaaaataatattattgcccttagtttattaatgatataattataaattttagggaaatttccatggtatactaacttttgttatttttttacaaaaatactgtcaggcggtattttttactttttactgtgttttttttataagtttc

SEQ ID NO: 406574 - DNA, 647 bp, Cannabis indica
gtatagttgtgtttttaaacttcctacacgttcttgactatctcttaatgattgattgattattatttttaatgattattcattgtctttttgcaggttctcgattatttgtcgacactattttccattaatttaattttttgttattctgattcagttggttgtatttgtattcaattgtagagtcgtttgtgtttctaattgtattgtatgatggtgcttgtgtttccctttctatcttattctactgtaactattacattttatgtttaatgatttatcaattaatctttttctttaattaattagtatatttttacttcatattgaacaaaattaatcttttaaatgggtaggcaatgctacttaatttttaattatcattgactcaaagctattttgaaggtcaccaatggacaaatgattctgtattatcgaagggttacggatatgttattaacaagttctcgatagttcaagcattgccaaaaaatttgtaattcttttttttttggcttgattctcatttaaatatcggtagattgtcaatacgatttatcttttggtggtagtcattaagtttacctattatcgagaagttatcgatatgttcttaacaagttatcgatagttgaagcattgcaaaa

SEQ ID NO: 406575 - DNA, 1260 bp, Cannabis indica
aatatcatatttttaacttataattgatgaacaattaaatatttcacaaattaactaattttaaatttgaaaatattatggttagaatatctataaaaaaatatctaggttaatttcaaaatttataattatttaatatatcctataagataattttaatataatatttcaaattaaaaggataatgctatctttaatttaaagtatatcctatattaaaatatctaaccttataattaaataatatataaatattaaagaaattaataaattttttaaaatctgaccataatttaaagtataaaataatcaatttttaaatttaaacctcaaaatatcacaaattaataaaacctattaaaaaaattaaatattatcaatttaaaaaattatatttaagttaaaatgttaaaattaatattttatttaaatattagtgatttgaaattcaaaaatctgaaatttggtgaaaaataccaaaaaattcaattttcgggtgaaaacaccctagctgccgagaagaggctactagcagcctgtacgcgcgcgcacgagaggattgtaaagtcttccgttgagtttcctcagtgcctgcagggtctcgatgcacatagtcgtgtttgaaggtaggttctgggtgaggtgaccaaagcttcagacagagattgtcctagcacgcgcacgcacgcgcggatgctcatcttgtccgaagcttggtgcgtgcgtcgtgcaacaactcgacaccgaatgcaccaaattttcaaatcgacatatctttctcgtttttaatcagaatcaagttttcataaggaatccaaataatatattttcatggaaaatttttgtaaatcacatacattcatcaaataacacataaaccaatatgagcacattcaaatcaacacaataaacatattcatcgttttaaatccatattccatgaaagcaaatcattaccatgactctgaggctagtttttgggaatatttttaccaggatctagatttactaataagtatgttgaattaacatcctaaatatgaatatctcaaaaataatgaaattaaacacataagggtttagaaaaccttacattgattacagcagaataatatgactctttcaactcaaatatctaaccctagttcctttctgtcgcagaatattatcaagatctaagcttggatctctttctttccttcgagttggttaccaccctcttacccacctatgattgagtacttgacttgatatgtgtgg

SEQ ID NO: 406576 - DNA, 856 bp, Cannabis indica
ttaaatttttaattaattttttaaaaaattaaaaaaaatttaattttttaattatgatacaaagcatgcacttaatttttttttttttttttttttttcttagatgttagatattaaactttttacaagttcaaaggtatatttataaagatttctttagtaggttctgaaatcatttactgttttgactttaaaatgtacataaaacctaacgatttgtcaatatagaaactgacaaagacttatgtagtatagaggaaaatttccaaaacttactcactagtagaggaatgttttcttaagtatacatatatagaaataaaaaattatgaaattgtgtcattaatttgaccatactattaaatggttgatatttgtgatacacataataatttgtaagtgtaaatatatatatatatatatatactagcaaaaagctacgtgcgaggcacgtatactaaattttatgctagttttttctatgttatttgaaagtgatacaattaaaaattaaagaaaaaatattattagttattaggtgagattattattatgtgtatctaaatattatagtttataatgttgtcaattaaaagtgaataccgaatgcaatatattagtgtttaagaaagcttgatgatttaaatatgttcttaagttaatccaaaaataaattaaaaattgatgttccaatacttaaagaaacattacttaaatgggtgtaagataaaaagaaaattaaaaatcaatctctaaattattgataattgaagatagcatttgtctaaaaattgtagataagaaaactaatgatagtcattggtggatttcaatcttcatttgcttcgatagagac

SEQ ID NO: 406577 - DNA, 879 bp, Cannabis indica
aaatgatgagctttgcatctcgggaaatgagcagtggaatgagaaattcttttgtgatgatgatgatgccattatatatatgtatggaatggtatgagaaaatttatagatgattaagtggatggtttggagtggatgtgaagagaccatatttatacacgtaggtctagatagaaggtcgaccaaactatttttttttccgggaagtgtttttttttaaaaaagtaatgatcaaaccgtgtttccagtctcaaaagttgagcattcattgtcttgttctttctcaagtttatcattccttttgatgcagcaaatcagtttccactaagaatgatggcatatgagatggaactcaaattttgtgattcccatcttgattgcaattaactctttgagtgttgaatgataatggagctgggaatctttaaagtgtacactattatatccacatattcgtctttttccctgctcatcttgctcgagaggacaggcccaatgttggtcactggggtctatttgaagaatacgttttctgtcagagggaatctgtaaaggtagtagattttgcatgattttcttcagctttttcactgctacagtttggttatatagccatgatggactattcttcttcaacatattgctgagtggccttgtcagtacaaacagtcgggaaacaaagttttacaaataattaatgatgcccaataattgtttgacctaaactttcgtgagattttcatttgggaatttaagtagttcatgggctatatgtggttgagcttcatattgtcctttggataatttcatcccaaggaattctatttgcatgtccaataatcattttttttttccaaacaacatgataccatgggcttt

SEQ ID NO: 406578 - DNA, 697 bp, Cannabis indica
attgggacttaagaaaagggcccaaaaaattcttcaactgccggacgctgctcgtaatatccctttgttgacctcatggtacaactttgtgaagtataagctttatcggtagactttataccccaacctgagaaggggaggaagaaaaagtccatgcctggccgggctgaggaagccgagcaggagaaggagcttattcaacttaagcgtgaggctaagttgaagggtcatgctggagccatgcagtatgctgtttaatattctaagtagaagaaggagggttaagaatattctgagcaggagaggctgcccaagaagaagaaaacccttccgaccgagcagagtccgatagaacatgctatttggatcatggagcttggccgatctgctcggccacctacccctgtagagggaaaaggaaaagccatcctgtaggagcaggaagattcttcagacgatgatgctccatccgtggtcgttcgggaaaacgctcctgctagcgtgcagagtacttcaacttgcacttatttttcttgatttttatgccttcatgtattttatgtcttcttttgactgtattgtttttcccgtgcagaaatgtctcagaagatgatcgaggccttgaagaagagagtagggggagctcgggcttgtccccttcggccaagaagtctaaaggtgatgagactccgtccaa

SEQ ID NO: 406579 - DNA, 1043 bp, Cannabis indica
gtaattttttcgacatctgatgctacttccggtaaatattccatgtgcttcattgtcattttttccacacctatttttgcacaaggcttctaaagcactcaatcgttgttataataggtaatgatcttgcagctaggatcgccaaatttattgattctgctacgtttgaagtcatcattgtgtacctttttgtagggcaatggttgctggtccaaacctcatgtccaattttctccaggtatggtcttattcgtttgtcaattttatctatttttgtcatgtagcgctcaaatgaggtcagcttgtacatttttgctgcctttacaaagtttattgtcagatcgtctccatgcactccaaaatttgttttgacgttgtttagcaggtggaagatgcatgctctgtggaagtggtttgggtagacattgctcaccgccttctctatacttttatgtctgtctaatattattgtcaaacctgctcatggaaaccagttttaatgagatcagtaggtatgtgttggaatcataatctaagttttttttttgttttttttttttgtaaacgtaataatttttttgttgtggaaaccagtttctatattttcttatttttgttttttattgttatgacataacaagtattttactatattgttgtttgtaattgtaacaagatgcatgaaatttattaaatatttacatatgaatttaaaattttagcttgaatttagatgaaacgaaactagtttttttgatagcataccttctctatctctgaatgttttccttagttttgtgaagaaccattcccaagaacagtcattttctgagtctcctatcccaaatgctagaacgaatatgctattgtttgcatccattgtagaagctgtgaatagagttcgtccaaatgatgttcttaaaaatgttctgtcggttacaatgactggcctgcaatgtttccaaccttctatggagtttgcaaatggtagatacaaatatttgaaacgatccttcttatacgtttccaattgtgcaattgtt

SEQ ID NO: 406580 - DNA, 521 bp, Cannabis indica
tgtaatggaatatgagtggtaataggaattgattacaatgtttggtttgtagttgcaatgaacattgtaatcagaattattgtgtttggtttggtataagaatgtagggacacaattttgtcccgtgatgtactttcacggaatgtattccgtgatgtacgatgggggagttatttgatctgagggctagggttgatctacgagtaattagggttaaaaaatggcaacgtaccctgagacccatctaatgtaccctgaaactcatctaatgtaccacggaatatattctgtgaaagtacatcacaggacaaaatcgtgtccctaagaatgtaacagaataaaatgtgtattaactaaaataaccctattccttttattataaaattaataaaatatctattcaaaaaaaattataaaatattaaaaaaagagtaatatagactgggaaatttgattttttatgtttacatttggttaaaattttttctctaaacaaataataactaatatttgtaaaatat

SEQ ID NO: 406581 - DNA, 544 bp, Cannabis indica
accaaataaccgacgccaaaagtggcgtcaaattcccttcttaaaatttttaaccctatggcgtcggttattaattattatgctgaaaaaagcgactctaaaggcttgttttgtagtagtgtaataaacatacttgtgagtagatctaagatcctggtaaaataaattccaacaataactcctgaccaaacctttttgacgagagaggggtcaaattgttataacaccttgatcaaacctttctgacgagaaaggggtcaaacaactttaatttttaatttaaaacctatctggcgagaaaggaaaatcaaaagttataactagcgcataaagctgaatactgatagcttgcgctaaaggaaagtattaaacgagacatcaaagtgtcttgaaaaaatgcgcaaatctaatatgtgggtagaagatctagctacccatgtaagcgatgaagatatatataaaatgacaaggtcatcaaaaatatatttgagtttgcttaaaataagatcatcgcgaggtagaatcaatgactgctcgcagatgg

SEQ ID NO: 406582 - DNA, 659 bp, Cannabis indica
tgagttatggttattttactgaatgaatttcatgacccagggcccaagttgacatccagcgcccaggttgacatcccagcagccaggttgacatctgacgttaacctgtacgtcgggttagtgcataaacatctaagagatgtactttaaggtgcctaagtgatattttgacgtcacttagtcagtttttgtgttctcgtaaggctggtcactaattctcggagataaaactgttttgtaaaaatgaaagactcaaaactcttcattttcgagtgatccagaaatgagaaatgcaaagttgtgaatttaacttctctgacttcatagatctttgctattgtaaaaaactagatgggcggtcgaagcggtatcaaaatcaaataaacagaacccaacgcaacaggccattggtaaacctgggcactgagtacttactctcgagctcttgggatctcattttttatacttgcaaggcttctgaacttgaggacaaggtctttcaccctatatttgaccattatggattcaatagtcgcatcagatttggcatttgagcaattgaaggcaacttcctaagctgattgtcaatctaggcactgggtcccgtttctagggacttgagtttgtggttttcaccctgagtttacttgaatcttcat

SEQ ID NO: 406583 - DNA, 704 bp, Cannabis indica
agaagagagacagagtgatgtgttcgtctttctcttgttcttgtgtgagagtctactttggctttgttctttctttttattttaaataataataataaaataaagtaatttgtttttttttttcctttttgtttaaaagcacgtgtttattgcatttgaataaagctaaatgtaattttcaaaggatatataataatgaaagggataattatatagactcgtggaggaggttgatgaagggagggcaaagcacctttcacgtccacatatatttaccataatgtcctttctcattttttctctctcctatttaattaacctgctgtggtgacttagtctactctttcatattcatacaaaggtgcgatctagctaagttttaaaaaaaaatgaaaaaaaaaaacttacatcacttttactttttttaggaaaataatttcactaagttttgttttcggttttttgttattgtaatttgtaagaaaaaaccccaacaaaactaagttttgttttctattgtaaatttaaagatcgtgggataattaatggttgaagatattataatttttgagaaattttatttacatttaaaaaattttaaacaatactttattttaataatttttattttatataaaatttatattttaattctactaaactttttttaatttttttctttcaactcatattcttaaaaaata

SEQ ID NO: 406584 - DNA, 968 bp, Cannabis indica
ttataaaattataaataaaacatctttttaaaaattctttaatattatgtcagatattttataaaaaaaaattatactataaataaatgagatcatatatgccctgaattaaatggacaatcctaaaaaaatatgtgtagttagatattaccttttggacacaaaccattaaaccaatcaagtatatgtaaatgtcatttgcttgcttcaaaatcatcaaactaattatatatagctctttttggctcattggtcaaaatgagataccacaccaacctacctacccatatcattataaatttaggtaaattatcttgagataatttgtttctgataatatataaatcaattatcatctcgaggccagaggttattacaatatattaataaaaataaagaaaaagaaaatataataaaaaaaaaatttttaaaaaaaaaaatttacaactttattgtttatatcttattatggacattcatggaaatttgatgagcattactttttgatcatagtgtgttttccatggctaaaaacctcaataatctctatcatttgatatcaaataaaataaaattatcatgatgtatacattatggttatttaatgagtaattagtgtgttgaaattgtcaagctgatatttagaattatttataattgaattgtttctttgtcaaaattaatattaagtatatttatatgtttataggtttatctattctcttagatcaatcatgctcatatagcaaaaaaatcatactcatatagacatgttatttttattttgtaatttagatcttcttagtcattatttagttcacttaaaccttttccgattatggtaactgaagttttgttcttttaggtactctattacaaagatctgtattacatgtatcatactcatatagacatgttatttttattttgtaatattatcatctaataattatttttgattaatagga

SEQ ID NO: 406585 - DNA, 551 bp, Cannabis indica
agagagagagagagtgatgatggtgatggtaaaagaattatttatattatatatatttatttaattatattatatatatatttatcctctttgaatcagtcaaaactgagtccttacattctctcctccttaaagaaatttcgtatcgaaatttcaaagtacaacctcaagttgaaaattaaacaggtgaggatacttcatatacatctcagactttaactcccaagtagcctcgtcttctctgtggtttttccataagaccttaactactgaaatctctctgttccttaacacttttagctctctcgcgaagattttgacaggttgttcttcataagtcacatcttcttgaagaaggatagcctcatactcaataacatgtgacggatctagagtatacttcctcaacatagacacatggaacacattatgaacatgtcccagctgtcctggtaagtttaatcggtaagtgacctccccaatcctctcgataacctcaaaaggtccaatataccttagtgttgggttttatgccctaaataaaactcttt

SEQ ID NO: 406586 - DNA, 759 bp, Cannabis indica
ttaataattaagtagatttttctgggcaattagttattaagatattctttaaaaatatttttaagttgaaaatttattaattttagatcaacttaaatagagatatttttaaaattaaggtgattagttcaagatacttaatttgttatttaattaaattttagaaaattatgtaagttaaaaattttattattttagaacaacttaaattagatattttttaggaatttatattattataatttcgaaattttatattttatatatttatgaatagattttcaaaattaatgtttggaaatttaaattaaagttgaaaattaaattttaatttaattttggaccaacttaaattaagtgatttttattgttaaaatatatagactaaaataagagattaattaaaaatacattttaattaatgagctttaattaaagagatattcgatctccattgttagttctacatagttcttattttagtgagattcatccctaatagatggatgttgattagcaatttaacaccgtagaacctcaaaagataagtattattgtaagtattttattcttagttacgaccattcgaatagtggctactaagagtaagacttacaaggtatgaaacaatggtagaagtataagaatatttttatttaaggaaatatatttctctttaaagaaataaatttctatttaaagaaataaataaataattaattttttgataaatgaatattttatattcattgaatttgg

SEQ ID NO: 406587 - DNA, 583 bp, Cannabis indica
ctaaattactaactaaagttaacgttaaacgtaaaaaaaagttaaaaaaaaaaacttttaacctaccctaaaaccctttaaaaaacgttagtaattagttaggttaatttaagtttagtaactaactagttacgaaaccaaaaaacctaaattacgaacctaaattctttattacgttccttttctttttctttactattattagtgtagtatcgtacactacttctttcttttctttcttctctttcttcttcgctttttgttttttatctattctttattttttcgtttttgtttcttatacttttatttttggggataagatcatgtcaacgaatgtgttgtcttcatcatctatttctcactttaagaaaaaatagtgtaatgatagtgcacaatatgaaaatatttgtaagagtcaataatggatagaaagaaactttcctttttataataaatattaaaaaaattatacaatccatcatttaaaaagaatgtaatgatacatttttatttgttttgatatttaaaataattttttagttaatttttttttatagtcatgtacgctataattatttaa

SEQ ID NO: 406588 - DNA, 718 bp, Cannabis indica
aaagtaaatttacatagttacactatgtattgcaaaagtactaaataaataccaaaacaagtcaatcaatatgaacattaaaaatattccaatcttaaacgaaataataatatagaagaagataaatgtattttaaaatctacagcttcaaaagcacaacgacatcaatagatttatgccaaaataaaataactttgaaaatctaaaaataaaatagtaaattaatttgtctcgttgagtagtgggttgggtgcacattcctccgtcgactcgtctgtcaatcatataacccaatttgcccatttgtttgtcgcactaaagtgtattgaagcaataactatatactagtttgtccaagctcgtgaacaatgggagtcatcttgagggttggatctgggaattgaggagaaagatcttaagggttggatctgtgtatttgagaggaagcagaagttctttagtgaagttgcgtatttgtcttaggagaaaaagaagaagatgatgtaatggagaaagagaagaaaaagttattttaatttttatttttttgtaaggcgttaaaaaagttattaattttttaaaaatctttaatttttttataattaaggtcatatgtctaaatttttttgatgttttagggagttttgttgtaaatatattaatactttgaatgcaaaaaaaaaaaaataaataaataaaattagctaaatgaacctta

SEQ ID NO: 406589 - DNA, 949 bp, Cannabis indica
gctcctacacacttacattgggaagcatgtaaaaagctacttcggtaccttaagggcacaattagagagggtattcatcttacacctacatctgaattgactctcaaggcatactcagatgctgactgggcaagctgtgtagatgatagacgctctacgggaggttatttggtattcttagggggtaatccaatcagctcgtcagcaaagaaacaacatgttgtggctcgatccagcaccgagagtgagtttcgagccttggaaaatgctgctgctgagttaatgtggatccagtctctactacaagaattacatgtccctgttcttcacagcactgtcatttgggttgataatcaaagtgcaacagcattggcagccaatccagtttttcatgctcgatctaaacacatcgagattgatcttcactttgtgagggatcaaattgtcaacaaaaaattggctgttcattatgtcccagctcatgatcaagctgcggatgttctcacgaaagctctcacaacataacgttttctctatttgaaatccaaactaaaaaatggtgtccacaccatttcgtttgcggggggatgtttatgaaaaacaagattcaagttctattattagttgttagttacataacaaaattcaattagttgttatttgtttttcttgctttttatcttgctgtaaaaaaagtactctgtactctataaatattctgtatttttattctattgtaaatgaagcttttcattttctgttttcatcttcgtctctctcttcctctctcaaaaaattcatctctcaattttacatatatatatatatatatactaggttgaagttacgtgcaatgcacgtttattttgttataatatataattttaaaaaaaatatatcataattttaattgttacaataattaatgtcttacataaattttatttta

SEQ ID NO: 406590 - DNA, 657 bp, Cannabis indica
gactcgagacgcgaacccgaacaagaaaacaaattttgacctagacagggacctaagacctgaacatagatgggggacccagacccgggaattgggcccccaaacttggagcaaaacttgggcctcaaaacttaaatcgggaattgagactagaccccagacaaaaacctggacctaggacccacctcagaacctgggatctgggacttgatgcttggacccgacccttagtcggtgtcaggatttgggacatagactagaacccgaacccaaactcgaaatcaaaccacgactcgaacacatacccagaccataacccacactcgccaaccaaaaccaaaacttgaattggaagcagactaggatcttggaatgggactgggaccttgacccggacccgaacctagaaacagaccaaagctcggaccctcaccgagatcgaaacccacctccctcgaaacccaaataaagacctgtaacccaaacttggactaaaactcgacccgacccgtaccccgtcgacttgaaactataatcgaaaccacgaagcggatcgggactcaggagcaggagcatgagcaggaccaggacctggacccagacccaaaaattgtgaccggactagtacctggactcagacacagacccaccaacgga

SEQ ID NO: 406591 - DNA, 499 bp, Cannabis indica
ttttttttttgaaagaactacaagaaaaaaaaaaagattttcttaatgtttacagtgtctgacattgtcatttttttttattgtttattagtattatagttgttgttttctgttattactatgacactacaaaaaattgctatttttagtgacaattttttagtcacaacacaatttttgtgtgactaaatgtgacttttagtcacatcaaaatgttacttgtgactaaaatatagtatttagttacaagttgtcactaatttagttggagctatcttcagctaccggagctaacaacgatcggagcaagaatcaaccggtgaagagagaaaagaaaagagagagacagcgggttaaagataaacaactttgaaaagaattagggtttgacttaaaataatacaaaaacatacactactacaagagaaggccttttatcccggtttttaaggctttttatcccggttttcgctaaaataaaaaccgggatgtatgccag

SEQ ID NO: 406592 - DNA, 663 bp, Cannabis indica
gacgactaatatgtcaattgttcgcatctcctaaatttattgctcattctaggcaacacgcctaaatcagcaatagatgaaatacttttcaacacaagggtcggtaactatggctgagattgttcatgaaaatgtaaattaatatatataatttctattttatgaaatttactttaattacaatttccttacaacttatatttatcaccaaggaaagagttacattgagacttgaaagattatcatacaaagaaaggcacaaatacctttgtcaatgaggctgccaaaaatacatatgtaagactttattaattaattacttttaaatatattcaaataattgtaagtttgtttagtttctaacttattcttattatgggaagagatggtgacaaactaaaatagtgcttctaaatctacataagtttctgagcttgagatacttcgacagactcttggagaggggcgtggccatgagtgaggagtgggtcgcaaattgaaagggaaaccatcaggacgacacacacaacctggaactactgatcaacctgacttacaagaaatagttgttagatgcaaagacaaatacagatgttgaactcaataatgtcacatgaaggtcgtgcacaaatggatgttgagatgaatgatgcagctccaacc

SEQ ID NO: 406593 - DNA, 547 bp, Cannabis indica
taggttaaactagtacaattaacctattacagttattcaaataaggcaaatgggccttcacaattgaggttgttcatgtgagggagggctgagttcagtatgtcgtacccactactaatggcccctaactctcacacaaggccaaaaggagagggatttaaccttaaatgaagaactgttattaattgaataggcccaacacaaattgggcctaaataaattctatcaatagtgatcatttttttagcaacctagtccatttgaattacaaaaattaaatgggctcctatatgcatctaagcccgaagcaaacatataggctcacacatgcacactaatttggatggatcgtattatgttactaggtttatacacagatgaaagaatattgcaaaatttacctgttacaaattatttatttgaactattggttaaaatcagatcattgaatctatcaacaagttaaccatagcaatttagatcaaacaataataagtattataaaacaagttttgataataaagaatatataaaacacacatacatg

SEQ ID NO: 406594 - DNA, 1111 bp, Cannabis indica
gaaccatgaagtggcattgctcccagttaagcaccaagttggttcttcacatcttgctaacactctctcaaaattctccaaacaaatcccaaaatgattccccgtagatagagaaatcatccatgaatatctccaaaatactctcagccatatccgagaaaatagccatcatacacctttggaaagtcgcgggagcattgcacaagccaaatggcatcctcctaaaggcaaaggtgccatatggacaagtgaaggtggttttctcttgatcttctggtgctatagaaatctgattgtaacccgaataaccatcaagaaagcagtaaaactcttttcccgccaaacgatccaacatttggtcaataaatggcagcgggaaatgatccttccgagtagcattgttgagcttccgatagtccatacacaccctccaacctgtcacagttcgagtaggaatcaactcattgttcgcattagccaccaccgtgattcctcctttctttggcacacattggacaggactaacccatgaactatctgaaatcgggtatacaataccataatccagccactttatcacttcttttcgcactacttccttcataacaggattcaaccttcgttgatgctcaatggagttactacagccagcttctaggattattttgtgcgtgcaaatcgctggactaatcccttttatgtctgccatagtccacccaatcgctcttttatgtttcttcagcacttctagcaacaaaccttcagcttcagcttccaaacacgctgaaataattattggcagcgtttcattctcccccaaataagcatatttgaggtggcttggcaaaggtttcagctctaactttggtggttcttggatggaaggctttggaggcttgaaattgctttctttcaactctaaagactcaaaagatctcttgaatttagggaaaggttgcatcggctcaacccaagcaacttgggtttcttcatcttcactcaaagcttcaagatcttcaagagagcttatcaccctctcatccttccacacttccttgtgaaaactttcagccacaatagaatcaattacactcaaacgtgaacattcttc

SEQ ID NO: 406595 - DNA, 584 bp, Cannabis indica
cacagtttgtagtaaatcatatgtccggagagtacgaggcctgagggaaaaatgatagcctatttaagcaaaatacatgatctgctcgcacaatttaagaagaaaacacaactgttgatgccttagcccgacttgcgagcagaaacatagctgataaggctaatttagtcccaattcgattcttagaagagcccagcatcacctttgtggaagaaattaaaatgattgcacagctctgaactaaatgacaccaatagcagcctacctcaaaactagagaacttctaaaggatagcaataaagctcgaaaaatgagaaggaaggttgtacggtatgtcctcgtagaaggagtcatgtatagaaagggattctccatgccactacttatatgtgttacataagaagaagttgcatgacttctgtctgaagtacatgatggattatgtggcaaccacgcagttgggcaaagcctatcaaagaaaatactatggtaaagatatttctggctgaccatgatgaaagatgcaagggcctatgtaaaggaatgttataaatgccaaagattttcatagataccccgtgcac

SEQ ID NO: 406596 - DNA, 681 bp, Cannabis indica
atattagaatgttaatgaaacatacttgttagtaaatctagatcctagtaaaatatttccaacaactggcctcagagccatggtaatgatttactttcatgaaatatgaattaaaacgataatatatgttgatttggatggtttcatgttgatctgtgtgttatatgatgattgattgatgcttgtaaaattttatgaaaaataattcaactttcgtttatggaattatttttgttggatagtttggaaaaattaagcaattcatttttttacagaacttaattttgattttatttgaattagttatgaatttttaaaaatcggaaaatatcagggttgccatcaccccccccccccaccacacgcgcgcggatcaccctttatttactcggacgcgtgctcattcagacaagcctttgtctgagttctctcggtcaggacagggcgacactgtctgaagaggaccttgggcgcgtgcggagaggctgcatgcagcctcctgcgccatgctctctcggtcagaatgcccctcatgtgggtgtggatagtatgcaatgcatactgtccgtaccacttacaatttttttcgttttcttcgatttttcatgttatttcatggaattaacttccaattttttgtgtacttttgtattttgatttttacttttcatatttcaaatc

SEQ ID NO: 406597 - DNA, 993 bp, Cannabis indica
cagtgaaggtcttctttaaataactagttcatggaacttccattgttgatcaatattctagccacaattttgttggtaatgggagtctctatgaccagagggtcatgatgagggaaacgcactagtttcgcgccttcctccgtgaaagtaattggccaatccatgagtcagggcctttgagctgggagctgggtgacttcccatacttcgtcatgtttgatggccctagcatagcgctttaattctttcgggttgtccccccaatatggggcccgccagagatcatggccactcttccgttgggtctaggtggcaggccaggggtctgttgagagattgatcctccggagggtacagctggtgccaatgctctgagcgtaccccctggtgtcccttgaggcactggacaacctgctggaacagggttgagatgaggtatctggtttttgatccattcatacaggtgacccaattggatcaagttttcgatctcatctttcagattcttgcactcattggtactgtgtccaatgtcgttgtgatattcgcatctcttgctgggatcccttcgagaactgtccctgtacagaggaggaggccttcggtagtgcgtattttgcctcgtggcgaaatacacttgctcttgcgtgtccgtcaactctgtgtactgggtatattggggagtataccccttttttgacgcttctcctccgtccggttgctgccttttgaggacctcttgctccgagagctttgaggagttccggttaggctcgcagtagaagcggagtgagacgggacttgtccgctcatccctgaggggttcccgtaatgcaaagatgcaggagccaaggctgggctctggttgtatcctggggtagcggagaactgtatgccactcattggtggattaatcgtaggaagggctcccaagagctgaactctaggtgcatattcggccattccggttggatagtatcctccataagccac

SEQ ID NO: 406598 - DNA, 681 bp, Cannabis indica
ctggatatcatttttggtgtagtatgtaatttaactgccaatacaattttacccaatagtattgattttaagcaaaataaataaagaacaacacaattgataattctattattattattatgaataataattactaaagagataatgattaatttattattatcaagaacaatattttagagctatataaatataactaacattcacgtaaaaaaaaaatatatatatatatatataaaatgtagatataaaatgtcaattcttgatttaacggattttttgggtttttacattaactttaacataatattttattaattaacaaaatattttttattagttttataatattattatatatatttaaaaaataaaaaatatgtagatattttatataaggaattttaattttaatttaaatattataaatattataaatatttttaatcatattttaaaatttattggtttaactttaaattaaaataaaaaaaaatatataaatattttatataaagaaatttaaatttaaaatattataaatatttttaactttattattatttattttatatttttgtaacgcccgtactttttcataaattactaatttaattacaagcgttaaaatgcgaaaaaactataatgtcgcttttacttataaacataaaatatttcata

SEQ ID NO: 406599 - DNA, 790 bp, Cannabis indica
agaatatcaatgtgataaggatttggataaatttataaatcaaataaatgatcacatgaaccaaataacacatttaataagtattgaaaataaatctgtttctttattgataaatgaatataaaagattacattgaaatagagttttatttaagtcacaaagcccaacacattcgtcctatccatgcgcgagctacattaaagggtccgttctacgctcatcctaagatcgaaggctcctcctccttcatttttctcaactgtgggagccacctcaaagcttcaactgtgacagtaagttattttattctctcactcttttgatccctctctgtcacaatctattttgatctttctctctctcacttaaccatctcttagattttgtatttcttctcaggcgtccgatggtggcggtggtgcgatggtgaggtggtggttcatctcagatcttaatattattgtattatattattgttaacgttgttatgagattgtagttgttggattgttgttgttgattagatctgagatatatctcaaatatgagatttttttttatcatgtcagtttaaaccagtggctatagtgaaaaaaattagatttttctttttatagtcgtcgattctaaataattgcaatgcggactgttaaggacaggcaactattatgttttgttttgcattgatggcataggcatcagtcttagaaattaaaggtaataataatatctgactgtttaaatagtcgcctaatgtatttttttagttagtctctctctctctctctct

SEQ ID NO: 406600 - DNA, 703 bp, Cannabis indica
cttccatagttagtcaacaagccagctgtagcgcaaaattccatgaaggcctcatgaactaaactcaaagatttggcattgtctttgcaaaatataataagattatttgcgaaacaaagattgaccatctctagagatttacacataggatggaacccaaagctctaagcacaagaggcagacctctttgttctttgaaagagtcatagaatctcctattcaccattaccgagtaagaagtaccacttaagcaaaccaatacccaacatacaaacttttggggagaacataacccttttagaagatcaaccaaaaaattccaattcacaatgtaacgccctaacaattaggcacgttaccctagctatttaagaaacactaatcccctaatccaggattactagaaagataagcgcggaaaaattaaactttaaactaaaatagaatgaaattaaaacttgtaacaacattaacctttacaatcaaaagtgacaagtttcgggatcccaaaaatctcttacaaaatattgtaagtcttttcactagccgacctaagcggcaaaatagagttacaaaaagtacatcgctggtagaccccaacccgcttggtctagtatggcccgaacatgtacatacatcgcccagctctcgcactcatggctgatcagagacagatttaccctttcctgcacagtagagcacc

SEQ ID NO: 406601 - DNA, 567 bp, Cannabis indica
tacaggctccatgctgcacgatcatcgtaatattctattcgtctactcccctccttctgttcagatcattccttaagtcatgggttgtccctaacctttcgaacacagaagcgcctggttgccttagcgattgattcgcttggttaacgggtggaatggcaccattaatctggttggaaccatcaggtatgacttctcttaatgaattaccagacaaggtttgctcgcctaccgctgggcccacgagcggaactcatgaccggggattaggcggctgaccatttgtagtctgggaagtattcatcgttggatcttcatctattccacccaggggaatgacatttagtggctattgacctatagtttgataggcttttcgtatcagcacggaagcctaccaactacggttttcgatctcttcatggtgagcccttaatgcctccatctctctatccctccattcggtgaaaatgctcctttattcgtcgaatgcgatatttactgcagcatgcagttcgtcctgatcatgatgcagtgtgttgttatgattctgcatgagtccaagag

SEQ ID NO: 406602 - DNA, 525 bp, Cannabis indica
taaataaaaattatgaaggtaaaaataaaaaattaaaattatacataataaaattaatttatagaaagttgaggatgatctcataagaccctccaccacctggctgcgctagatgtaagtaactactaacatatctaaaaaaaaaaaaaaaagaacgttatgtgcttactaaattctatgagtctatgaactacgtgcaatatctaatagtatataatagaaaataacataaaaattatttaacttgtccttagataaaatagtaatgaagtaattatatttatttattattaattagtaattaataataattccttgatgtaatatttacatatactctttcttactaggaatattagattatattaaattatgggtgagaaacaatagtaccttgtaggaatttgtatgccactatttttattttattataatgggagatagtttctcattataaaattaattttagaggggatattttagctttgagaaacaaaaaatatataattttttttttaaatacat

SEQ ID NO: 406603 - DNA, 696 bp, Cannabis indica
atttgatttgagcctgagtaagcatccacaaagcttaatatttcgtgccatgctgttgcatctacaagctgatcgattcttggaagtggaaaacagtctttagggcacgccttgttgaggtctgtgaaatcaatacagactcgccatttcttgttcggcttgggcactagtacgggattcgcgacccaagccgggtaaaaagcttcaattatgaagttggttttgcgcagcttttcaacttcatccttcagggctactgctcgttctttgtccaacagccttcgttttgttgaactgtccaacagctcgattctgaccatatctgcatgtgaccaggcaaaaacgtctaggtttgctctcaaaaattttatcaattctgattttacttcgagcaacaaaccttttttgagaaacatccacatcttcatccctgccttgggaagttccctacttgggaatgttttttcccttgtatgtgctctggctggaggatacttccttcttagccttggccactgcaaggttataacattcccgtgcagcctgctggtttcctctcaaacaccctaccccattctttgttgggaacttcaggcacgagtgaaatattgatgtgatagcctttaagtcatacacggccaggtggccaagcattacgttgaaagttgaaggaacatccaatattaggaactgtgc

SEQ ID NO: 406604 - DNA, 654 bp, Cannabis indica
tgttgtttttataataattattattaagtatttatacacaataatataaatttgtttttaaatatttaaaatgtaaattttcatttaaattaggtttgattttaaaaatttgttcttattttaataactaatatttattcatatttagtcaaattaattcttataaattccttacaaaaaaaaaatatatagttttatttattttaattatcttatacaaaatataaaaaaaaaatattacatccactcaattgctactcgtaggatgcacgtggctaaacactagtgtatatttatatatatatatatatataaatttattggtttaatttagatttttttaatattttagacatagtattttttggatctaatcagatccattcaacattttaggtccagtatgtattggattggattggatccatccaattcaagaaaaaaaattaaaattttaatattaattttcatatatacatatatactttagttataacaatataaaatctaactactcatcaaaactaaataaaaatactaattagttccattagatgctggatgcattagatttttggacaccccatccaacatccgatccgatctaattggatatttaaaaataacatccaatctgatctaatcacaattaga

SEQ ID NO: 406605 - DNA, 598 bp, Cannabis indica
tatatatatatatacattttcttaatattcaacatcatcagttacaaattaaactactcaatagtgtaatatacaaaaattgtcaaacaaatagacaaaatattgactttttaatatattttttttaataattaaataaaacacaattttttaccaaaaaaattaaatttttatacttacagatttcttttttatatttttacaatttttttataaaaacaacacaaaaactacataaaagtaacagaaaaatatcattcaaataacaaaaaaaaaacaacagataacaaaaaattaataacaaattaataagaatacaacataaaaaaagtgtattttctataaaaaaaaattacaaaaatcgtaaaaatatttaaaatttcgtacaactgtatttttatttatatattttttatttttacgtattggaaataattccttcttttcgtttcatgggggaaataaaaaacctacaacaaaaacttagcagtttcaataattattgcaataacatttttttaaagagataaaaatcacacaatttatgaaattttcaattagtgtaacacatagtttaatttcaaaaaaaaaaaaaata

SEQ ID NO: 406606 - DNA, 572 bp, Cannabis indica
gaaagacaaagcacatcgagattgactgccatgttatccgagagaaggtccacaaaggcacattgaagctaatacatgttaccaccaaaaacaacatagcagacatttttaccaaacctctttttcccatttatttttatgttgttgaaataaatccccatattcttgcacactgttcatattacaaatacacataaattacaagcaataaaaaagacttatgtggccttcagcctctatttaccaagacaaagcagttaaagttagttacaaaagtttagtaatattttttgtaactaactctcctctctttctgctctaatacaacaacatatatatatttcagcaataataaaacacagaggcagaaaaacacaaactcagaacagtactacagaaacagaaaatcagaggcataacaatatacaacaaaatcagatctagttttacagaggggaaaccgactggttttgggggcttcttggaagaggcttacaatggtggaagctttggaaccaaggtggtggttcggatatccaatagccaagggtgtgttcatgcaacaaagaaga

SEQ ID NO: 406607 - DNA, 542 bp, Cannabis indica
atattttaaaatattataacaaataataattacataagatacctatttttgtaaaatatttacatttttacgttcaaagaatgttttttatatatatattttacggttttctaaaaaataacacgaaaccaacataaaatcaataagaaaactacataaaagtaacatgaaaataacatcaaaataataataaaaaataacttacatataacaacaaattaacaacattttttttttattagtgaaaccattgagcaaaacaccaaacagcaggcctaacggccaaaagaacccagactagctgggagagaaacatcacaaacaaactacaagatatccaagaacactaacacaacaaagacaaacaaactgcagacagcagagaaaaaaaaaccagaaaaacagaaactaaaactaagaccgaaccagtaggagaactaaacagataagtgaccatctgcagcaatcatctgcaggaaatcatcaaaatttggtacatccaaaacgccaaagatgttgtttcggtttgcccattgagccac

SEQ ID NO: 406608 - DNA, 817 bp, Cannabis indica
catctttactaataaataatgagaatagtaaggtagtcattccctaatacttttttatttaatttattaaaattaagaaagggagaacttgattaaataagggataaaagaataagaactaattttttaaggaatgcgcttaacggtaatgacttttatttgtttttattttattttttaatattaaatatataatgataaattttttccttaaaatatgtcttacaaaatatgtgatgattgtcagcgaggcaagcgacagaagatgggcggtgctgacactatgatagagatggggtctatcatgttaagagtggctactcgttggcatggtcacttcaggttgaggagggtgttgcagactcatccaggttaattcgatggtggaatggagtatgaaatcttgctatgccaccaaaggtaaaagtttttatttggcatatgttccatttgaagttactagttgcaactcaacttatctcctgaaatgttcaggtacctcgttgttgttcacaatgcagagaagtaatctgatgaaactccttagcatagctcttttctcctgctctgcttttttttcggtgcgacactggttggggtgtggtcggtgctccatcgatgtgtacatggaccaatgtaggaaatcctcctatttctctttgataggttatctcatgatacttttgaattgatgatgacaaccctttggtggctttggtatgatcgaaactcagtattatttagtaataagcagtcaagactagatgttgttccagatttagaccataatcctgtaacaccctaactatcttaggcg

SEQ ID NO: 406609 - DNA, 541 bp, Cannabis indica
gtttatatatctattctatataatatgtcgttatataacagaattcttggtttatgagaaattattaggcgactttttttaaaaattaaaaaaaaataacaaattattagatgttgccacgtaagggtcagtaaacctaaatataattgattcacctaaagtgttgcaattcataataaatttgttcatattgtttatatttttattaaaaattattttcaaattttgatatttagaattagttaaattttaaatattattttaaattaaatttgaatattttgatagtttaaccagataagcattttcattaattgcgaagataaatttaggacgaataataatttgtttttaattactattacaaagtataatattaatttttgtttttattgaaatcactattatgctttaaaatttcaatgattatcactacattgaatatttttaattgtaaaattataatattaaaaaaaattaaaaattaaaataaaattaatcatacgtgacttggcacgtacatctatctagtaaatatata

SEQ ID NO: 406610 - DNA, 668 bp, Cannabis indica
ttaaacatcaaaaaatatacaaaaaatttaaaaataatactatttaaaaaaataatattatcaatttaaaattgatatttagtttaaatatatgaaaaatatatttattaattttagggtttgaaaattaaaaaaatcgaaatttgggaaaaaaatcccacaaaaatcgaattttggtgttgctggctgcccaggctgcacgtgcagccataggaggctgcaaatgggctcggacgcgtgcggaacagggggcattgcaggggtcctgtgtgcggcacatctcgacgcctgcagcatgtgacacgggcgagcgagttgtctgaagacagcgtgcgtgcgaggaaacccagcttcagactggattttgtctgagctccgcgcgcggaagtgtgccttgtctgaagctcctcgtgcgtgcgacaccaagcttcggcagccatggcacccgattttcaaaccaccataacttcctcaatttttatcggaatcgagttccgtaaaaaccaaaattgcttaatttttttacaagaaatcgaaataaaagattttttgaaataaaataaaattattttcatggaaaaatttcgtaaatcacatatattcatcaattaacacataaaccaacatgaaaccatccaaatcaacataaacatcgttttaattcatat

SEQ ID NO: 406611 - DNA, 721 bp, Cannabis indica
gtctgtatgagagttcgagtatcatccattttggattttgagtgtgcaccatagagctgctccagggcatgccacagtcctgctgcacttgttgatcccatcacttcagtggctatggtttcagtcatagaactgtacaaccagcccatgagtaactggtcattgacaatccagttctcaaactcaggattgagagttttgatagttttggatccatcttcagtggaacctgtatatacatattcagagggacaaacattagtaccattcaaaaaaccgtcaaggcgatgacctcttactatagtggagaccattgtcttccacaaactgtagttgttcatgtcaagctttagagaaaatggctgctttaaggtactgaaatggtgtgggacatggagctgagggttggtggatcttgctcctgtatttgtggaaacggcagcagtgacagtagggtttcctgcatttgattgcgcctgactattggttgacatcttggctctgataccaagtcaacttttagagatattgtaaattgatttcctcggctcaatttactgttgagatttcgatttctttatatagaaagagagggccaagggccaattacaaacgtgagcaattagctcaaatagaggtggcagaaattaggtaaaagagaatctttttcaaatacaatgattggtaacaaatcataaattctaacggtaaatatcctcct

SEQ ID NO: 406612 - DNA, 747 bp, Cannabis indica
atagatctcgaccttcacgaaatgggatctagtgatgatgagggaaataaggcctatgcagaaatcaaggctctatacgtgtagccggtctttctcaagctatgtgtagtaggtctttttccgagctacgtgtagacggtctttttcaagctatatgaagatggtctttctcgagttcattggcttcccctctcatcataagcttaggagaatgacttaatggttttccccttgtggcatttttcttatcttaaatgccttgaactatttttattcgaacttaatacaattgtatttgcttgcgttattattcacaatgtaaaccattatattttgattgaatatacaacacttttgggtttttccattgctcataatcttcttctttaagtagttaataatctaccaaactttatgatttttaagcggttgtctattctgcctcgcagttgcagttataatctaccttaagcaaacttaaatatactttaaggattttatctctttgtatatttttaattttctcacatgaatagctatattatctattcgttttctaggtttaagtactttatcaaggtgttgtgatgcctcgtttagtactttcctagctcgcgagaaccattagtattcagttttatacgcgagttataactttgtattttccactcctgtcggatcaatattattcaaagttgatttagaatgagttgcaaacgcctgaagcgtaaatgaataatgtagaaa

SEQ ID NO: 406613 - DNA, 945 bp, Cannabis indica
cttcctgcccccagtgacaaatctgatgcagacaattcctcactcaacaatgatctttccacagatgtcaacagctgatttcattgttaagccaacaactcagccacaacaccaatcccgaacctgctgtcatgacccctgctgcatcaaatcttgcaggcaatactcgatcttttacttgggtagttgacagtggttcctctgtttctctctctctctcaaattctcataaaataaaaaaaataaaaagattaaaaatttcattatatggtgtaaataattctaaaacattcataatgaatgaatgaaacaaaacccatccaaaacatgtttatagaagagaaatttatacaatatacctaaaaccagtaagtttttttttttttttttacattctttacgggctttttgtttactttttttatagaccttttttttatttacatttttatatttatttgttttacagattttcactttttttatatagaaaaatgttgattttacattgctttcttgttgcggcaaagtcaaaataacatttgtctgaaacaacagaaaaacaatattttgtgtagttgtaaaaataaatcacgttacttttatgtagtagcaatgttaaaatagtattttttttttcgaaacagcgaaaaaatcacactttatttttgtaaaaaacaaaaatcgtaaaaatacaagaaaaaacaacatatctgtaaaaatataaaatttttgtcatttatttatgaaataatcccttatttgaattaggaataattacataaggcaccattttttgtaaaatatttacatttttacgtttaaagaatgtttttttttttcatttttacggtttttaaaaaaataatacgaaaacaacataaaatcaataagaaaactacaaaaaagtatcatgaaaataacatcaaataataacaaaaaata

SEQ ID NO: 406614 - DNA, 387 bp, Cannabis indica
tgtaattacgatattatgtaattgtaataatgtgagaataaatagatatatgttatatttggtgactcacgggtgctatatggtgcaggtaaagggaaggcgaaagttgagcaaccatgagtttgaaggtcgtagcagcaatgtacatatcaatcgcggtgttacggcccagtgttcaaagtgtttcttttgattgtatttatgggaatataaagtttatgttgtaaaactacttttaaaccagattgtaaatattttgaaaacagggagaccccaagattaatactacttatcttttataaagatattttttatgtttgttataaagttatcaaattttaattagtcacactttcagtataatcttataaatcaattgaaaagaac

SEQ ID NO: 406615 - DNA, 672 bp, Cannabis indica
ctctttttttattttcaagttataccccatatactaattttttaacttttttttttaagtttacggtttgagtttctaaagtggttgcagcgctagttgcagtagggattttctgtacaattttttgttgtaatttaggttgcagcgctaattgtaataggggtttctatgcctaattccgtaaaaaataaaaaaaaaaaaaaaaccagttttgtaagtgtaaaaatagaaaaagacccctaaaatatatactatgttctatatttataggataatacttattactctaaacatatattttattaatattttgagattttaatgattatttatttgtatatatacatatataaaaatattataaatttttacttgactaaaaattataaaaaaagactacaaaaatatattaatataaataaattttcatttttatagtttgaatttatttatttataaaaattagaatttctgtttaatatgtttttatttattattttataattttcattgagatttagtttttttttttttgtttattttgtcatttcataatttatttatagttgttgtgagattaatttcatattattttttagttattttttaactttttactgagaacgtcgtattttgtaattttgaaactttaaaattatatttttgtatata

SEQ ID NO: 406616 - DNA, 634 bp, Cannabis indica
gacaagagagagagagagggtaagctcgacagatcaaggatagtagggagaactgggtttcgggtttcgacactgggagatttcgaattttttgtctacttgtttttttttctgctctgcatattagtctttttttttttttttttttactaagatttgagctaacacagagtcaatgttagctatgataacaaggctgaagtactaaaaaaaattaagttttaattttttttcttttggatttcaatcttttaccatttttttattaatacccatttgataattagctttaaaagtatgttttatgtataaaattttgcaaatcagataaaggaggttttgcacagatgtggcagagaaagagagtgcagtaagtttagtttgataaaaattaagattttttaatttaattttaattttttttaaaataaatagaaaactaaactgggtgagttttggtggtcgattgtggggtggggtggctggggttaggttggggttggctgggaatgtgtaactcccttacttacgtaaaatagatgccataaataaactggcgttaagatactaatgttacctttatttttaaaaaaaaaataacaacaattttcaaaacatgggtacccagttaaaa

SEQ ID NO: 406617 - DNA, 576 bp, Cannabis indica
acaagaatttgggcttcttttgattacgcatgtcttataggaactgaacggcccatgggttcccaagcccgcagtagttccaactaattgtactcatggtgattggtgggcctgagcaccagaacccaccaatttgccgttttttgaaagcccatcagaacacacagtatcattactgtcttggtccatcaccttagttatatcatcaggcccaccatttaaggttaggcccacccgtcgccttttcaattctgaaatagataattctatatcaaaggaaaacttgttattatttttctttaaaaagacaactggctcatttatgtcaagggttgactgcatggcaacattttattgattatgttggtcacataaatcgtgcctagattcatggtaaatatcttccatgattttctcaccaattataggttggaaattagagtttgcattaactgtatcggaaacaacatgattcgtcactggtatgctagggacgtcagtcggaccttgtgggagccatggagatgttgtaagaaaatttcttccttttggtggtgctttcatgaacaatccata

SEQ ID NO: 406618 - DNA, 508 bp, Cannabis indica
tatttactattatttttaataaaaaaattagtttgcaattttttatgaatgatttttgtactatttattgttttttttttatcttttatagtttttgttttctttataattttatttttttaaatgaaattttatacttgctattgtactcttaatgtacttaatgttatatatgtgtggtattcaataattggttagtaaccttttttattttttttttaattttactctatatgaatgatctttgtactatttttttagtaaaaaaatttttgtactgtgataccttaaggtgctcaataccatactcatgtggtacccaataattagttagcaattttctaaattatttatcaaattaaaatttgtgggagctgatattgaaatgcaccaataattgtatgctatcttaatatttttgttattaatatgtacatatctttattaacatcgattaaaattttaattttttaaatctaatatgttaatttaattagatattttatca

SEQ ID NO: 406619 - DNA, 875 bp, Cannabis indica
ttaagaatgactgagaagataaagataagaagaagagtgatgataattacatttacgttttattttcttggtttatttcatttttcaaatgttaatagtatcatttcttttttctattattatttattgttttttttttttcagtttctattacaaaatggccatacttagtaattgtcaaaatatttatttattcatgtattataataaatcaatctaattttttgtcatgataaataaatctaattgaaacctctattttgaacaagttgtattagtaattgcaagtttaaaacgaagttaacaacaattttaaaataaaatttacattgataataaactccttaatttgactcttcaatgatatgtcttatcatgaacttcttaggttggatgtggaccataattatatgaatattaatcacctaaccatatatattcccttatttttttatctatcacaattaattcatatcataaaactctatagtaagattaatgagtggtatcaaaatagaatataaataccttaaaaaatccacacacacgatcgattagggaatcataaggtaaagtgattgtccgtagtcccgtgatccataagtagaattaccgcgtaagctatgcaatcccatgttgcctgtgtaaggttaagtgtgatgattctgagactgtataggtttagaattgcacagttaaagaagacttaaatggattatgagtactacctatatcaacatggtacatcttgttttctagtaactcatcacttaaaaactctaaaattaatcgtgtttgacttagagtaattttagaataggtaatctcttgagaagtttttttaagaaggcgtgccagtaagaacaaagtacgat

SEQ ID NO: 406620 - DNA, 841 bp, Cannabis indica
acataaccacattttatatagaaaaaatcaataaaagtacattaaaatttgttaacccttatcctcaagagtggctctaacttggcacttcatagaattttatagataggaaaataaaaaactaaaaatgaatgtgagtttggaagattttatcattaaaaattcaatttgtgtgattaagtgtcacaaatcgtatagttcaataatattatcatgaataatatatatttgatattcaaaattttcaattaattacttttaattgtaactaccattattcattttttttatagtttatatggctcacattttaggataaatagaaaatcactctttcgaaatttcatcttatctcttctcttcttgtacttcttttctatattatattttaaggtaaattgcggcataaatacttaatgtttcagattttatacacttaaatacctaatgtttatttttggaggcaaaaatacctaatgttctaattctcttacaccgttactactatttccgttaactcataaatatagacacgtagatggttcagatgcattacatttatttttattttattttaatacttaatattcttaatatcagaaactaaatgctacttggtcaaaaaaaaaaaaatcagttctcataacaattttcacaagatattggtacttcaattcgataatcatgttccatatactgcactggttccctcagctatagtaatttatcttctttttttttaacaagtagtatttagtttttgatattaagaatattaaattttaaaataaaataaataaatgtaatgcatttgagtctttcacgtgtctatatttatgat

SEQ ID NO: 406621 - DNA, 543 bp, Cannabis indica
cggcagtatgatggcacctgctgcaagtgggtgtagaacggtgtccattccttaggaaaagtaatactcatccacgaacgttccctattttactcacctcggtattcgtggtcgcccgtcaaccacttctcctcgatctaacgaaaatagaacgtaccccgatctgctttgcgttgggacttgacttacaaatcaaagagccatctggtgtcatggtggggacggatccaccccatccttgtgaggcaagtaaaggatgaagtagggcagataagttatttgatcgcccttaggagtaaacttggtcgggctaaggtggtagtagcctatgatcctacctaagtaagaaagaaaggatgacattgcaccctgcttggtgtgagcgcctaaccaagcgcagtaaccttcacttagactagtcgccaactagttgggagagggaaggaagcattcgacatattcctcagtgacatagtcttcaccggcctctaagaccttcccggcctcaaacacaggttgtccctctttgttgaagccaccaaa

SEQ ID NO: 406622 - DNA, 797 bp, Cannabis indica
gtagtgttagatataataaataataaaaataaaaaaaaatagacaagatatatatatatatatatacagaactatttcttggttactactaaataaatttaactataaatattaattttaaaaatattaaactattaaattaaatttaaatctaatagtaataacgaataataaaatagaaatttaaatttctaggaaccaacaagaatacaatacatgcacataaaatctatgatagtgatgatcatggttttagaagaaactatcttaatttatttgttcaatcatagatacttatattaaaataatatattttgttgtatctattcttatacacatatttttgtgcaagtgcaacaactaaaaaaaaaaaaatcttatatgtatttgaatttactttttagttttaagtatatatattttcaagtaataaaaatatgtatttggattttgtttacttttttttttttcctttttctttttatagagatgtatgtatgtatttggatttgttcctttttttaatgaatcatgtttttttattattatatatatgtatttagaattgatttatgctttaaattatgttagagtatgtactatgtatgtttatattggattttgtttctatatattttagttatgtgtgtgtttttttaataaaaaattatatatagttgatattgatttttaattatgtgttttaaagtatgcaatgcaagacatataattttttttttaagaaaattacactgcatattttttttttttaattttgatgtcatattaatatatac

SEQ ID NO: 406623 - DNA, 636 bp, Cannabis indica
aaaaaacaaacttaaaaatatattttaagatttcttaaaactattttttttctcgtttggattcttcaacttacatttattgaaatctcgtctctcattcacgattcaccacaccaactagattaccgacccccccgtgccgctgacagaatccattgattgtgaaaccccatctccgcccctacgttactctcttctctcgctcgcccaagtctcgacatcaccgactccctttctctttcccgcccttatggatgtgtctccaccactggcttcatctcgtaagtcgtccttgcttgtctttgtcttcgtctctctctttctcggctccacctccctttctcactctttttatttttatttttatatttttacagatctagtttgtggtgaaagaaaaatgtgggtttaattaattttttttaaacttcgtggtgaacgacgaaggattccgaaaactacagggcttggggttcgaagcccgatgaaggccacggtggccttgactctagaaaaagatgaggagatccgtggtgtcctccattttcgacgataatgtttcttcggtggtggaagaacttcccaagccagagaaagagatttggggcttagagatttaatttctttctacacttt

SEQ ID NO: 406624 - DNA, 918 bp, Cannabis indica
gatagaatgacattaagattctcaatgacactttaagttcaagtgcaggccactttaaatttatatagtgatcagatttaacgtacttgtattttcattcatgaaatcaaacaataacattatcaaaatgaaagcaattaataaacacactataaaaaaaactacattaatataactattggcaaaatattaacaaacaactccatggccaaacttaaacttaaaataatacaaatacaaaataaaatctaaaataaatagaaaaaaatacaattatttatgtcaaaaacactaaaaaaaaatctaaatctaacaatattctaaattagtaaacctgccactaatataacaacaaaataaataaaatatatgaaaccctagaatcaaactcacatgtaaaaacactaaaaagaacagaggcaaaatttctaaattagggcaaaatagaaaagaaactaaaatgaaaacttaggtatttcatcgacattcttcttaatccccttcttaatttttggtatagaactcttatcacgttcactcctcttcaacttctttttcaaatgaagaccttcatgttttgttaattactagttcaaataaaatcttcttcagagccgtctttccacaataattaggggtgttcattggatcacatctaatatttttaggcctatccacatccgatccaattatatattggatgttagatttcaccaatattggatctgatccaattaattttagtcatccaatcgattcaacatccattggatgttggattggatcggttctatctaatgatgtatctcatatatatttattattttaatttaggtttatctaatattttagacttagtattttttaaatcggataggattcatccaatattttagatccagtatatattggattgga

SEQ ID NO: 406625 - DNA, 1114 bp, Cannabis indica
gtcaaaaaatgtaagggagttcctttggccataagaacaataggaaggttattgcagcaaaggttatggcagtctggagacccacagaaggagttgtcaaggtttttgaatagtgagtttgcaaaaatagatcaaaatgaaaatgatatcttgcccaccctcaagctaagttataatcatctccctccacatttgaagcattgttttgcttactgtagaatcatcccaaaagatcatgaaattgatgtgagggagttggttcgactatggatgacacaaggatttataaaatgctctgataacaaaaaccaatcgctagaagatattggttatgagtattttataaatctactgtggagatcttttttccaagaaccacaaactgatgaatttggtgatataaggacatgtaaaatgcatgaccttatgcatgatcttgctattaaggcggcaggatcaaatagtgtcataatcgatcaaaatcctaaaatttctaatgaaaaatgtctccatgtgtcattagtaaattttgattttgatcttgaacccaacaactcattggagattttcgaattcttttctcaacaaaaaagacttcgaactttacttttgtacaattgtgtaagattgagcttctcaaaacttgagaattttttgtccaactttaagtgtctacgagctttgggtgtaccttctttgaatattgaggtattgccaaggaatttgtgtgagttggaacatttgagataccttaatctttctcgtaattctcatttaaaagagcttcctagctctttaataagattacagaatttgcaaactttgaatcttaagaattgtaataggcttgttagattacctcagaacatgaagaaattagtcaacttaaggcatcttatgattgaaggatgtgatggattgagagagatgccccctgaatttggttatatgagttcccttcacacattagatagatttgttgcatctgagtccagtgagtttcatgaattgaaaaaccttattaacaacttacatggaagcttaagtattgaaagactcaggcacacaacaaactattctgcatcaaaaacaacttcaaagcgagtcatttgtg

SEQ ID NO: 406626 - DNA, 690 bp, Cannabis indica
gcaccgcaccgcactattttttgcggtgcgatttctgcagttttttagttttgtggtgcgggtgcgatttggaaaattggaaaaacagcatgtgcgacttagtttgacaaaatggtcaaaaactgccccacccgcatcacgaacactcctattgaaagccatatttggaggaggaaaccagaatcctagcgagaacataccaaataatgctgctccttaggataataatataaagaaaacgaatccaaaagatcctgacacccataatcctcctaaggataaatggaagagaaaagtaggagaaacttccaagaaagctactcctaatgatcagcaaaagagaacagatcctgacagccaagctcctaagaaaaataaaggaatcaatccttcagggcaaggtcaccgaactgattttaaaggcagagctacacataatctcatgctcaggaacgacaacccagccccccaaaaatgacaaaaaatcatttggagagttctatattttattttattttaataatgattttttgatgtaaattttgaaatatatttatttcaaatgtagatattttgaaatttttaattttaagaattagattaaagttgaaaattaatttgttaattaattttatatcaactaaatcaagtaattttttattaatgattagttaaaataaatagacaaaa

SEQ ID NO: 406627 - DNA, 609 bp, Cannabis indica
ttgaaaattaaaaaaaatgaataaagggggataagagtttcgtcgaacagagaattgaagagggtttattttcgttcgtactgttttaatttataaacttaaaatatatataaacatatctgataagttttataataataatataataataaaaaaatgttattattaagagttatcttatcatttcttagccactaaaaaatctttacttttagggctgtaggccaaattccacatactcttaattatcccaatacttacactatcaacttatcataatattcctgccaaatctattaattaaacccattatgacatttttggcctcgatcgagtctccaaggttgccaaatctaaaaatatttttattccacaaatagctcatattacattcatatatgttatataaatctctgtaattaataaattacccttatttatccacttataacagatttaaaatttatgctgaaatagattagtgagcataatttcacttattacttaattaacccataacataaatataaaccctaattatttaccattaggattatcgggatattatcaccatcccccaccttatagaaatttcatcctcaaaattta

SEQ ID NO: 406628 - DNA, 597 bp, Cannabis indica
caggacgtggctcatctttctttaaaggaaatagtgtaggatgctcaatggggggacccagacgaggttaaggaggccatcacagttattactgcaaaagaggctctaaaggcaaagaaggctgatgagcaatggttggcggattcgaggagacaattcccaaaaggcctaagcgaggctgaagaactcactatccgcttcaaggaggtagtgcgtgatgagggggctccaggagcgagcacctctggtagcggtgatacacccttccatataattagtgttggtaatattttatcaggatctaaatttactaacaagtatgttgaattaacatccaaaatatgaattctctaaaacaattaaaataaacacataatggtttaagaaaaccttacattggttgcagcggaatataatgactcattccgttcaagatctctagcccctgattcctttctgtagcaaagcattatcaagatctgaacctggatctctttctccccttcgagtttttcgttacaactgtcttactcactatgattgagtacttgacttcctatgtgtgggcggcactcattcactcaaggttcgatatgg

SEQ ID NO: 406629 - DNA, 897 bp, Cannabis indica
cccacgcacactggtcacgtgacacaacctcagagagctgttccacggtagcaaaatgttcagagtgtacgtgatcatggggaacactcattgggctgttcttgcctttgggttacgtgttgggagggttcgctagaggggatgaccacgccgtacgctccgccacgccgcacttgttcttgttgtcgtttcagattttgacagagaacataataagtggactgtctttgttttctccgccggttcgagctttggttccgctgctttatacggttcggaggatctttgtcattcttgactggactaaagatgtttggatccacaaaagcttacctgcaaatgctcctttcaaggtcaaagtcaaacttccttttattacgtactaatttcatatttgcacgaatgatataggcacccactcctcctttataatttgaattttttaattataaattaattttataaaataataaaaaacattaatagtaaaatttagggaacggtttagagcaactcggtaaaaaaaatattaagattttctactattagagaggaaatgatgttattctaaaaaaaaatttaacgaatggtatgttataatattgatgatgttattttttttaataaaaaattaaagctaaaattttattctaactaaaaattaaaatgtatattaaataataatgtccgagattattttttaaagtaagttttatttattgtagtatttttagtaggtgagaatgtaataaataaatgtaaaagagagaaaataaaatactatatttttaattttttttagtattgcagtttacttctttagtttcacttggggtattattttttaaatttttactgacaattgttatccatcaatttttttatatatattttaaa

SEQ ID NO: 406630 - DNA, 678 bp, Cannabis indica
ggtcgcgggttcgagccccgccgggaccaaaatgtggctcacttaaatttttattttttatttattttaaaaaattaattaattatttttatttgaaataataattaaatcagattattttaagttaatgagtatttgtcaagtgaaagatagttaataacacaaataaaagtgatttagattatactaaaactctctaatttggtttgcttttatatcactttttaccttttaattattattattattattttgcaaagactttttattttttataataattttaattactaaatgcataaaccaaacatctcataagtaggggtgtgcataaatcgatccaatccaatgagaaccgaccgatccaattacaaccgaccgccaaacattggatatccaattgtgatcggatcggattggatgttatttttaaatatccaattggatcggatcggatggtggatgtggtgtctaaaaatccaatacatccagcatccaatcgaactaattagtattttcatttagtttggatgagtaattagattttatattattatacgtcaaatttatatgtatatatgaaaattaacattaaagttttactcttttttctatggaattggatggatccagtccaatccaatacatactggatctaaaatattggatggatccgat

SEQ ID NO: 406631 - DNA, 820 bp, Cannabis indica
aaactaaattagtgagaatgtataatttttaaaatttaaagtagtaatgttactaaaaggtaggtttttttttaagtgttcatttattagtaatataggggttgtaatacatgtgttaatttagtgtaaagcattatgaaatgtaggcatgtcaaaaagatccatttagttggaccgggttggaactccgatccaacggatcacctctgatctgatgcattcagatacttattggatcttggatcagattcggtctgctctgcctaatttttttttttggattggatctgatccgacccgattttaatttattaaaaaaaaacataattcaagactcggaccccatactcggatcccttgggacttggacccggacccggacccagaccaagaccaagacctgggatcgagaccctgactcgggacccaaacccaaacccggacccgaactaagacccagacccagacccgaactcgagcctgacccgaccccgaactcggactgggacctgagaccggactcgcgacccaagacttggaccgaacccgggacccgagactaggatagggaccgggaccctgactcgagttctggaccttgaacccaggaccgggacccgagacccagacccagacccgaaactaggacctgcaccctgactcgagacctggaccctaacccaggactgggacacgagacccagacccagacccgaaactaggacctggaccctgactcaggactcagaccagaacccagactcggatcgagacccaaacccagacccggaccatgactctggacccagaccgagacccg

SEQ ID NO: 406632 - DNA, 880 bp, Cannabis indica
gtttggacaagtttagacctttaaaaaacgttaaaaaaattaagtacaagtaaaataataatacacaaaaaatttatataattacgtttgtataagtcatacctgtattttgtttgctttgattagatgctttggaagtaatttttttctttcgttttttttaagaaattataatagtaatttatatattatctttattagctctaaaactaaaatgaagattagttacttttttttttttatggaattataatatattgctgctatttatctcatcttgaaattggttgaaatccattgcattatttataggggtagcggaaaattgaaattcccaaactacccttacataaataagtagttgggtcacattattgttatgcccttgtattttgcatcatatttttttttttttttttttttgttaacacaattttttgcatcatattgattacgtacatactttatatatatatatatcttaagttgaaaattatcaagacaattttaccctcatttttagataaaatataagtggttgatatgaatagcacaaattatggtgcgtttgataacatttttttaattaattttctgttttttaattaaaaaagtgaaactattttctaaaaacatgttctataaaatcgttttcactttttttttaaaaaattttttatttgagaatcaaaattttaaaacaaaaaaaaattaattactttcgcaattttttaaatagtttttatttcttaatcaatattttaggctctgatcctaacttggatcttgggacccagactccagcctcggcaccagtcctagacttggaccatggccccgattccagatctggacctggacccaacttaaataaaattaa

SEQ ID NO: 406633 - DNA, 656 bp, Cannabis indica
aaaaataaattgttaatattattactatacttaaaagatgaaataatatgtgtctaattcataaatattcataaaattttataataatagttaataataagtggttgaaaagaatatatcaatgctttggtatacttataaatatataccatatgtgcatatgtgctttattcaactcttatttttaaccaagctgagctgggaaatctaacactgggtttatcatcaaatcaagcatatgtgccttttccaccacaagcttcggaaactcgtaacgataataatccggatcaagactttataattcgagaccttaatgaagatgttatggaataatttgtttatgctttttaataatttagtttaattttgagataatattgtaatagaattaatgttaaagtaatttagtttgagacaattttaaattattaataaattttattggatttaaattatattaattgtaatttgatttattatatatttataattaattaactatttatatatttaaataacttatttacaatttttttttatttttaattagcattagcgacgtcgcattagcggggggaccccgctgctaatgttctctgctgtctcgaaacacgaaactgacaaagagcattagcggcggggtcccgccgcta

SEQ ID NO: 406634 - DNA, 523 bp, Cannabis indica
ggaggccttgtgttaatcttgatgttttagcatttttcatttttctttctttctatctgttaattttttaatctggagatatggattttaagcttccattgtttgctggcagccagagcaccagggtagtggtcttggacctgttttggttgctgcaatccctactatctagggtaaattgacaagtgaatgtcgagtcatgagtccgtacaatgcatttcttgatcatgtgacttctctaattgcaactattttcctttgcaatagataattgttttctttaatgtctgactatagcaaattcaaaattcatatagctgacttttttttttgtcaatttgaagatcggagatgctgagatctttgcaactatttaaccagaaagatggaattgttagagtcctatataaatcctgtgagataattaagcgcattgactcgtcgattttaatgattttgctcatttttgccacttttcttgtttcatttgggtttaattttaacattgggcttaccaatttag

SEQ ID NO: 406635 - DNA, 1277 bp, Cannabis indica
ggggactcgaacgagcctgaaacccgagacgcggaccgaaaccctaacttgaacctagacttggatccaaacaagacacggatctggaccggacctaaatccggacctgacccgacctgtagttggtgttggggacccagacctaacccgtagttggtgttggggactaccgaaagttcgaacctcgtaagttagtcgtagggaacccaaaccagacccagacccaggacccagactcagacctatacctggaccctacccgtagttgggttggggtcgagtttattgaaaatatattataactttacacaatctattaatacaagtcaataccaaacatattattgtattaaataatactaatacaaaattaacatggatataaaattataagtttagatataaaattaaaattctaaaaaaacgagtcgaattagatccgatctgatccgaataagtcaggtcagatttcatctgatcagagtatctaatctagcggggtgggacagatcattacatgaactaaatcaggttggatcatagctgaattagatctgactcaatttatttacagtcctaaacttaaccaaaaaccttcttttattgaaaatatcctagctacaattgtgttgaatggccttctgagaattaaagctccagctcccaaacacacactatgctcatcacgagcaacaacatccacactcgatacttccctattgttcgaacaaccttcatcaacgttgatcttagttgaaccagcaagagagggggacgccacttaatccattgctgctcagagttcctccttgtagaattttcctctacaaagttgaaccagaatttttggcatcactgaatcagctcacatggtttgggttcatattcacccactttaaccttgttttgaatgtgccatatctttcaataaatgacagaaaacatttaaaatcctcctactggtcactgaccgaatatggctaatattgaaatagttgttgtagaaaataaaaggaacaaatttattgaataaaatctaagttgagtcacggattaggttgctctctttaagacattcgtgacacttcgtagaattttgcaactagactatcagcctcatcgttcctaggataaaatagcccaatcaaactactatatcagaactgttgggatttatgccctaaataaaactatatttcaatgtaatccagattattccatatcaataaagaaacagaagtatttttcattcatttgtgtatgttttggttcacctt

SEQ ID NO: 406636 - DNA, 672 bp, Cannabis indica
catcaaaatatttaggaacaaaaatatatacattggattgactagaatactaagttaagccaaaaaattcagcaaatactaacaaaaagcttaagagtattgcctgaagttagattatttaggagtactttgttatgcatcaaagaatgtttacttacactactacaaaaagtataaattccgtcagtttttaagtgttatttaaagaatttacgttggttaaaaaaaccgacgtatataccgtagtcgcaaatcgtttttattagcgtcttttttaaaacgacgcaaaaaataattgtctacatttacaaactgacgcaaaatatgaacttttctattttattttctgcgtcggtttagaaatgacgcaaaattatttatagcattttaaaactgtcacaaaacatttattacatcggttcaaaaatgtcatatcgattgccaaaatacttttttttacctattgcttcgcttataaaatgaagcacaaatgtaggtaaaaaaaaatttgcaaattttcatgcaattttccccacctacattatcaaattttaaaataattctatgtaataataaatacataatacaacgaaaaaaatctaacatttttaaaacttatataaaactagcaatcgattctattaactaatcacataatactataattgttaa

SEQ ID NO: 406637 - DNA, 621 bp, Cannabis indica
aacttaattatttattctaattttatatttaagaataatatactaatttaagttggtcaaaaattaaacaaaattaattttcaacttaaatatatttttctaattaattaaatattagaaaatataatttagttactagaacttactatctagaatatatttcattaaactaagtatttttctaaattcatttaaaaaaataatccaataataaattaattttattgattttaaaattaattatattgctaattcaattttaatttggttaaactaatataattgacctaatacaattagttaaataaggtaaataggccttcaaaattagggtgattcatgtgaggaggggttgagtttagtatatcgtacccactactatggccccctaactctcacgaaaggcccaaaggagaggaacttaaccattaattaaataagtattattcattgaataagtccaaaaataattgggcctaaataaaactatcaatgtgatatttttattttagcaacctagtccgtttaaacataaatatgcttcctatatgcatctatgtccaaaagcaaacatataggcttacacaggtcaaatgatttggatgagccctatcatgttac

SEQ ID NO: 406638 - DNA, 642 bp, Cannabis indica
attcccccaacaccttctggtttaacacgaggaaacggtcgaggctttccaaatcggggaaccactaatggaggtaactatcctaattcatctccttatctcaatactaatggtcgtggcatgtctggttacagcagagggggcagattcactacttcctcaaatcgagttcagtgccagcatgtcacaagctcgggcatactgttcttgattgtttctacaggtttgacaagagcttcacaggagtttttccccctaccaaccctcccaatgctcaagccaacatagctgccacaactactcttgatgacagtaattggtatccggactctggagcatcgaatcattgcactcccaatgtgcaaaacctgaacataagcactgagtatgaaggagcagatcaactctatgttggagatggtttaggtctgtccattaaacacattggcaaatcttttattcatacacataattctcatcctcttgttttaaacaatcttttacatgttcctgaaattacaaagaatttgcttagtgtttccaaatttgctcatgacaataatgtgttttttgagtttcatgctaacaaatgttttgttaaggatcaggaaacacaagccatccttctcactgggatacacc

SEQ ID NO: 406639 - DNA, 853 bp, Cannabis indica
attccaggtttctctataactatgtttgtcaagtgtaactgccttttactctctttctcttcacaattttcatatcaatcaatttttttttaataactatcatttttttttttcttcttcaacaaattatgggagtactgttgggcacgtgtccagcacattttataagtgacagcttcatgaattattagtaatattttttaaaattatataagacctgatactaatgctaatataacaacaaaaaaatgtactagacccaagtactacttattagcaatattctatattataatagcaacgttctaatttagaataaattaaatttttacctacccaaattgaaatgggaaatttgaaattctatacataacaaaccctaatattatttctctaaacctaaatgttatagagatttttacacctcatgtcaaaattgacacctttttttacatttttatccttacacggttttttaaactttttttaacttttacatttttcaattttacttttcaaaaagtttaataattacaattttaccttttcccttcttccttacacacgtacacgcacgccacctcataaatcctttcttttttttttttttttgaattttttcatttacctgattcttccactcttcaaaccgagcttcccacgatcaccattatcaagccctaaccaatttcttcttcccacgatcaccttctccaagccctcacccacgttttcctcaacctacattgtcatcctcctctattttttctctatataaatggcaaccactagaagtggttcgaaatcaccatctccggcgaagaaagtttctaaaaaatcgaagaaggctcca

SEQ ID NO: 406640 - DNA, 911 bp, Cannabis indica
tgtttttggtaaatttagctcgaatttgatctgttttgcactctttttcaattttgatttctttgcgaaaacgaattttttggtaccaatattgttgtcaacatgagtattattaatagtgttttcaccactaattgttaggatgccaatggtgttgacttgaaccctcaaattttcttttttgaatcctatacaataatttatatcacaagattcaaatattaattttgcttccacatataagattttttatatattatgaatattaattgctaagcaaaatgtaaatttgtaagagaagacttttatatgactatatatatattttgataaaatataggtttataaaatttgtcatattaataatggagcattgagtaaaatataagccttatacaatattttactctttctttctttttttttttttctttttgaaaaatggcaataaaatatagcatttgtatttgatatcaaacatcttccacacattctttccaaaaaaaaaaaaatcttactaacacgtttaaaaaaataatactaattttcttttctatatatgtggacagtgaaaagtaataataaacgagaaaaaaaaaaacatctgtgcacccaaattttagagggaaaaaatgagaaaattaattaaaatcttaattatgattaagcactaataattatgtataaaatataccttggagatgaagctcaagaatatcacgttcttgtcctctttgccacttacaaaagggttcaaagtcctcataacaactcttgaaataagctgccattacaattgtttttcaagtttctttatacatatataaacacacacatatatatatatataggtaagaaaatgtcatgagtaattatttggtgtcttgtacacgacaaaaataaagaatggt

SEQ ID NO: 406641 - DNA, 514 bp, Cannabis indica
ttttgcatttttacggaattaggaatagaaactactattacaactagcgctgcaacctaaattgcaagaaaaaatcgtacaaaaaccctttaactagcactgagcccctttagaaacccaaaccgtaaatttaaaaaaaaactgttaaaaaaaaataatatatactaattccattatatattttacacatattaaaataatgacatttaaaaataatagacaaaaaaaatcatcaaagtgacgctgataatgaattaatagtgcaataatgtaatattgagagtattatttgtattttagtattactaacactatttttaataattgaatttacttttattattttcataaataattatgtaatggtataaaaaaaaattaattaagatttttttgttctgtgaactttaacatgtaccaaatcatattttctgaacttttaaggccgttaaaaatattgagatggttgaatttaaggatttttatctaattttagtaaaaaaaattctaacat

SEQ ID NO: 406642 - DNA, 733 bp, Cannabis indica
caaaaaaataaaaaaaaaaaaaaaaagaaataatagctatttctcatatgttgaatagaaaaatatagaaaatttattgacaataggtaattattcaaattttattatactatatgtgacaaaaaaaacgtatttacaaaagttgtgtatttttctaactattttctttatgtacaagttatatatatggtaataaatttgtgtatactaatttaatttaatagccttgttattaattggttaatcttgttatatttatatcatgattttattatgttattaatggattactcttagtcatcatggttaaatattaatttttgactaaatctattatagaaagcttttaccatattattgtgacaacaaaaattaatcatttattttttatttctttagtttaaattaaattacatataaacattttataataaaccattatagaatgcataataaatatttattctttaataaaaaaacatttattatgtttaattttgtaaaaaattattctaacttcttagttaattttaaaaaaaattattttatttttttaataggcatgctatattataaataataaagatatatgttgataaaaaaatagattaataataaacataaaacatgtttataactagtaaaattatttgtatgtttatttttttttaattttaattaaacacatataaattattaatgtataattgtttattattttaattaaatattt

SEQ ID NO: 406643 - DNA, 919 bp, Cannabis indica
cttgaccgttttatgtttgttttccaactttttatttttctatttttccaattttattttttcaggtctcagaatccaatccaagtgttgctgttgaaaaggcagttgccattccttctgatgaagaagctgatgacactgttacttatactcctcttttacataagagaaagcgttccccgacattgaaattgccttttgttgattttgggtcggctgatgtgagcagcaatccaatggaggtaatgtcatcaggttctcaatctggaagagatgagagggattttaagatgattatttatgtgaagggcctttacgctcttaacgatacatttgctgatcccgtctctcctgaaattgaggcaacgtttgatgcttggattggcgaaggcttgctaaaacatcctaagtgattattttcttttattttttttttgtatttttttatttgtttgaattctatttttattattgcaattatttgaattcaatattgttttttgtcgtgtttttgttgttttagggcttacaattgttatgaggatggtgcgaagaaaatttcccctgcgtttagactaagtgttgattatgttgaagataaaacctggttttatcattgggcttgttgtgacatgtttatcaatgactaggtaaaatttcttttttcttttaaaactttttatagttgttttatcattagtttttagtttagttactgtaattaagttttttaaatattttttaactttctattttgtgtttctttgttgttttgtttcagcatatgaacactatcttctattaccttaggaaaatagggaaatattcttctgctgttacactgaatttcgcaacaaattactaccttctcgatgattccattcaatctttataccacaagttctgcaaagccaagttg

SEQ ID NO: 406644 - DNA, 1145 bp, Cannabis indica
gaaatctttgcttctatcaaatgtgccatgcctcggcggtttcttttgcctccaaccaccattctccagtgaccatcttcgcctttccatgcagtcgtcgggtcgcgaaatgcgctggcgttttcgcttttgtctggtattgctattggattgttctttggtttgatccattctcttaggtatggatcagatgcattttttggtatggcatagttttggatttgtctaatgcttttatcaatacctgcaataacaaagttataaggaagtgcatatttgataatttatgaccaatttattctaggaataattacatcaaatactaattttcttaaaaaaaaatatatttttacttttaaattatttttttacatttttgacggtattttataaaaaaatataaaaaaaaacaagaaaccacgtggaagtaacaaaaaaataacattaaaataatgacaaaacaacataaaaaataatatacaaataccgtaataataagaatacaacacaaaaatacactaaaaaaccgtattttatgtaaataaaatcataaaaatattaaaaattccgtacaaaccttatttttgtaattcttttttttattgtttttgtatttttttttttgaaattattcatttattctaataatatggaatataggtaagtagggatgcaagatggggatctgtccctaataagttgtattttaaataataattagtttattgaataataattaatgtgtaacattataatttttatgtaatttaatattttatatattgaattttataataaatttattttttattaggggaccattttgatagggaataaatgaggataatgattaaaaactttaatggaatagggaatgggagagcactcttcgctaatttacattagtattttttttttttttcttgaaggcattatacaaataaagatactaattgatatataaaattataaattttctaagattttagagggatcaatgtaaatattttaaaggactacactatgttgtaaactttttttttcttttttctattgacttactagtccatgatcatatcaacaattaaaaattaagggtgttatggccatgatgtaataatacctgtgtacataatcacaggctt

SEQ ID NO: 406645 - DNA, 663 bp, Cannabis indica
atagagtccagcaaatacacccaaagatcaaagcagtgttaaacatcctcaagataacatcaccataattaccaccaacacagagaaagtttgagtcactaaaaagctaaatttacttcattttatatagctggaatcattaaaaacgaagtaaaaaattccttccaaagttactgtttttcttttgctttttattttggcacttaagaaaaactcagcaattacttcagtttttataaaacgaagtgaaaggaggaagaggaacaagggccttgttcagatggaggcgtaagaaaacacttttaacatctgtttataagaaaaaaatctctctttaccaaacatgcaggtcccttatatcctttccactttggtcgtgtatgtaccaatcgaagttagaaagtccacttaccctaaagacctagaaaccaccaaccccataacacgcacgatcagaccctatttcttcctctagccgaaaacggggtaggagatctcgttctcaattttgaagaccttgaaaccatcaaaacgacaactcggaagctctgaaaagagcacccagtgcctaggttgatgtatgacttggtgcactggattttactatcccattctgatttcgtctcgagcattcgtctagttttcatagtaaacaagagcttt

SEQ ID NO: 406646 - DNA, 581 bp, Cannabis indica
ataagagaatttccagagggatttttccattttttcaggtatgggtgaaacaaatggtatatataatatgtttatttattattatttaggggaatgtgttctaagttctgatcttaatttgtggtgatgacaatatctaatatatattccagaaactacacattggactgtcaatctcaacaatccatacattattatggataaagcttagcatcttttctctttacaaaacaaaaccaattctaaaataagaaaattatatttaaaaacggggtaataataaaagaataattaaatatttgtctcataaattttttactactataaaagttgtgtctccgactcggtaataatacccttaaaaatataatttttacaataatatagttcttttattatattttattcaattttctcgttgaaaagaataagtagtggaggatatagttaataaaaaatataaattaaaaatttaaaataaaactatgaattattataaaaatgaaaaagtcgtctatcctattattaactaaaggaaaaaaaaaagagttaaatgtatttaattttagggttaatttcac

SEQ ID NO: 406647 - DNA, 617 bp, Cannabis indica
acgttttttaaattttgtattgagatcataaattatgcataagatggtcaagccaaacacatgtaataaccacaaatatgaataaatcatacatcaatagaataaaaaaatcaaaataacattaattaatagaaaatttcaaacaatctccattaaaatctcaaaattagagtttagataacaatatccattcaaacattcataatcaaattcttagaaaatataataaaatcagataagaaaagagaagaactagatttggggttgtcaagattactccaaagcttgatctccaatctctttttatatgttattctgagttctaaaaagtctcccactttctgaattcacaattttttctttattaaaacaaagtcctgattctatttttgctaaaattctcaaaatataagagctaaaaattttgcaattcactatgcagacgcgtcgcagcgctggtatagtaccattaaaaaatatcaatctcctctgtagtggggcgctgcagcacaatatttggacactacaatgctatttctaatagtgtacagtattttttttatctatgaaattctgttgcaatgattgatgatattttggccataactctctcaata

SEQ ID NO: 406648 - DNA, 838 bp, Cannabis indica
attcatacatgaggatgtgacttgtagctgtacagagaactaagaccacttagctatgaataaaacagtcagcaacatattaaagtttggtaatctttaatcaacggttgctagtacggttcactgatgcctattttttggtgcacgtaatcttggttcggattacggatgtagtatgacatgaaagtgaaggtgatgtatataatagacattatatatgaataaagttgtatttattaacatgtcatttattataaagaccaaattcatatcgtaacgatgatcaatagtagatcggcctaaatcctgagttatcatgaactcctattcatgtttttagtttctttgattcactcgttaaagtttctcagagaagataattcttacgacttctattttaggaatctaataatgtggatggctagaaacatgatttacaatatggaatcctaacttttctaacaaatcaaatcctggttccctttaagtgttaaatctagaactggaatattgtgtacaaaattagatgggatctaaattatacctccacaagtgaattaatggttctaagggagaaagaagtaattagacagtaatttaactaaaactaatgacgaacgaacacatgaagggctatcactggaattgattatattaatggacattacagttaaactcagtaaatataattctataattactaagagttcaattccatatttatagtggagtaattgtaatatcctaagttaagaaagggattagcaaaaccctaattagataattatgaatgattgaggaattatattattatatagttcaatatatgagaatttat

SEQ ID NO: 406649 - DNA, 874 bp, Cannabis indica
tcaaaaatgtatctttaataatattaagatattgtaatataactttaaaataacggtgcttaatttagatatactaaaacatttactagtaaactatgtaatttattttatttattgtaataaagtaacgtaaaagtattttaaacaacataatataatttaaaaataaacatgtagttttaaaagtaactaattagtatcttatcgatatcataactaactatatgacaagccattaatttcaaaaataatcttgaaagttaatcgaatgtattttaaataacaagatactataatataacctaaaacaactaattcattattaagatgtatacaaataagttttggaggaaaccaaaaatgtatctcaaatatatactgattagtaccattttaaaacttttattaactttattgtaccttattagtttattaaatataaggtgtgtttggtaaacttttttaatcaattttttatttttaaaattagaaaagtaaaaatattttctaaaatcatgctcaataaaaatattttcacttttcaattttttagttgagaatcaaaattttaaaaaatttgaaaaaaaaatagctttctaaatttttttaaacaactttttttcttaatgaatattttcgactctgactctaacctagaccttggaacccggacctggaccctggcctcgactgtcgacccgacccggtccccgatcacggtttcagacccgaacccaacttaaataaaatcaacaaatgaaaataaaaataaaatttacacagaacacacttttattttttatttttaaaattaaaaactaaaagttgttatagaacacattttgttttttaaaatcaaaattttaaaaacaaa

SEQ ID NO: 406650 - DNA, 589 bp, Cannabis indica
ctatggagacgttcatcgaaacccataggcctaaggctagaatactcacagacaggagggacgtaatgtatcattaaaggggacttaccagaaccagaagtgctggcattgagagcccccgtattcggcactgggaccgtaggccttggtctgggggggtccttcgctccaccaggctcccgatacgaaggggccttccggcggccacgtgggccttattataagcctgctcctgttccttatggaagaggtatttctggtacttatctttcgccgtggcgatgagatcctcccagagtaccttctccgcggccgaaaccctcacatttgggcagacaactttagaaagcttggagtcgtccactgactgatgcccctggatcagcttggccttccgacagtgctccgtcgtgaccaactccctgaggtcgagggccttcttgtcatatgtggcgaaggtcttggcccgttgtcggaaaaagcggagtaggttcagtccgcgcataaggagggatcctaacccactccgtgagaagctccggatgttccacagcctggaacccggaggagaagagaagcggtgacggta

SEQ ID NO: 406651 - DNA, 787 bp, Cannabis indica
cttgtcatccgctcgggatgaccttctcgtccttttgatattgtcgaactttcctcttcgaatcagctcctcgatttcatcctgcaagacccaacattccaaagtagtgtgaccaatatctttatggtacttacagaactttttggggtctcttttgtcgcgattttccctgataggtggcggcttcttggagactccattcctctcctcaattgcatagatgtggtctcatggtaccgcgagttcagtatagttaacgaagcgcggtccacctttccttttcggcgaggactccttcttcggaggagatttcgccaacttcgaacttcgctgtctccgtgggctgcgtcttcttgggcttcgacctctggaatttttccctcggggattgggagaccttgatcgcggcactggtgacttacgcttatccttgcccttttcaacctctactagagaattctcaattctcttatggggttcggccatagcgaagaattcgactagtgattctggtcttcgagcttgtaactccttccagaaatcggttctcggcaaaacacctgttatcaacatacaaacaagcgaagactcgggagccttctcgacttttgttacttccgcattaaatcatttaaaatagtcttgcaaagactcgccgggttcctgtttgatgttggccagagttgtgtagggaggcctataagtcattgtggcctgaaagtgtgtgaggaataaatcgacaaaggtctcccatgtcgatatcgaggcctcaggaaattgggtgaac

SEQ ID NO: 406652 - DNA, 764 bp, Cannabis indica
atattgtttttatactcattcaagtgtgtatgatgtgttacaaacatatgaaaagagtttaagaaatcacaaataaaaataaaatatgaagttgctgaaaagagtttaagaagtgagaaataaattggtttagagtagtatgtgttttatatcccatgtttggtagagagtcaagaaattgttagaaataaatgagagattacagtgaaagaataaaataagatgaataaaagatcaagacaattacaactctaagaaaaatattataagaacaatatattaaataaggagttacaatcccaaagtacaaaatacaaataaagaaaaagtgttacaactcaaaactcaaagatacaaatacatatatgttatacacgaaattcaactacacttcagaggatgacacgtgtcatttagtggaataagaaccacttggtctaaaaagttatataatttaatacaaagaggaataactcattaaatatagaattaatagagtctattcataactcgctgactgtatagttttaagcgagacaaggatccaaaactattaataactgtattgacgagacaccagtgtaacgccctaatgctaaggcacgctacagtgctttttcaattaatgtgcaatctttgctaatcaaagaagtttctcgaaaaacgtgtcaaattaaaacttttgcattaaatattaaactttgtaatataataaaatatttacaaatgtcgggatcccgttttcaaactttgtaaaattttac

SEQ ID NO: 406653 - DNA, 713 bp, Cannabis indica
aagagacaaaaatccatgcttggtactgatttgcagctcattcaactttacaattgttaattttttttatttttttttttaaaaaaaaagtcaaaaattaagttaccatggatgagcaggctttatgaataggcctgcttatttcattattacactctcagagagagcccatttggccactgattttaaggaactcgtactagaaatagtagtaataataactagatagaagaagaagaatacctcattaaaatgtctaccactaaaagaaatattaattaccttcaactcaaaaaaaaaagttgattaattttaaggagatcgtactaatagtattttagaaaataaaaaataatagtacgtacatcattaaaatgtctaccattaaaagaaatattaatgacctacactcaaagtgttttcctttgctcattcattcccataagtgattggatatgcattcacagctaataaaaatgctacaaagtttgagaaattcatcttcgtaataattatattgtaccaattcattattcatgctatttttcgcctattttttgggtatcctagtcagaattgaacataattgtaagtgtaacgtccccgcttcaagcctccattgggcccttacacccacggaatgaatggctcttatacacgagtacgccactctagctgcttcctggattgatgactggccctacagaccaaca

SEQ ID NO: 406654 - DNA, 703 bp, Cannabis indica
tcttatcaaaatacctatagagtttaccagaactataacttatgtatcattgtcgcctaaaaaattaaatttaaatatttatttacaacatagagttaacttaagtattatgacctaatactttatattataaatatatatattaaataataaatttcttactttatgataaaataataataaaaaataagaaagaaaaagatgtaaagaattctataatatgacatgacattctgacattattttcattccaatataaacatcaattaaaaaatctaaaaatacatctatgtcatttttttttgaagaaaaacgtacttatattaaaatcaaacgcatttagacctcacggtcattacaaaataggtgttccaggatagaggaaatcggaatacaaccgaaccttggtgggtaaacgcccactgagccacatgatggacaacaaaattatagtttctactaatattcttaaaaatacaactaacaaaataaggagaggatctaagacaaaaagagacgtaattctcaatctcccaacgggtaacctctctattgagagcattgatcactacccttgactcactctcgacaataataaacttaactccattatgcttcgcgacatctagagcaagatagcaagtcgccgcttctctacataaagtatcagcacaatccagcttagaagtatgcacccaaatca

SEQ ID NO: 406655 - DNA, 491 bp, Cannabis indica
cactgttataatcgctacgatgagtcttatatgggttcagacccaaacagatccagcagtggaaacaaaggaggacaaaccagtaacaatagcaatggtgcttctgcatttatagctactcctgaaatggtggaggacactgcctgatatgtcgactcaggagccagcaatcatgtcacagccgatccaaacaatctcactcacaagacagattacaatggtgaggagacattgactattggtaatggcaacaaacttgaaatttcccatgttggtaaaagtctaataccctcatttgataacagctccataattttgagcaatgttttacatgtgcctaatatcactaagaatttacttagtatttctaaactcacacatgataataatgtgtttgttgaattctttgctcgaaattatttgtgaaggatgtggagtcgaaagagggtgctgctacaagggactcttaaagatggcctctaccaactcac

SEQ ID NO: 406656 - DNA, 660 bp, Cannabis indica
acaatagccttcatggatttctccaatgatctcgtttgcttccgcgggaagaacacatcgtaggagaggcattggatagcctcttatatataatttgccttctactattgtatagcgaggcaccaaatataggagtttttgttcctcatttttgtcagctggaagttgcccgttgagaagaaagttaactgtaggtgtcatccaggtaggcaagctaactatcatctcgacttctttctcacatatacttggctcgtttaacatctccactagaaccaagttacattcatccagttcattctgtgaggccagttttgccaaggcatcgacattagagttttgttctcttaggatttgttcaattttaaaataatcaaacttttccaagttcttctgaaccttctctaggtacttttccatttttaagcccttagcctggtattcccctaagacttgttttacaatcaattgcgaatcactatggcatataagatttttaaccttcaacacttcagctatcttcaaaccaacgatcaaggcttcatactcagccttgttgtttgaagtgtcaaattgaaatcttaaggcatagtgaaacttgaagccttctggcaaaattagtattacccatgcacccaagccatgctcattggatgcacc

SEQ ID NO: 406657 - DNA, 762 bp, Cannabis indica
ctttaatcttttacacaaagggtggaaccgaaagtcttggtgttgtgctccaagttgaagaagtctagtaagatactctacgactagaacaaagagcatggatgagatatgatctccttacctcagcacttttgcacctttagagtctccttaaattcccccattaagtattagagtctaagaggtaacttttagacaaatcatcacccatttaatgaatcaaaaggcaaagcacaaggctatcatgagcttttccgaaaaacactaatccaccgtatcgtaagctttacttagatcaatatttacagcacaatgaggggaggcattcttcctattgtaacttttgtttaagtcctggaaaattagaatgttatgagccaaaactctattcttgataaaaatactttggtttttactaattaaacaaggaagcatttcggacaacctgctacaaagaatttcataaatgcattagtacaacgtattaaaattggcaatgggatagtagtatacagcccgagaaggatgatcagtcttaggcactagagcaattgttgttcttataagctctgtaggaatgttttaaaaaattcaagaatagaacaagctatttaatcacccaattctgaccacatttgcttgtaaaaagccaagctatagccatccgaacaaggacgagagccttttagatcccccaattggtgggccttcacacctaataaataagctagtatctgatccaatccaatccgcacgatccaa

SEQ ID NO: 406658 - DNA, 1247 bp, Cannabis indica
tggagtcttagggtgatgtgtaatccgtgaatgactctcttttaccggactgacaaagtaattagttgagaattggagggacgtgtcaagttagaagatgcaagatttgacaggaaatttttgggtcatgatgtgtaagaggtattctactatcactttactaccataaaacaagatagtatattaataaggttaatattcactcctctatcctgttggtacctaagtataggaggattatgtcgtctgggccaaacctgagccaaaacttcacttataaccaaaatacaagatcttgttgatagaaggaagttagaagattaaactgttgattttttttattatggtatgtatgctttacttatcttgttattttgctaccaatctaaattacttatgtgaaattgattgataatgttttattttggtattttgggttgatgtgaaattccttagttaataattgttgttggatccttaattgaggcatttgtgtaaagtttacagatgatttatcttgtgagggcgtagaatatattttggtttctatttactactcgaaaaacatgatgaggtttggaatcttttcttcattgacattgaccattcatgcattcaaataagtaaagaggtgcctacatgtagaaattgtttgaattattttactaggatctagatttactaacaagtatgtttttaacatcccaaacatgaacttctaaaatgatatgaaataaacacatataaattttcagaaactttacagtggatgcagcggaattataatggctccttccactcagatctctaacccttgtatcctttctatagcagagtatcaccaaggtctgagccggaatgtctttctcttgaatctggattcttcacattgagtaccacttgatgtgtgtggtcacttactctaatcactctagggttcggtttgaagagaggaagagagagagagggtttcgaaataggtagagagaaggtggctcaaaatttaactgaaggaaagagtttgcatcatcttttcctttgaggtcatcactacctatttataggaaaccacttaggattaggttagatttatttggcattaaaataatgaaaaaataaaatggtaaattgctcctcaagtggccgaccatggatattgggccccactttgcaatttttccatttttccaatttaaacacttaaattataaaacaaattatttaataataaaattaattattaaata

SEQ ID NO: 406659 - DNA, 547 bp, Cannabis indica
atttgttttgggcgggtgatccaatccaaccctacgtgacgacaaagctttgaacggcttctgttttcataattaaacaaatgcaaaatgagaccaacttcccataataggttaaaggccacagcatgaactacaccctttattactactaacttaagtactaatttgccaacttattcttttttaattaattaacaaactaacttatttaatatacaaaacttataacagaaagtttatttcaattaatgtcattattaaaaaccccagaaaaaaaaatagtcactattaaagggtcgtaacatcacgagctttgaattacgtgataaatattttcatacatatttaaaaatactctattcaagaataacttctaatttgttataaaaaaattaagtttcaatttgaaccatttataaacaagaataacctctaaattataattagttatacattttataaatctcgtattaacaaagtatacatctatataaaaataattatatcgtaataaaatatatacatatatattattataaatttattt

SEQ ID NO: 406660 - DNA, 582 bp, Cannabis indica
agccagctagccagcttgtccgtgcgcccagccagccccgcacccgtgtacgtagcctcaggaccctgcccatccgcctttcctccctgacagctacagctacagatctaatatatcatatcatatactttgcaatatatatataatatcacattattaattattggttacaggtaagtgtatcagccgtgatcctatagtttgcattgacactacatttagcatttttcaataatttaatataataatttttttgtatagaatatctataatcattgaataagtcgctacatttataagctgtcatgaactctatttctcccctctaaaaaaaaaaaaaaaaaaactaacaaatttctgttgtgtcggtttccctctcttctatgttcaaagtcaaagtaattagttaagaccgtaaatagttcacttcttactgcccttaatagaaaaattaatgatttagggaaaaaaaaaagaaaataaaagacctgactattgacttaattattttatcactttcgacacatttgtcatatgagataacgacctactattgcaaatatgcattgttttttttttttt

SEQ ID NO: 406661 - DNA, 570 bp, Cannabis indica
ctctcttactccccatcctctcttacctctccatcattccatcctactctccctccctcccaccaaacatagccttggtgtcaattttctctttgaattgttctttaaattgctgattttatcaacaatttgtgatcgaactgtgttggttattttgattgattttggtgagagtgatttactgatggtttgataataaatttgtattggtttagatttggaatatgtggatatgtggttaatggtttgttgtggtaatgtagtgaagtagtgatgttgataagtagttgttgatttagtataagaaatgagtttggcttagaagagagggttgtttgagaaagtagtaaagttttattgatagtttggaactttggtttttggtgttggttgttttgttacactagctcctcaacccaagcttggtatttatagggagctaaggatgatactacaactttctagatttttcttattttgatttacaatttaacttctaagatatctagaattttctaagtttcttagcttacaatatagtttctaggtaattctagttttctctaattt

SEQ ID NO: 406662 - DNA, 561 bp, Cannabis indica
tttttcttactaaataacatatactaaaaatatatagttaaaataaaaataggtaaaatttaaataaatataatttaatgactaaattaacaaatgagaaataaaataaaaataccaaaataaatcaaaccaattaaatttttgaaatttaaattttcttattttcttttttttttaaaaaaaaaatcactgcctaaaaaatcatttatacaataaaaaatgacacgtcattttatatgaacgacagctacccattatgacaaaaaacgacacgtcattttccacagtatgaaaaacgacatgtcgttttacataaacaatggctgccataaaattgaaaaacgacacgtcgttttagatctccttcaacctccaaccgggtcgaaattggtcccgatttcagctaagtgtgtccgacggacccgacccaaaacccagccataaaactatttctcgacgtccaaaattcatgaaactaattccaaaatgatcttgttgaccgaggttttcggcaactaataaaatattataaagttaaagagctgtaagaaaattagagaa

SEQ ID NO: 406663 - DNA, 490 bp, Cannabis indica
cgaaaaaaaaaaaactcaacataaaaaatggaaaacaaatagaaaactatagtttgcgaaatagaagcagtcaacatttaacctcatgtatcataaaaatagaaacaacttacattgaaaataggaaatatttaacctcaaaatatatgtgtatatgaaatagaaacaactcatattgaaaatgaaaacaatttaatctcgaaataggaacaacccacatagaaaataaaaacaacaaaatagaaataatttaacttcgaaccagaaattataatttacaaaatagaaacaactaccatttaacctcatatatcataaaaaatagaaacaactcaccttaaaaattgaaattatttgaaatcaaaaaatagaaacaatataaccttcacattgtatatgttcctcaatgttgtatatgtttgtttatgtcgagaagagcgtgtatgactttcatgttgggattttatgcccaaaataaaacccatttcaa

SEQ ID NO: 406664 - DNA, 261 bp, Cannabis indica
tgtgtgagaggggagtcggagaacattgggtcgcggggtaggctattgggtgctaaggttttttcaattaagaagaaaaaagaaaataaaaagaaaaagagttaaaaatggaatgggagtttaggtcgcggggtaggctataggtagttttgcctacccaaaatatcgatttttgtagttaagtgttaaataatttaaagttcgagtggtttagccgccaatatctcaaaatgaaaatatttttaaaatatttttttttct

SEQ ID NO: 406665 - DNA, 662 bp, Cannabis indica
aaaaagtcaagatgcaattgaaactgttggactcgatgagaatattcaatatactcaggttatttttgttttgtaaactagtatattgttttttgtttattgaatattttttgttttttgaatattttttctttatgttattaatgtttttattgtttaatgggtttttttttgtaggtttttaatgatgatgctccttcatttgatattatgagttttatttctagtaaacctgattggtttactgaagaaaaaaagaatactgataaattgaatgatgaagaacaggttgttgatgatcatggcctatttaaggatgttgttaaaaaatctaaggaggatgaagatgatggtggtgatgaccaggcaagtttatttattttttagttttttcattatttagatgatttgttactatgttgtttttgtctctgtcaaatgttttttatgtttgttttgtatatttacagggtttggggggtggtgatgtgttaaagctatggttcagatgggacaataaagacaatgttgagggaagaatactgaagaagcaaagatgttgcagatgggagtaataagataatgttgaggcagagcagttgatgtagatgcaagtgtaaatgatgttgaaggtgttgctagtaagggaaagttgtttgata

SEQ ID NO: 406666 - DNA, 491 bp, Cannabis indica
atataataatattatttttctttttatttatcttttaatttatatatgtgatgtaagttcatatatgttgtgaatgttctttgcacgttcctaaggttccaccgaaattgtagacttataaaaattcagttcagttggtttcgaccctaacgacccaccaaaatgaaagagtacactacactattactcattattggtcctttcataatttggattggactagattaaattagattataccgaaaaaaattcagcatttaatttcgaattaattgaattattttgttttcttttgaaaaaatagaatttcaattaaaatatgaataatgataagaaataaaatctaatttaacttataaaataaaatagtaatctttttataaaaaaataaaattatatttttaagaagtaatacattatatctattttttatataaagtgtgcctatataacaaaattcttggtttatgagaaattcatgagtgactttt

SEQ ID NO: 406667 - DNA, 504 bp, Cannabis indica
tttacggtttggatttatagagtgttttcagggctagttgcaatacgagtttctaataaagaatttcaataaaaataactaaaaaaaaaaattaattttaaagtgtaaaaatgaaaaaattcatttttttaattacattgttattatattaaccacttatttatctaaaaaaaatcacttataaaattgtgtatttatcttacattacttatataacaagtcataatcccatggtataattttgataattgaatcaatgctatagtgtgtttgaaatttatacaaaaaaaaaaaccaacttaatcttttttttttctcaaattaactttattttgcaaaaaaaaaaaaacaagactaaagatttgaaacaaagaaaaaacagccgtgaaacagagaaaacatcctttatttttattttcttttggaacatagggggtgtttggtatgaggtattcaaaataatttgattatagggaatatatgaaggagaatatgattatagag

SEQ ID NO: 406668 - DNA, 597 bp, Cannabis indica
ttaaaatgcaattaaaacaatgtaaatttctcaaaatcgactaggctgtagcaaaccaagaactccagttactgattagaccaaaaaaaccgccaagtataacagttcacaaacaattaataaaataaacaagtaataataaaaagaaaaatcacacatctagttgcaaaatagtctccctttgctttcaagtaaccacattttcttaagataatttactattacaataccatgacacccaagttagttatacaatattgacttttaacatacaatgaaacatatgtaataaaaaatataaaaaaaattatattacgattttattgtagtataaaggttaaagggtaaataggcaactgagtgtagatacagaaggaacatgaaaatatacacttaaaagaataaataataaggatctaacacaattttttaaacttattttctatcccttccatattttttcccctatacctaacatagtaaaaatgtcacataattcttgaaaggagaatgcaactcatgttttacttgcaaactagagtacttactaatgtcttattacacttcctcaagtatgcacattaagctttgatgggg

SEQ ID NO: 406669 - DNA, 618 bp, Cannabis indica
tcatcaatatatcaatgtatatagagagaaatgagacgtgacatgtcactttaaaatctctccaagctcatttttttctctttaatttccttatttttaatattttattatagcataaatttacaaattgatatttactattattttaataaattttctataaaaatatctatcataaattaaataacatataataataaatataaactaaataactaatattaaattatttatatctatacatattcataactatatatgtgtgaagtttattaatatgggaatactgctttttttttatagaaagaatttattatgaatcaaaatattatgaattgaacaaaaaaaaacaggtaatgagattatgaatctaaatttttcataatgcattatttttatatcccgatcatataaagttaatgtcatcattgtagttcttattgatatcctcaaatttataatcttaacacataatttaacgttttgttagttgatcaataaagtgccacgtgtaaatatagtattggccgaactaataaatcttttaaaaaaattaattaaaataaattcatattattcaaaaaagaaaaaacattatatattaaatgaaataaaaat

SEQ ID NO: 406670 - DNA, 559 bp, Cannabis indica
atgcttctattgcaatggaaagggccactggaaacccgaatgccctaagcttctagtaaagaaacaaggtatttctgtctatgctataaattcatgtgtttttagagaattattatccccttgggttattaattctggatctactaaaccatgtttattttcttcttatttcagctccagttgcttaaacttggattgcaatcctagcgagttgagtcggatggttggaagaagggtggagattatccaagattgaagatgaagctcggaatttttcttttaatttttgaataaattgtttttatttatgaaaattttaatttcaattattggtttgggattttgttccgtatttcatatttttggagacaattcatttttttagaatattaataaagttttctcttttagttatgaattgcatttatgaattcagcttcatgtttttcttttatcttgtgtatgccaataccatttatatttatatgtttataatatttgtatgtgtttgtattttattattgatacaaaaatctatggtatattcatctctgcaaag

SEQ ID NO: 406671 - DNA, 615 bp, Cannabis indica
caaatcaatatcaaacaatctccatctacactctaaagaactgtttggctactcttattcattgtagcaaattcacacatattaattttagtaaagaaaagtggatagagaagaaaagaatgctaaaaatcccgttaaaaaaaccttcgcgattgatttttatctccaattttcgtcctccttgattgcttattgaaaactattgaagtccacttcttttatagccaaaaaaatgataaaaaacgctgaaaaaaacttattctgcttaggattagaaggggcgagccacgacatttgatttcaatgcctaggcatgacccccctttatttggaaaatgagttttttgctatattgactgatcgaattttggccataactctctcgattttgctcacaattatatgatttaagatgttctggaaagataaagagagatctagaacttttatgttttgactttttccaaaatctaatatgaacatagtcgaattcaggcttgaagttttagttttattttttgtacaattttctctattttataaattaaatttttctaaaatttgaccaatttatacattcaagtgttgaaatctgaaatcaaagaaaacaagtat

SEQ ID NO: 406672 - DNA, 501 bp, Cannabis indica
ggagtgaagatagttttttaacatcaaatttggtgatagtgtgacaccatatttgatgagctccttggagatgctctaatatatcatattttattattttttttttaaaaaaaaaacaataaaaatctcagaaataaaatgctatatatatttctctcaaaaacacacaatatatgcgtatgtatgctgatgtggccatgcaagctacagctgctgacgcctccattttatatatatttatttataataataataataataataataataataataaagataaataataacataagtccccaaatttgtgagtgatataatttcaatatttatttttagcagtcataagtacttaatgtttgtaaaactgtaaatttttttttaatttcgtcagtacaaactgtattatttttttaaataggctacatataaggtctaatttctagatcattgggtctagacaaaaatatatagtatcagttacttccaaatgttccttta

SEQ ID NO: 406673 - DNA, 637 bp, Cannabis indica
tacagactagaatagctctaacagttacttacttactacggactagcgcatacttgcatatgggaactcggtagtgggagtgtagtcatagatatagacatctataggttctatttgttggaagtaaaatgttgtttactttgaatttggttaaaggcgcattaaatgataaagtgctcatttcaataattatattaatttattgtaaatattatttataaactaagtattttgaggatacaatatattgatggagtaaaaatggtaattttagtccatagctcattgtgaattatctatatcattgattgctttgatattaataatggataaattatagtgtatctatatatattatgtatacattatatatagagcgttctataaacgaagagtacaattccgaatctataatgagatcacgagaaattaataaattaggaaatttattttttaaattttggatatatttattgagagctagaatttataggctcgtgatcccaacgagataatatcaattagtaaggtttaataattaatttatttaatcaattaaaattctattgttgacttggttaattttgagaatttttactatgttgggtgaaaataaagaagagaagaaaaataaaaa

SEQ ID NO: 406674 - DNA, 834 bp, Cannabis indica
aagtttactaatagttatgatctttctttttgttcaaataaataaaactaataagaatataaccttttttttcattagaattaattcttttaagattttcagtaataaaaaataagatacgaatcgttttaacaaatttgaaatagataatcgattttgattttaaaacaaaaagcaaacaagcacttataagcaatcgatcaaaataaccatccttattcctctccatatactggcttgaattgaaaccatgattcaaaccagacatgtttagtaaggattaagacataaactgcctgcaatcttaaatttaatattctttaaattacattgtatgatttcgccattgatgttcgtctaatactcctcttgagcactcttagctcaatagccttctcataatagctaaactaaaaaaaatttacacaaaagtatcgaatgatgtactctgtgtattttaactcaatttttacatcttgagcatactattcatttttcaaaattattttaataatatttctctttttttttgaaaaaaaaaaaactaatctcttatctcttatctcttatatctcaatttctcgtcttttcttattattctatattttaaaagaataaataatataaataaaattatgacatctaaatgttatcaagaaagatagaaaacttgatgtatggtaaaataaaaaaaataaagtaaaattttagtgaaatattttagaaaataaagtagagattatgggtgtacatcaaaccgctcaaaccgcccgcaccgcaccacaccgcaaaaaaaaatgcggtttgaaattcttcgcggtgcggttgcggttt

SEQ ID NO: 406675 - DNA, 1049 bp, Cannabis indica
ctagtttttattttgtagttacatagttgtgttctgtagttacacaataactgtttcagtaccatatttattattttatatttaattaattgattaattaaataataaattgataatattaaaattcagaatttcagaatttttattactcatgagaattataaaaaattagctaagtgtggatagtttttatttcttataacaattataaagaccattttgtccattttacttaacacttaagtaatctctaacctatgggtagtttggtcataaccaattatcttgaaataatttgtaaaactcaaaattaagtgaacttctcgaaatcactaataccatatactaatactgccatgaaatttctggccactaatcaagtcttcatggttgtcggacctgaaaatatttcatttcataaagggatattggcggtaaaactgcccgaactttatattaccctaaaccctaaaccctaaatcctaaacccacaaaaataaaaattttgactgcaaaacctactgaacccaggttccgtttttctcattacccttcgtctaaaaatttcaattgaatgacacagtagattgcccacgtctatacaagtatacacgtagaaaatttttaatggtcgacgtaatattaattattaaaatactataaaaataattttttatttttattgccaccaccagaacccgcctatgttccaccccagaaaagcccaaaagcttcgcccaaaaaaatcctcaattgctaagaaaacaaaccctgattggcatatagttaccttcgtccacaacatcgatatcgtcacttccactgttgtcgtccacctccgtcttcgtctcggtctctctcgctctctctcactccatctcagatctctctcaaattctccttcattttttttttggctaattagcaattttttcccccgaactttaacatgtactaaatcatgccccctgaacttttttggccgttaaaaattccccctgaactattaagattgttaaatttaaggacttttatctaattttagtaaa

SEQ ID NO: 406676 - DNA, 1290 bp, Cannabis indica
taaggagggagtctatttatgacataagttcaattttttagacctaatccaataaatattatctttgggcgtgacccgtggactagtaacaatctgttaaggattgttgattttttatttttctgtactatttattttctgctttattctgcaactacaaaggtgtattttgtagttactgaataactatttaacttgctttcaaaaaaaaaaaactatttaactactaatattataatttcacaatttactaattagtgattataaaacacaaatttcatattcaaatgttagttgggatttcttttatttatagagaaatttacagaaatactggaatttgagttaatttttacaaaaatactgtcacacgaaaatcttttaaaaaatactgtgtttttgtaaaacaccagtaaaacacaaaacagaacaactcaaaacaacagtagaacactagtaaaacactagtagaacaccagtgaaaacttaacacagtatactgcagtatgaaacttataaaaaaacacagtaaaaaagtaaaaaattccgcctgacagtatttttataaaaaataacaaaaattagtatactatgtaaatttcccttaatcaatcaagttttaattaacaaaattattacaatgtggttgaggttaacccgttgtgcgagtcttgcaatgcagcgagactcatttaatcttttgtaattctattttttgaataaagaattttgatatatttttaaaaaataaaaaacaaaaaataaaagtaaaaaattaattttgtgaaaaatgtaccatttagttataaagtttggtgagtttatttattttattttattgtaagtgatgcataatgctttaagacaatacaaatttagaaggtgtagtgagtggaaaagatgttgatatatataggagaaaattaacagaaaagcttcaaattgttcttctcttttacttgaagtaacctcatgaaatgtgtcattatttcttgagtgtttgtgtagtataaatattcagtttcaagcaaaaataaaataaaataaaataaaataaaggtacaatattatctacctcaacccaacacatatatagattagatggggcattctttcattttctttttgttttatggggtcagctgtctaaacaataatgaatgatatatatataaatatttatatatatatatatgcatatgattggaactagcataggatgctattctatatgatgaaacaatatatatatatatatatatatatatatatataggatatagtaagtta

SEQ ID NO: 406677 - DNA, 856 bp, Cannabis indica
  modified_base (274)..(274): a, c, t, g, unknown or other
aaaaaccaaacaaatacatataaatacagtaaatacttaaaaataatagaataaacgttaaaataaaataacttaacaaaactaatacatgaaaaacttccaactaagaataacacgtaccaaacagagtactaaataagtgacagtgtaaccatgcatgcgagggacggtactacaaaaaggaaagcaaaggttcatgtagaggcatcgaaaatagggaaggaagaaaatagatgtatattatgaactctaaaagaaagaaacatagaaaaanaaaaaaaaaaaaaaactttactgtattaatttaattttaaaatagaaaaaccaattgtagccaaaaacaattaatacaacaacttgctacttagtcaatacaaagctcccgctcgtttgagttgttgttgcgggccgaaaagcatagaagcaatttgagtcgcgaaagggccacttgcttaatcttttttatttagatggcgtttggtaatacttttttaatcagttttttatttaaaaattaaaaaagtaaaaaatatttttcaaaatcatgttctataaaattgtttttacctttcaattttttaattgataatcaaaattttgaaaacagaaaaaatcactttcaatatttttttcaatacttttttttactcaatattttagactctgactagacccagaccagatttaaactcaatcccggccctcgcattgaattcgactcctgacccgaactcgacctcgaacctagacccgaattgaataaaatcaaaatataaatatgaaaatgaattttacagaacacacttttgttttctgttttataattgaaaaataaaagtggttataaaacgcattt

SEQ ID NO: 406678 - DNA, 620 bp, Cannabis indica
ttgacagagttgaatggtcttttctaaatcaattgcttgctcatgttggtttccctacttcgttcatctctcttataatgcgttgtctttccacggttcagtttcggttatccataaatggttctctcactaacactttccattctacctgtggtattcgacaaggggatcctttatctccctatctcttccttttaattgctgagggtctttctgctgctattcgattgcaagaaactaatgctaatttctctggaattcagatctgcaggggtgctcagcccctgtctcaccttctgtttgctgatgatagcatggttttctcccaagttcactctcgagctagtgattcccttaatgttattctcaatctttacagcaaagcaacgggtcaattggttaacagagataaatcctctatccttttctcccctaacacttctgctgattcccagcttcaatttcgtcaatctcttcaacttcatggggatggatttattagtaagtaccttggtgttccccactgcattggcatgcattggcagggttactaattccatgttccattatctccttcaaaaagtctcttccagattaaattcctggaatgaaaaattctt

SEQ ID NO: 406679 - DNA, 760 bp, Cannabis indica
atcgaatctttccaagttcttcctaaccttctctaagtacttctccatttttaagcctttggcctggtattccccgaggacctagttcacaatcaatggtgaatcactatggcatatgaggtttttaactttcaacgtttcgacaatctttaagccaacaatcaaggcttcatactcagcctcgttatttgatgcgtcaaattgaaatctcaaagcatagtgaaacttaaagccttctggtgatattaatattgcccctgcacccgaaccttgctcgttggatgcaccatccatgtataacttccaagtttctgcttctcggtgtataggccgaatttcttctggagttataccttctattaagaagtcggccaaggcttggcgcttgatggatgttcgagggtggtatgttatgtcgaactgccccagtttaattgaccattttatcaatcttccaaaagcatctggttttgatgaaacttatatcaagggctgatcggttaacacttttatggggtgcgcctggaagtatggtcgtagcttacgagacgcgtggactaggcacaaagcgagtttttcaagagggggatatctggattctgcccctagtaaccttttacttacgtagtaaattggttgttggtgcttaccctcttctcatactatagctgcactaatcacatctttccagatagccaaatagagaaattgtgtttctctagttatttgttttgccaaaactagaggcgtcgctagatgc

SEQ ID NO: 406680 - DNA, 531 bp, Cannabis indica
tgacctctgttgtactaggcaagatctcctgaggacaggttgctatctgagttgccaactgccccatctgagtctgtaagtctttgatggatgatctagtctccgtcataaactgtagcaataaatctgtgtgaagacgagaattcccactagagccttgttgctgtgattgttgttggttctttatcaggttctaatttctttgctgatagaatccattattcctttgaccccctccttgattaaacccaaagttattgttttgagagtaattcccaatggcttttgcttcatccatgggcaaactattcacatctaccgggcattcctcataggggtgagagcctccacagagctcacaaacaacttgagcctgtttttcatgcacaactatcagttttgtcaaggcctctacctgggctgtcagttttgttatggcatcaacctcatgcataccagccaccttgtttgtctgacttctttcagttggtcactgctaattattcagggccatctcttctagcagttcat

SEQ ID NO: 406681 - DNA, 926 bp, Cannabis indica
aaaaaaaaaattaaaaagttttgaaatatttataatatttaatataaaatttaaataattaattacactatttttgtattatagacgtaaaatcattaatataaaattatattttagagacggtttttaaagtctttcagcaacagttttggcaaaattttctactgatactattttaagcgacgatgtagggattaaaaacaaccgatgctataggaaccctatggatacgattattatgaaaatatagcttccatagggtccctatgacgttagttattatgaattaaccgactccgtaattaaggaccctctggagtcggttattatgatataaccgactccatatgggcttcctataatttttttttcaaactttaaaattttgtatttgaacaattatttttttttaatttttatttgtaaaaatataatatatttttttcatatacattgttttactattaatataattaattaagtataaataatataagctttatattttataatatgtgtttgtatttttattttagtatcatttttataatttttttaagttatgttttgtataataattatattgaataataaataatatgtaatattttaatttttatgtaatttaatatttttatacatttaaaatttataatatgagtttatatttttttttagtatattaatatcatttttataattctttaagttatgtttagtataataattagtattttgaataataaataatgtgcaatattttaatttgttgttttacttaaaataaattaatagaatcttatatttaggatgtatttgttaattcttataaaagtaggttaaagaaagcatacctaattttatcgaaatttcagcagcataacggctatagttgaacgttttcaaaaaatttaaaactattaata

SEQ ID NO: 406682 - DNA, 766 bp, Cannabis indica
tataccacagtactctttgtcacgcatatttttgaacatggaagtaatataatgaattagcaattatcagaataaattcttgatcttgatttatgttccagtttatatttactgttgtaatagaaattgataccaataaagttctttgacaatgtttcacactaccttatttgagtgggagaattttaaaattctttacccatcttcatttggttgacacttgtgataggaacttaagaacactactgagaaagtaaatctaaccattcatatggatagaaataacttatcagaattatgagaataagatagtagaattcttgcatagtctattcgaatgacttgggcaaagattcctaatcctcataaaattttatggtatcttaatttgattacttaatctctagcaagtattttatacttcatttaaaatactagattgctatgttgatgacttagtctagaagtttcagactaagataatatgtcacaactagatatccctcaaaacaatagtaagaggttaaatgtaattttatgtataatttaactagacacctactgttgagtgggagccatctgagatgtaatcaaacaaggaacattaggggacagtcaagaaagatttatcaaagtgacctatatgttagataataaggaactatatattagtagtccttatatctacaccaactcataaagaattcgagatggtggttactctgggggtggaggagttattctagaagagtgtaaaaacccatct

SEQ ID NO: 406683 - DNA, 637 bp, Cannabis indica
tgctgggcacgagcttatgtcttctatggacgcatattctggatatgactagataaaaatgtatgtcccagatgaagaacatacaggcttcgtaaccaacatgggactctattgttataaaagcatgtcgttcgggctgaagaacgctggggcaacatatcaactactagtaaatgaaatgttcacaaatcaaatagggtggaacatggaagtttacgtcaatgatatgttggtgaaatcaacaaagagtaaggatcatacgtcagacctcgcggaatgctttaaaatattaaaaaagtataacatgaaggtaaacctgaaaaattgttcctttggagtctcctcgggaaaacttttgggattcatagttaacgcaaagggcattaaggtaaatcgtaaaaaaatcaaggcattaatagacatgccatccctaacaaagcctaaggaagtagaggccctgacaggaagaatgtgagcacttaacatattcatttcaaagtcaactgataagtgtgtacccttcttcaacatattacgaggcaacaaaaactttgagtggacaaaagaaatgcgagtagataattaactaagagagacgttatttctttatttagtccatctcagaagatgcgattag

SEQ ID NO: 406684 - DNA, 511 bp, Cannabis indica
aagatattgaagtcagtaccaacctgacaataagtgatcaagaaactgatatggaggccaatcttgcttttcgaaggttcagacagcaacaatttggtggtaggggaatctcacaattcaacaacaactcaggtcagtctggaaatagattctttatgcgaggtaatgagtctgcaccttactctaatactggatatggaggtagaggtaatttcaatcctaacagaggtggcagatctgctatagctgtgaataacaggccacaatgtcaactttgtctgagatttggacatactgtccatgattgcttttatcgttttgacaaatcattcacaggtcaaaacttaggacagaacagcagcacacaaacacacagcagcacaccactacaacaaggtcaacagcaggccaatctcaccactacaggtgttgctagtgatgcaaactggtatccagactcaggagccacaaatcattgcactccacaagctcagaaccttgctacttgctt

SEQ ID NO: 406685 - DNA, 559 bp, Cannabis indica
taaaactaaaatactttaaaaaaatattcatatatttttaccccaatctaatactttttctctaatatttatgcatttttagtgaaatttatcctaattctattgaaatttcgacaacataacaattgtaatcagacattctcgaaaatttcaaacatgaaaaaaatgaaaaacaaaacttacacaaaacaaacaaaataacattaacaatataaaaattatacgcacatccgactgcaatacaatcactcataaaacctacttcactgcagatgaatatttaagatattcaaactccactaaataaagaattttaaaattgtagtgattatatctttctctaataaaactaactacttttgcgctcttcaatcaacaccaagaattcgaaacctaaaaaataataaaagtattaatattgattaaattttaaattttacaactatcatcaacttatatatatatttatgaactaaaaaatacacacatatatatatatatatattaccgataataaggagcctctctcgaaagatcgtacaaaaaaggaggaggagct

SEQ ID NO: 406686 - DNA, 960 bp, Cannabis indica
gactcagatttttaggcttgtctatatgacaggaagtctaagtctaggatggtacttacccgttgggggtggaggcagttgtttggagaagtgctaagcaaaccgcaacatcagactctaccatggaggccaaatacatagttgtcgttgaggctgctaaggaactattctggcttagaaagttcctctcaggacttggtgttgttcctggaatggaaaaaccacttgtttagcttagtgataacactggagctatagccaacaataaagagcctcaaagtcacaagagaagcaaacacatagagaggaaatatcatatcatcaaggaatatgtggcaagaggggatgtactggtggagaaagtggatgccgaagataacttagctaatatatttaccaaagttttaactataactacatttgaaaagcacagactgaatttaggattaatggaaatgtactgatagttctatattagtgcaagtgggagtttgttgggctttgtgccctaaataaaactatatttgaatgtaatcttttcgattcaattattaataaagaaactgttatacccgaaattcggctaccatctcagtgggggacacatgtcaggataaaaggaatatggattgatggagtcgctttttatggaataactcattaattacgtaagtatcagagtatatttgtaacctgctggctgtaaagtcttatgtgagggatcaatatacaaactgttgcttagtatattagcgagaaaccatatgtcactgaatgcgaataccgaggcatcaagtacactacatctaggaagacaaaagcgacacatatcaactgcgaaagcccttagcgtataatgtacaaactcagtgtaacagtcgggttggctcgagacctagtaagcaagttgcctatctcgctatgggaaggcttcctgtaacttcacccagttaacttcag

SEQ ID NO: 406687 - DNA, 933 bp, Cannabis indica
gaaagtaataatatgtaatttttagttgaattgagtaaatatcctttatttaattaatatcacatttgtttttttaatttgaagagacaaaaatgaagagaagaaagagaaaatggaagagagagagagttaacatataaaagagactaataaagaaatagagaaaaaatgacataagcataaaagtatttttataaatagagagttttttttgaaaaataaaattgaaaaacagattttataaaaaattaaaaaaccaaatatatataaaaatagtaaaaaaaaaaaaagaagccaaatttagcatccagtgtaagaatcccaattaaaaatgctaatataagtatgaactaaaattattatactcggcatccctttgacaaacactattagacctgatttctggtcttggaaagccgatcatagaggagtttttactgttcgaagtgcctaccaactgctacaaactgaaaaaccagcagtcccaacacagaataattctgatttttggcgtaaattctggcacttaaagatcccaccaaaggtgctaaatcttctatggcgtgctatcaccgactcccttcccacatgtgtgaatcttgtaactaaatatgtgcccatttctgctcaatgtccggtctgtagaacccaacccgagacagccattcatgcacttgtgcattgttcttttgctgctgactgctggagatccttcggtcttcctataaacgcagttgcttcctcttcttttggcggctggttcgaaagcttgtagcaaacaggagacaatgactaggtttgtaaagttgctatgttatgttgggctttatggaaatctcgcaataatacagtttggaacaaaaagaattcttctgtaaatgatgttcttgtatctgcttctattactcttgatcactggcgaaaaagctcagg

SEQ ID NO: 406688 - DNA, 980 bp, Cannabis indica
aaaaatatattcatatcatcgagtatttttaatagcatctttattggagatgttctaaggctcattaacaccccacgtaaaaaaatttgtcttctctatcttctaatcattttttagcttaatctatttcttaatcggttctaaaaaaaattggtaaacacaaattttttaaaatagtgaagaaaagaaatatcaacagtacaatttactaagtaacatgaaaaggaaaaaaatttacaagatagactaaaagtttaaaaataaattacaaaaatacttcaatacgaaaaaaatttaatttttactctgtgaactttttcatttacaaaaatacatattcagtaaaaataataaattattttttatatatataattgtattagagttgtcataataaagttatttttctgattgttttatagttgatttatagttgtcatggggttaatttttaattttttttagttgttttcttattttttaccgagcaaattgtatttttgtaattttaaaactttaaaaatatatttttgtgaataaaaagttcagatcgtgaaattgtaaatataatataaaaagaaagtatttttgaaaatttccaaaaaattaatgtaaatgtttgaaagtaaaaaaaaaaatcacaaaattttaagaaaaaattgcatctaacaactaaaatttgaaatttattgccataatattgttattcaattaatttgcacatataccgtttcttcaattaattttattgtaatacgtatatacctataaaaatgcatatgttttctttccaattacactgacccatattctttacttttgcttctttttttttttatactaattttctttttctcaatgcatgtgtactgaccattttttctctctcaatatatatatgacatatcatcatatatacaattatactcttattttctcatgccatcaaattatttctttttttttttccacacatatgt

SEQ ID NO: 406689 - DNA, 609 bp, Cannabis indica
aaaaaaaaataaaaaaaaaataatgaatttgaaatgagtaacatttactaacatagtgttatgatttagggtcatttgctatttttttttaaaatgaggacataaactaacatactcctatgatttggggcgatttactatagtttccccaaaaaaaaactaatgacaaacatagaagaatgagaaaattacactctataccctttttatattgtcgtcttttattcttaccctcttttttaaagtctatcatttttacctctttttttaaacattgtaccaaattggctcctgtcacttcaagatattctttatataactttcttatgttagggtattttgggtacaatacatataaaagaggtatatttcaattaaatataaaattagaggtaaatttgattaattgattagtaaaagtggtatttttcaacttaccccgagaagaatcccaacaaattaagagctttcaatcaaacaaaaaacaaaaaaaaaataagccattttttttgttgagaaacttacaaaaatactaacattttctcctatttttacaaaaatactgccacacggcaaaaaaaaaatttactgtcttggccaatttttttt

SEQ ID NO: 406690 - DNA, 662 bp, Cannabis indica
aaaaaaataaattttgttcatagttttgtttggatttatttttaatattgtaaattatttaaaattttttaaaaaattacatttttgtaattataatactaattaacactcttctttctttttaagtaaatatacttaatatctttaaactattgtacttttaaaatattaaatggtagtagtgattaaatttacatttttgcgataatttgatttttggaaaaaggtaagtgttaaagtaacatttgatattatttttttttttgaggaaaaatctggtattataaattcaaagagtcatatttacaacaacaaagtgaatggtgggaggaaaaccttcacaccacttacaatcattatccaacgctaaagcttgcttagccaagccataggcggcttgattagcatcccgacgaacatgagatacacaaacattagggaaataagataattgacttttaacatcatgaattaaatccttaaatgctaaattcttagaggctaaaccagtaatagaattcacaaccatgacagagtcagtttccacataactgatttgaagctgcaaattctgagcccattgaagaccatgacacagggctttagcctccatttcgtgtgactttaagtttccagcaattgattttgaaattgcagccaca

SEQ ID NO: 406691 - DNA, 933 bp, Cannabis indica
gattataggtctgccaattcggcggctcattacttgccaaatatgctctctcggtggactctgtttgttcttggttggaggaaatgcctccccccttaaatgcttttgtattatgattattcatcaaatataaaatgcattttcatactacaaaaaaaaaaaaaattacaataaattgagctaaaatagttttggtgtgttattttttatttttgtcataattatattttatatatatataatatctacacatgatttcacaaattttatattttaagctatctaactaaattatttagtatattatattacacattataaatttatttatttttttacatcacaaaagtatatacttgcaggtgcaagctttaatatatgatcttaaaaaaaaaaataagcatcaacaataaaactattatcatatgatgaaaaacaatattatgaaaaataatttattaattattaaaaattaaaaagacatgacataaatgggaacaaaacaacattaaattttcaattaaaattatttccactacttaatgtatttaattgggattgtaaattcccatattcatagaattctgcccatgcccatatacatacggatattggttaggaatcataaaattaactcccatattcataggattctttccatattcatatggatatggagtaggaatcatagaattataataaggcatccaataattgggatgaacctcaaatgggttgggattgggataataaatttgagaagccaaatcgggaagagattggttcaagttgtttgccgcggtaggaatgtttctgttccttctatttgtctttacttcagccatctttatctctatttgttttcctttcagattataaaacttattttccaacactttttctacagcttcttcagaatcaaaaagtcacaaa

SEQ ID NO: 406692 - DNA, 660 bp, Cannabis indica
aacagaatttttagcttaacgattattttaggatttctacattaactttaacagaatattctttattaattttataatgttattatatatatttaaaaataagttaactttaacaaaatatcttattaattaatcgaatatatttttattaattttataatattattatttatatttaaaaataaaattaagatgttttatataaggaaattttaataaaaatttaaaatatttaagatattataaatatttttaatcatattttaaaatttattagtttaacattaaattaaaataaaaaaaattacataaatattttatataaagaaatttaaattgaaaatattataaatatttctaaccatatttttcatttttattattatttattttatattttaaattgaaatggttataataaagaattgattgctttccattttagttgtggtaaatcaattcgcacaccatatttttcataatatttgggaataaaaaatttttgtatcaaatttacgaatccagcctatatatagatacacttaaatttggttatgtgagttttagttaatgttgaccgaagttttcggcaactaataaagtattataaagttagagagctgtaagaaaattagagaagaattttacgtggttggggcg

SEQ ID NO: 406693 - DNA, 506 bp, Cannabis indica
tgattacacatttacacaatatcctgaacatacaattctggtactttataaagtacctttttttttactactcgttaaccacaagctgaatatgtcactatcgttgcccgataaagcaaatgataagtaagaaacctatccgtagtttcaagagtaattactcataatagtaataaccgtttctaaccctaggtcataaccaaggctcaacaaacatttaatcagaatcttgataataattaaggctataaccattcaaccgctaacatttagccacatatggtacttaccacttttcttacctcaattcagaactcaagcatatgggccgacttgagtggaaagcaaattgggcgatcccggttaattttaccaggatcttagatctactcacaagtatgttgatttaacaacctacatatgaacttctaaaacgataaactaaacacataaaagttaagaataacttacagtgatggcagcagaattaagtgtctccttccact

SEQ ID NO: 406694 - DNA, 564 bp, Cannabis indica
tgtactgctgagctgacacaatggttgtgtcattatggtatcacccaaacatatacaatcatacacacaacatgcatatatatatatcatacatgtatacattcgcataatatcacatattatacacagttcataccttctttccagattcaagtgagttggcaaacctgaacggaaagtctcatgatttgtcagtacactagatttagactgacatgataatcagcgatagagcttacttacaccttggataagtgttatgtcctttccagggcattgaaaaagtatactaggatcagatgtatgtagtatacatcggactagactaatattgaacttggataagatatcataaacttaccgttatatctatctaagtcaatattagttagttgattttaggctaatagatcttaatattgatatggttaggttatgattacatgtattatctatgttcttagatttgttcattaaatctcgatcggccaatacttacatcttgcaaacatgatagtgtaataagtgggagcgctaatcatagaaaggagataatacttatcc

SEQ ID NO: 406695 - DNA, 515 bp, Cannabis indica
gatagaagttatggggtttatggaggccttaagctggctaaaaactaattcttggtatcaggcaataatagagatcgattgtctcttagttgtggagttcttaaaaagtaccgtgagtttggtttctttattttatttggtattgtgatcaaagaatgtaagtccatactttgagagtaaatgtttcattttatttggttaagcaattagctaatgtgtttgctcatgagattactagagtatctatgttttatcatgattgtaattttagtttggggaatatccaactgtattgcttctttttatagtacctgattttgaaggttaaataagtcaaattttcctttcaaaaataaagatggaagtttaaaaagttgaaatagaatgttgtaattagcattattccttaaggaaatatgttttaggggaagaatttattagcctcatcaatgtcaagacccctgtgcctaattcattacaagcaattatatgagaacaaaaaaagggaaataagc

SEQ ID NO: 406696 - DNA, 596 bp, Cannabis indica
ggttgataatgagagacctgaaacatatgagtaattatatatataaatacacaatctaacggtttctgtggtaactttgctgaaaagtacaacgatcaaaaagcacttatggtataaagtagagatgatatcaagaagtaaaagaaaataatcaaactacataagataaaatttaataaatacagtcactcaaaaacatacaggaggaagcaaaatattttagtcaacagaattcaaaattatttctcagcaacaaaacgaatagattcatatcttacaaccataggaacagatcacgacgatataaacacatttcggaacagatagagagtcagcgcagagagggacagacgatcatttccatgaacacaaaacaaaacaaaggagaaaaagatattaaaaggagattgactaaccatatgtactctgcgattggttttcgaccatattgatcagctatcattccccaaataatggaagttgttgttagttacttctcctaacatattatcataatgaaaagaaagaaaaaaaaattccatttcggcattattatttcccttcttcaaaccataaaaccctagtttaaacgaata

SEQ ID NO: 406697 - DNA, 641 bp, Cannabis indica
cctagtttataaaaataggccatagaacgatttactctcaaatgttttagagaggaatatcattatgttagtcagctagaggctggcctaatggtgttattactgagacaggaatacctaaccgaccccccataccacctggtgctaaggactggcatttctgccataagatctatttggtaagatttgttcatcctcggtagggggaaatccatccttgttcccaatgaacttggttggactatttgcccattgtctacttggttgtagactctgcccgatctgtcaatgagcctttcttgtagaggatttttaattagatcatgtcttctcccaacagttctctcattaaactcattatcaggttactagtttccctattacagtagtccagctccgcctgatgggcctagaggatggcctcttggtcatccatccaccttaggaattcatgtctctattgggaaaaagcatcgtaaccaacaacgcgtggttcttcaatttggctgacttggcctacgaccttctaagcatggccaattcaatgtcttctcctaggtccacataatgctcgccaatagctagttcgaccgattctcggccctatttcccctacaatagtaatggggaacatagtcagt

SEQ ID NO: 406698 - DNA, 661 bp, Cannabis indica
atgctattttttttaataatgtaaataaagttattgttgcatgttcgtgttgtacaatgatccttctcatgcgaaagttggatacaagttagttagaattagttgacagttatttctgttaactgtcctagttagtcacaagttaattttctattttgggttttaattcgaattgaataaattgaaagagatcaatttttttagagacatagtcttgtacagtttctactttctctctctcaatgtaattctctccaaaatcaataaaacaacttctcaattcattgtttgctgctggtattgctactgctgttgttggtttattgcattaacattcttgttggtattgttgttcttgtgtttcgctcattgagcatctaatcttgattgttaagggtgatgatcgatcacaacaagtggtatcagagcaaggttttagctcaatcaagattcaaattcgaagactccaagaatcatcaagaagatggcagtagcactatttgagattgacaagttcaatgggacaactaatttcaggttatggaggatcaagatgaaggcattgcttgtcaacaatggaatttcagaagcaattgatgaagagagtcttaaggagattgaagatgagaagaagaagaagaagaaggagatcaaaactaag

SEQ ID NO: 406699 - DNA, 866 bp, Cannabis indica
ggagtttgacaaagttataatatatataaaagaattaagataaatagataaattgttttgtaatatttttatttaaattttttaattataaaaataaaaatgtgttctataatacttttaaagtatattctgttaaattttatttttatttggtaattttatttaagtcaggttttgaagctgggtctgaggttaggactaggttcaaatctggggtcgattctgggtttaatttttaaggtataagttagagttgaagtctaaaatataattaaaataaaaattgtttaaagcaaattttgaaagttaatttttttattttaaaatttagattcttaattaaaaattaaaaagtaaaaacaatactaaagtaattaatcacaccatatttaattatatagtattacacattattagtatgtattttatgaggcatagattaagagtactattattattattaattcttattattatatgggaattggatgttagtttttgtcccctttttatttttggcaagtgaaaaaattataatttttttttattgtctatcatattatatataatagggtaaatagcagcataagtacccaaaattttatatttgtaagtgtcataaacttaatgtttatttttagcggcataactacctaatgtttgtaaaaccgtaattttctttcagttttgtcagtacagactctgttttgaatttattaaaagaatatttggaagtaactgatactacgtacatattactatctagacccaatgatcaagaatttagaccttatatgtgccatgtttaagacaataatagagtctgtaattttaaaattaaacaaaaattacagtttacaaacatt

SEQ ID NO: 406700 - DNA, 723 bp, Cannabis indica
atagttatatttagatattatattattttaataatttagtccacctccacttaaatgaaattttggattagtgaataataatatgacactttgttttaatagtaaggatatttaggatttttattccacaaattatgacttatgtattatatctttgaacttttcaactcgttaaaaataattttttgaactattcacagtgttataattacaaatatacatataaaaaaacatatattttactgattacttatttttatattattattatttatttttttcttccaaaatatgactttttatgcatttggtatcttcaaattattttttattatatgtaagaagaaaaaatagaagtatataagaaactttaggttgtttaaaaaaattataatttatgtggtttgctagcataaaattttgaaaatacaaaatatccaataaatataaatttttaaaataaaaataaatatttgaatattagttatttattataatataatttattttaaatatttttatttttttagtattatattataaataagtaaatgtattttagtacaaataagttaattataaagttattctaaaaaaaaatattatagctttttaataaaaattcataacaactctttcaaaaaaatttgagatttacccattttagtttttagttccagttttttattgggataattacataagacactattttttgtaaaa

SEQ ID NO: 406701 - DNA, 577 bp, Cannabis indica
aattttttttaaataatataaaaatacggaatatggatgaaattattgaaatcctgaagtgcataattgtaaattgtgaaaggcaatgaacaatttgcatcccataaaatgataaatacacctaattattaaaaaaaatatacacttaataacttttaaattacttttaatattttttaaaatttttttcctcctattattttagattaatttcaatacttattttgatttcattttcataattttttctaacgcatgtatttatatatttttttttctaagaaataaatttcatttataatttttcattttaattttttgtcataatatttaaaatataatttattctaatatgtaaattaaataagcatcaaaacaactttacaggttgcatcaactctaagaaataaaaaaaaaaaaaaccaataatctataaaataaatttaaaagcatctacaaaatatttacacaccaactcaaaaatatatttacaaataaaaaactaaacatatacttattttctattagttgaacaactcaataacaacgaatatacaactcaataacaatccacttt

SEQ ID NO: 406702 - DNA, 766 bp, Cannabis indica
caaatttaaaaagattggatacagctaccttaactgtaaaaacagtttggttggttggagctaaaaaatgttttaactgacagtttaatggcaccgtttggcttagcttttattatttttttttttaatttttagaattaaaaaagtccttctaaatgtagttagaaaaaaaatgaaaagttgttttcaaaaagttaagatttgtaatttctaataacaggacttttgaaaagctatttttaaaattaaaataatttacaaaatctcttacttataagaatttttttaatgatatacaaatacttgctaggtaaaaacttaaccaaataaaatctagttcaagacgtcaaacctaaaaaaataagggttgagatgcaaaatggctttaaatttggtaactaagttagtaaatgtccactttttaaaaaaattaagaaaatggccaaatctaataaattagctaataaaattataaaatagattatcacatattttttaaaaaatatatataataacaaattaagttacataatttttttagtattgcatattattatattgtaacaaaaataaataaatatattagatcatttaaatatatacagcagtattagatatatcgtagtactataaattaatataccgtagtaataaaattatataccacaaagaaattataacaatactaaattaatactcaaaatatatatatatcatgctaacaaaattatatatatcatcattaaaatatgaatacataccaaaa

SEQ ID NO: 406703 - DNA, 605 bp, Cannabis indica
agaaatagagagaggaaggtggtagctcgagatgatgagagagatgtggagagagaaataagtttttgaaataaataaatgagaaggtatttttttttaagtataatgtgaaattattaggataaaatgctataaatttattagaaaagttatttttgtaataatggctattatttagaaatttttacactaaaaatacaaaaggctaactttattacatatatactacaacacggtgaaagcaacttttatacacttttgcttaagttttttacatttttaccacatgcacacacatatcatgcattttgacacgtgagtgacacatatcatcacatcaatcactctatacatcatttccctcttttttctcttctttttcctattattttatatttcttttcaatttttttttttaaatatcaacctccatagttgaacacttccccctccacaatcccaactccattttccatttttttttgttcttcaaattttttttcaactcccattaaccgaattccataaccgttttctctctttttatttttctcttaatccatatataaatatggctgtaacttgttcttcattaacttcttccc

SEQ ID NO: 406704 - DNA, 755 bp, Cannabis indica
ctgtttgaatcttatttttaataccttatttttgacgcattaaattattctaaatttttaaaaaatttacaaaatatcttaaataattataatacccttataatatatatatataaatttaaattaaaactaatgcatcataaaatttcctataacttttactatctgcacatcataagatgatcatttccttttctatttttaattttatttctcattttcagtttgattttttttttttaacaaaaagtaaagaaatatcgtgatagatgactgattgtatctctaaatactatgaacaaaaaagtacaggaataatatcaactaattctaaatataattttgtaatgtcaattattgtgacatgtgtcattgtaatttacattaatttcatgtcatcgaataaatgggactacatcacatcattcacgttatacactctaaacaaaaaaaaaatgttataaataacattattgcttacttaattatacaagacaaccataattatttatgttacttatttaactagaaagtgtaatcaagatgctttaaagtagagttaaaaaatgatgaaaaagtgtaatcaagatgctttaaaattattgttaaaaaacaatgctttaaaattgtttatttttttaataaaccattttgaaaactaaaatttcaggttaaaattatgctttttttttttggttcaattattaaaattcttctcaccaaaacaaaattatttaatttcttcttccttctat

SEQ ID NO: 406705 - DNA, 788 bp, Cannabis indica
cagtgcagatgaatagagtggaaagttataagcgtttccagcagctatttcaacccaaactgctgctgctaaacccacccatggtggtctacttcctgcttttaaaactggaccagtcatcttcaacaaacaccagtactcctctgctgtgaatattatactgagtttctgagagaaatgtatttatatgagtttttgctaagagttgcatagtctgagctgaggcaaccatttacacgtggtcccctaaatgttaaaaaacattaaatagaaaaggttggatcttttgacttattatatatctaataaaataaccataatcatcaaccatgtggtcttaaaaaacacaagaaaattaaagaccagaatcaatttattttatttttcaaagttgttaatttcagtttatgtttagtacaagccaagaataagagtacgaaacagaatctggggtcagtaaaatgagcaaccccattataaattctttctaggatgagcttaattgttattataaattataatctttaatttaacaaaaattaatagtctctctctctctcttcccatttgaaaaagaggcatggacttaatatttagctaccctaatattaagagaactctagttttgtcaccattttagatttgattgtattgaaaacatttgtttttgttttggtctagaggacagaagacatataatataattgaatttgtatgataacattattgaatgcctttacctacctaactaaccacgtttcactcccagcaggctctgcggagtaact

SEQ ID NO: 406706 - DNA, 708 bp, Cannabis indica
tgaacaaagcttaaaaatacaacttaccggagaaagatcccaaaggccagtggaatagaacagctcaccatcacggccaagctccttgagctcctcatccatgaaaggaaaggctctctctatgtgctatgtgctgcctttacagccctctgccctacaactgagcctactccttgatcgggcctccaagcaccctatctcgtaggttgtatcacaggctgccaagttggtgcaggccctgatggaagaggacacagagatgacccagcagcatctccgccacgagaagtctaggccaccttggacctcactcatcccgtgggctcatctgaaggtcccctagtgaaaactctcagtctggaagacatatctgcaaaaagaaagtagcaaaggcagagagaaatcataaacattcaatgcaagacaagaatatggtgttgttgactgaggttttcggcaaccaatcaaataatataatgagaagagttgtagaaagtttaatgcagaagattttacgtggttgagacattaatgggcctcagtccacgagtttttggtatttaagagagtgtttattacagagaatgttcttggtggatctctctcctcttttctctcttcgattccttaactaaaatcgatcaaccccttttcagtctttttctgggtatttatagtgtttttctggggggatccctaggaagggat

SEQ ID NO: 406707 - DNA, 652 bp, Cannabis indica
attttcagcaaatattaagattcaactatttttgaagaccaaacaaaacttctaaggggccaaaactgggacccaacgcctaggtttacacttggcactaggcgtagtgcccaggttgatattgtcaacctgggctatttccaatcagtttctcaaaaaagtatttcaggcatttttttcgtcatcataaataatgaagattcaagcaaactcaaggagaaaaccacaaacccgagggcctcaaagctgagcccagcgcccaggttgacaatcaacctggtgcgctggttttgatcactcaaatgccaattctgatttgagaattctctccagaatggtcaaaaataaggtaagagaccttgtcctcaagttttagaaccttggaagtatcaaaacgacatctcgaaagctccaaaataagcacccagtgcccaggttgacaaatggcttgatgcgttgggttctgcttatctgattctaatttcgtctcgaccgttcatctagtttttcacaacaactaagatcaatgaagtcagagaattcaacttcacaacttcgcatttctcatttccatcatgggaaaaccactcagaaatgaagagttttgagtctctcatttccgcagacaaaaacatcttcgatttagtgacca

SEQ ID NO: 406708 - DNA, 840 bp, Cannabis indica
cctcgaatataacgtgcacactgataaatttattaatcgttctggctaagcttctaactttgtcatatttttacagtttcgataaatattgtataattttttttttttaaataaaaagttcttctgaaagtgtttgtatatcatttgttcaaaaaatgcacataaaatcttgaagaaaatttaaatgtctcatcactattgccgtcatattcctttttttgaaaagacacatatcctctgattttggcgattttgcggtttcgagatacatcataattaaattaccattttttccactttcgcttttaatcatgtccataggatcaaatatgcaaaaaaaacattttccacttccacttcctcattttctccataaaatttaggcgggcagtaaaaaaaattgatcaaaaaagtattaattgtataatgatattcctaaacttcaatatgcaaccaaacaaaagaattgaatgaagattgtttttctctccattccagaccattccattcaattacctccaaacaaatgtcaccttaattggtgggttacacgataagtttgttttaggcctcattaatgtcacattaagaaatcttattgggaacttaattggagggttacatgaaaagtttttttttgacattgtcatttaattaattcatatgtaatgactaagatttatcttcattaatctgacagaaattgattttcgggaaactaatttgatactcaatgtttttcggtaattatattttatagcaccaatatgttatgggttaaggatttaaggaaaccttacattgggtgcagcggaatctaatgactccttccgttcagat

SEQ ID NO: 406709 - DNA, 586 bp, Cannabis indica
acagggccagggatacaaccagcaccatcagcctaataacccaaacaaccaggggttacaacctaatcctgtggaaggagaggacatcctggttatttcgggagggccgcatattgcaggggaaagcaataacgctcagaaaagatatgtgaaggagataaagaacgagcagtcggtctttgccccagaaccttccaagaaggtgaaaaccgaggaaccccccattacgttcacagaggaagacgagaagaacgtgagataccctcacgtcgatccgctagtcataaccattcaacttgccaataagaggatcaagagagtgttaatagacaatgggagctcagtaaatatcatttataaggagactctaaagaaaatggggctcgaaaaggccaagttaaggccttgtatggtgaatctctgcagattcaccggggatagcatcgctagccttggcataatcaagctcacattaactataggtgaggcacctttaactgctactatgatgcaaaacttcttgcttgccgatctgccctcgacttacaacatattgttgggtcgtccagcactgatcggactaggg

SEQ ID NO: 406710 - DNA, 1474 bp, Cannabis indica
gttttttttaaaaaaaaaatataaggttaattttagttgatgacatctacttaatttgtttaataaccaataaaagttttaactttttgtgtcagattttttttttttaatttatgaaaataaaaaattgaatatgctacatacaactacatgttaaacaatgttagactctcaaatgtcaaatagatgaagggctaaaaaagttttatgtatagtataaagacaaaaccaggtcactaccatagaattattcaaaatatatattcatatatatatttacataaaaaattataaaatatatattttaaaatataattgtattatatgtattagacttttaaattactattttctttacattattcaaatgttaattgtatatataatttttttaatttttatatataaatatatgtagattggattagattagttacttttatatgttaatcaatattcaatctgcacaagtacggattttgaattttccaatccaatcaaatccgcacaagtgtggatatctgtactttgcagataagattagatcagctattttatgacatccctaggctagagggctagttggggggcttccaactgatctgcccagcgaggaacacctagcacatgcctgattaaaggaatgccacgtgtcgtgattacattacgctaattctgcttaatcagttcaataagccgagtgattaaaacaagacaacttaattaaataaaataacttgttataataagatttatctttaacttaaaaccaaaataatattaatacatattcgagatcttgtaaaatctttttgcaaaatatgataagttgttgtttacatacaagccagcctaagcggcaaaatagaatttctatacaatccccctattggactcaacttgtggtctagcttggccggaacaattaaccatcaaaaccctcaaactcatggttggcatgacactgctttacccttgcttgcacaatagagcacccgtaagctaagccccaacaagaaagcatacatatcacacttaatatgccactgcgtaactgtgccactgtagtaatataacacgccactgcacttataatgatgtcactatatcttatgtctatattgcatagacacgacatgttatgctcacacgtctatttattacataagaccttatcaagatttttctcgattttggttattgagtctaatctagttataccttgatcgcataactctcaacaaataattaattagctatgccttaatcgcataaccttgtacatatactcaatgggaaatttgacaatatatgcttaaaaatgcataagaatttaatactctaaaattaattaaatcccaaaataccctcctcataccttctctctttctcttggccctctcttcctctctctctaactctcaccaaacccaaccaatacccacgaccactgaaccagacccagaccaaaccc

SEQ ID NO: 406711 - DNA, 548 bp, Cannabis indica
aagaataatctatcataactcccccaccaccaccactactgctctctcatgagtttaattaaaatttacattttctttaataattttaaaattaatgtcttcttaatttttctttttctttcttaattttttctttttaagttaaaatgagttttttattgatggaagtgtggagtttcatgttgaaaaattacaattaatgatgcataataaaattaactttaactttaaacaatcaaataattatgataagattaacaaattacaaaacactaattgaagaaaaacagagatgaaagagtatgaaaaatcttaaaaatgattaaagcagtaaaacgataaaaacaacaccccaagatatatacaggttcagatagattgatgtgaaatatggctctactccaattttggaacactactaaatcttctttattgattgagcaagaataaattgtctgttggattctcttaaagtgtttacactcttacctaagaattttcttcatttacaagagattcttcatgcaaaacccaaattcaatctctct

SEQ ID NO: 406712 - DNA, 778 bp, Cannabis indica
tgcaagtaaactctgttgtagattatcatatcagtaaaaccctgtgtctgataaatctaggaaactttattcacatagtcatgtttactttccaatatgttgacaacacaataaacaggatcaagtatgtgaaaagggtttcagatgaattcatacattatgtacatataatcatgaaataaatcatgggaaccatgcaacattaaatgttatttctgatctatattaataagtaaatctgattaaattaaaatgagttttatttagggcataaaacccaacataaaattgctggttcattggtatttctcttaggccgaacctagagagaaagcaagagagagggaagtttgatatttttttttatttttcttagtttgactaagtttaacctctatctacacatcaatttagcttatcctagggtattctattactttctaacttatctgttggaagatagataacataacaaatccctaacgaaccttggcataagaccaaaatgccccttacttacaaaccaaacaaactttaaccttaggggtaatttggtcataaccaattaccccaaaatacctcgacactctcaaaattaactaaacttcctagtatcattaatatcacatactaatattgttgtgacatttctggccactaatcgagtctccatggtttccgaacttgaaaatatttttatttcattaatagcatgtctattacccacatattctaataaaatttccgtaattaataaattacgcttatttaatcactt

SEQ ID NO: 406713 - DNA, 397 bp, Cannabis indica
ctaagttcaagatgtcagtatggaagatgataccggacagaagactcgttggctcttatcaaatattttgagacacaacttgatctctagaaggttattgatgatgtgcgatgccgcatattcccagccactttgtcgaaaatagctcaacaatggtacttcaaactcaccccgagaggattcaactctttggccaagttctcacgagaattttacacacaattctcgtctttgagacttgtaccatcgcaactagaagacatcgtcaaagtcaaacaacgaccaggagaacctttgaaggattacaaccagaggttcatggtcgaggtgttggaatttattttaccaggatcttagatctactcacaagtatgttatttaacaccctaaatatgaa

SEQ ID NO: 406714 - DNA, 852 bp, Cannabis indica
ttttactttttcagggtttgatgttgaacttctgggaatggcttcgtgtgagtttctgtatgatgtattaaatttcctctttttcgcacttagatcgtttcttcttactgcaattttgttgaggaaccatctttatcacacgtaatgacaattttagggcttagagaagacttttggttttaccctttttttttcccatttctctttactttttttgcaacgtcactatctgtgggatacttgcacctgattcttgtcaaggaaagcctcttggggcttttcttttttggtcaagtgtccggagggggccgtctttccagcggttaggggacccccattccctttttgaattagggtttggtttggggcctaactgctggatttttttcaatctttctcagaaccaaaaaatgtctatctccgcgtctggttccaagtcttcaaagagaggagaggtacgtttggccaccctagagcaggtcatgaagggtcccgtggcccaggaagggtataagtcccgagccaacgggtgggaagcggctgagcttcattctactctgacttgcgcccaccagttagagaagatcgtggtggtggccggcatcaaaccttcaacctccgggacctatcaccggctgcctcgggacgaggagacgcccaaccataactatgggggctttggagcctggagccagacacacctgatggctggggccatgctccctctccaagattactttattaattccttgtatttgtcggccttgcgccataccaactcattccccaagcttaccgcctgctttcaggcttgtttattttttattgctgcccgcagctggggctcgccca

SEQ ID NO: 406715 - DNA, 969 bp, Cannabis indica
tatcttaaacccatacttattgtttccagtatgaacatgaacatgacccataatcccacttttattacttggatcaacaatcttcgactggtcaatcgaaaccttgttgtagtgtaccagaggcctggagctctctacttgcatggacaatagtaataataatgacaacacaagaacaataatggtgtacatcgaaagcgacatgccgtatgtatagccttttggatcttctatgaattactctgcttctcctttgaatatggaaacagttgctataatataaatataattgagtccgagtacgtacttgagagaaagcacccaaatgaaagtgtacgtcttggagatctgttttacatgtatttatgcaaaagaaaatatatatttatatcgagagctttttagttaggagcctacattagcagcatttatgttttttaaacatagaggactcacattacatttacatagcaattattttaaataattaaataattaaactaaaaacacatcatatcagatcacattcccaactatttcttattttaaaacttctttataatttactattcatattctatagaatacttttatttgatctaatattatgttaatttttaggttttagtattatattttatatgtgtgtatatatatatatattgatgttatatgtttaaaattagtaaaataaattaaaatttgataagttagaattattgaaataaaataaaaaaagaatagagtagagaaattgatacgagtctcttaaaaaaaactatattatattttatatatgtataatatatagggatatgattttttccagttattgtactttcacggattgtaatccgtgatgtacgacagccgtcagatgagggagttatttgatctaacggctgagattgatctaggggtaattaggcttaaaaagtagactagtaccctgacactcatttaatgtac

SEQ ID NO: 406716 - DNA, 643 bp, Cannabis indica
ttacagagggatctaatacaacaatttccaccttagatctctcctggagtacttattattatagtgcttcgttcttcaagggtcttagctcatagtggtaatggccatccaccattaccaacccctaacaagtccaagcagtgcttgaacttagttaagggtagcaccttagtaccgatatcagaaggattctcttcagtgggaactttctctatctgtacaaccttctgtgtcactttatctcgtataaagtggtacttaatttccacatgtttggttctgtcgtgaaagacaggattcttacacaagtggatacaactctggctatctgagtagattgtaggttcttcatctagtaatttcagttcttctagtagtcctttaagccaaatagcctctttaatagcctcagtaacagctacatactcagattctgttgtagataatgctacaacaggctgcagttgtactttccagctgatacaatttccccatagtgtaaagaaataggcagagtagattttctactatctctgtcacctgcatagtctgcatcactgtacccagtgatcattctactattatcccttctcttgtagtttaatcccacttctgtagatcccaataggtatcttaacaacca

SEQ ID NO: 406717 - DNA, 593 bp, Cannabis indica
atgaattatttggacaaatcaccataaagaatatcacaaaccaacttttttagacctttgaaagaaaatagacaatcttttacatttatctatgagccataacaaatgaaaattaaataacactaaactttttttttttttgaacaagaagcaacatattagataaatggatagaaattttgctcttgcattttattttatttgtttatttattgagtaagaggcaatatatattgatggaaatgttgctattgtataattttttttttcccaaaatgataataattacacaaatattccctaataagatttgtccataaaaaacttagggaaaaaaacaaaaaaatacaaaaaaggaaaaaaaattacaaaaatactttgggccggcccattaaacatttatacagtccacatacaaatatttacaaaaataccacatgcactaagccttcagctgtacagagcgaaccatgaagatgaaaatacgcgctcgtttcaaaaccgcaaaacaaccaaaatgaaaccaaaacgagaaaaatacaactattaattctggcaaaatcaactggaaaagaatacctgcaatgatctaa

SEQ ID NO: 406718 - DNA, 1045 bp, Cannabis indica
atttattataaaaaaaattaagttacaattaattatatattttttaactaacactctttcaccatttactgacactttttctcggtgcctcttcatctcaccattataaccatacatatatatattttatatttatttgcatcatcttatttatttttttttttctttcatgttaaaatttttcttttaaggatcatcaaataattatatccattcactcatactctttcttcatctttatttcattattataactatgcactatatacatagagagaaaacttattgagaatgatagtgatggtattgtgacggaattaccctcgagagaaaccatgctatcaacaagaagaatgcgagatgtacctatcataatcgaaagcaaagaactcatgggcgacctaatagagctgggaatgaaggaatatgatgttatacttgggatggattggctatctagtcacggtgcgacaatcaattgccgaaagaaactgatcatttttgaaacaaaggctggggatcggtttatattcaagggcgacaagctagcccttgggactccattaatctcttccctgaaagctgtcagctaatgaaggcgggatgcatggcattcttggccagcgtagtggatcgagcaatagagacgcaactaaatgtggagaatgtgcacatagtctgtgaatttccagaggtctttccagaagatctaccgggactacctccagacagagaggtggagttcatcatcgaattagccccagggactaatccaatttcaaaggctccatacagaatggcacctaatgagttaaaagagcttaaaatacaactacaggagctcttagacaaagggttcattagaccgagttactcaccttggggtgcgccggtactcttcgtcaagaagaaagatggaagtatgaggatgtgcgtggactaccgtgagctcaacaaggtgaccatcaagaataagtaccctctgccaaggattgacgatctctttgatcaattgcaaggctcggctgtgttctcaaagatagat

SEQ ID NO: 406719 - DNA, 729 bp, Cannabis indica
gtttttttttttttttttgacggtttggattttggtttgttgaaaaagaaaaaaaaatcttttggaggtattattagggaggtgttcattcaattatttcaagcaatattgacttattagaaaatgaaaattgatgttcttaagaaatagaaaaattgagggggagagcttacattggcttcttttgctctacttgcttacattgttgtatttcataaataaagtctataattaagaattgaaaagtgaggaatgagacggtgacatagcaatagtaatgataattatttatcattgttactgtcatgttaatttaaaattattgagaattgaataagagtactcgtattatgtaaaattgctgaggattgaggaataagacagtgacataacagtaatagtgataataatatatcgttgttactgttatatcaatttagaatttttaactatagcagtaacataataatctaaaattactttacgtttattaatttatttcctataatttttatttctttgatatgatatctaatatttttataattttttattgacattttattttatttattatttcctcttatgtaaatttaaaattattgttggaaggtatataaaaaaaaaatagtgaagaaggaaggagtgattatcaagatattgaggtagatttggttgaaggtattagaatggaaatattatattttttttttgtttgattgtatttta

SEQ ID NO: 406720 - DNA, 730 bp, Cannabis indica
aatgccattaaaaacaggcaaaacctcattcatatatacctaaaacatttggagtcctaaactgcctatgaagatgcaagaggcaacatcaatctcaaacaaaacgtttttcgggagagcattactattggataccaataatatctaatatcacttagagatggtgcattacgattgattattctttaaaaattattatattaaattatatgcgattcgaaacttaattgtattagtagcgatatgacactactgatgccttttaatattttttttcaagcaaccaattttcatgtagtactaagccactgaaaatagttacaagtacaaatttggtataattggttcatttacgagtagtttggccttaaattcgatgctatgaaactcagagtttagggaggaaaaagagaatttcaattttttttttgaatattacaagaaaataagagaatatattttaagaaaaagctcatgtgtaaaaatgaaaatttatactagtctaattagaagttttgtctcattaactttgacatgtaccaattcgtaccctcaaatttttccagactaaaaatttcagccgaactattgagattgttggattcaaaaatttcgatcctcatcctagtcctagctctctcgtcctcacccttgttctctcacccctcctagttctcgccactcttgctcctatttccctgctttctcgctctcgtccatgctcacttct

SEQ ID NO: 406721 - DNA, 728 bp, Cannabis indica
aaaaaaaaaaaaaactaacattacaattaatcacactttgaaaaacaaaattaaattaaaatttttatttcgaatttcatctttttaaaattacaattttctaatcataaaccaatcaaccctaataataataagatttgaaagttttttgtattaggcaattgcaaaaacaagaaaaatagatataagtactagtcttagcttaattttagtttttttttgttacgaaggagctcctaaattctaccttgggatataggtaaaattagaaagcaaccaaatgctaatagaatagagaaatatcaaacaacaccaatatataatagctttatattactattgattaattatataattaagtattaggtgttatatatatttttataaaaaaaatctcatatattttaatttaataattattattaaatattaactattcacaaaacactacaaaaataaaaaaagaccacttttaataacaaccttttattcacaataaaaaaaattatgattaaatgtgacttttagttacaacaaaaaagttacttgtaactaaacatagtatttagacacaagttgtcactaatttagttttagtcacaacaaatattgagactaaaaacacatttagtcacaacaaaaattgatttttgtgactaatacttttagccacagacttttgactttttagtcacagcgtaggaataataatttataattagtcacaa

SEQ ID NO: 406722 - DNA, 874 bp, Cannabis indica
caaaaacagttgttggtggctttggtgagtggttatcgatacaatggggtagaggtgaatgcaaggttggcagattcagaagctgacatagttcacaaggcaatcaaagacaactgcttcaacaatgatgaactcattaggattcttaccacaaggagcaaaccccagctcaatgccaccttcaatcgttacagagaagaccacaaaactttctattttccaaggtttttttttaatcatcacatcaaaattgtttatgtttttatcataactttataatgagatttcaaaatgttaattggtatatatattttttttgcaggatttgttgggtgattctggtaacagttttcagaaggcacttcataccacagttcgttgcataactgacccccacaagtactatgctaaggtatattcatttcacacataattactatatccaaagccatcttattatacaatttggaaaatgtgttttataataattcaaaaataattagttttttataactaattagaatttttactcctagaattttgtcatgtactaaattatactttttgaattttttaatcgttaaaaaattttcttgaaatatttagattgttggatttagggatttttattcaatttcatttaattttactaattatgtgattttccatgtattaaattatgttttctaaactttgatatctactaaatcatctccttgaattttgacatgtaccaaatcatgtctcctgaactttcatctttgttagactttttttattgaacaaaaattcttaaatctaacaatcataatagtttagatgaaattttttacagctttgaaagttcaaaaaacatgatttaatatatgttaaa

SEQ ID NO: 406723 - DNA, 895 bp, Cannabis indica
atgcatgagcatgtatgttaaactccctatatgattattacaagacctatttggagatttgaagctttaattgggatttgtatgggttttgatcggattaggagctgaaaattcgaagtgtttgttgctgggttttctaggtttggaactcaggtgccgtggcccgcccctttttgtggaacctgagaattttcccaggtgtcgctgcatggcttttgcatgccgcggcccgccctcgagtttttgggcagattcaagtacaaactttgaaaatccataactttatgatctgaacttcgatttgggagttctagataccgttggaaagcttgttctgagatcaatgtgattatctgaattttaaatgccatgaatatatttcatgaatgtgaaatcaggagttaaccctatgtgtgaaaatcttggaatttgtgcgactaggattaccggcacttggtcaggagtacccagggatttggaatctctgcgattacgggacattgggtaagacaatagtatgcacattgagttaagcgcagtggcgctcatattgtatgttgtgattgtgattaattaagaattggaattagggttattaccctaaaatgaacgtttatttgatctagggttattaccctagtagtgaaaagaaattgaatgttatgccatgataaatatgttggaataaagagttattcatctaaggcataattaaggtagactcggtaaattagtactgtaatgactgcttaagtaatttggattagtaaaggcaattagcactaatttctgttatttttataattatttatgaattaaattatttgtgcacccgattattagaaatgagcattagagttataatttctcaattctggagattttattaaactct

SEQ ID NO: 406724 - DNA, 1165 bp, Cannabis indica
gaaatacataagagaattgggtttttcttttgttttttgttcttatattttcggattggtttgaataagatctagcattgttttattccaaattgaacccatagatagagtaaaaattcaatcccgaacaaaacccctcaattttccaatgttttcgtcacattttttggccgaaaattcgtccagacccgactggcgccaaaccgggtcgcgcgacccacctggagcaacgcctggaagttgaagacaaccaagggcggccctgaaacaaagtgggccacagggaaaaaaaatgtggggcccttatgttagaaaaaatgtgatatttttcaaaatcagtaaagaaattatataattttaaaagagaaaacaaaattttgggcccttgggctgggtgggccctaggcacaggcctagcccgcctatgcccagggccgggcctgaagacaacctactgggacaaagtccacttgcagctttcggagagtgagggagagtgcggtagtttttgaactccgttttcgacgatttttttcttcaaagttattagaatttaatttatgattttttggtgatttttaattaattttttgactccatttaataattattattattttaattataattatatagttaaaaaatattaaaatcattttcgatgattttttagaattcgtgaatcatagaaatttttttgggtttcttctcattatgtttcacagtcactcccttatttgatttatcttgactatgtaatctccaccaatactcttttttttacatctttccattatttgttgttttacaatttgtaaaacttgaatgtttgatgcaaaaataatgtgttatgtggacactttattttttattatcaatatattataagcaattaatatctctttttgaaaatttggttgaaaattattaaattttcaacgattgttttagcaccaaatttcatatattgtagaaaatatttattttggttggctatatgtgtaattacttgcccaaatatagtagttatatatattaattcatattccatgaagtgagttaatattaaatatgtatattttaattagggtttttttatttttacacttttaaacgttagtttttttttttttttttttttttttttttagttcatttttaacgg

SEQ ID NO: 406725 - DNA, 716 bp, Cannabis indica
aaacatcaattgttggagaaggagaattgaggattccttgcttaagatcttagtgatcttctgcttatagaatcaccgcatgcgatgctggagaagaaggtcttgccatctattgtggagaagaactatcgttgggagtgacatcgaagaagaacatgcagtggagaagatcgataacacaattttagggtattgaaaaagaagaagaatagaaaaagaaaaaaaagaaataaaaaagtaacaaaagtaattatttttctttgatttttaaaattttatatacttaaaattattttttcattaacattatgtggaccaataaaaatttaccatgtgtacacttgtgtacacgtgtgcattccactgtggcactcaactgaggtttttgaacataagtgtaaagagaaaaatagaatgggggttcagtaggtttcgccatttgctatatggggatcgatctgattggggcacttcccacagggcgagggggagccaagtacacagtggtagcagttgatttcttcactaaatggaccgaggctgaacctcttgtctccataacctgcaagaaagtcctcgactttgttgtcgaaaacattgtctgtaggtttagatttccaataaagatagtatctgataacggaactcagttcgatggtaattaattattgaattctgcgagaggaacaaaataattaagagcttctcgtcagtat

SEQ ID NO: 406726 - DNA, 625 bp, Cannabis indica
ttatgattgaccatcactcttagtaacccccaagacacaataaaacactttccatgccatgattcttgaaccccattactagtcacctaatgtcaaatttcccaaactgattatacaatcaactcttttgatgcaaagttctgggtttttcaattggcacaaagtaatggataacagtgactcttcacttcaagaagtggacaggttgaattagtagaaccaatcaatggcttaatacataacacatttaaacatgtgcaccgtcgaggaaacctgcgaaacaaaagagagatctaaacatagaatgagatggacagagaaagagggtgtgagatcggaagagacagcgtaagagagaggggagtacctgggggttgcgtcgtcggagctgcggtaggctaggactgggatcgttgggcagttggggctaggacgaaagagaggggcgctgggtcgttggttcagagactctatcgggacgattgcgagaatattttgaggggcgctgcttcgaatcaggtttcaccgtcgccggagatggcacctggtttggcagagagagatgggagacaaacctggtttggccggagatggtatttgaattatctttttattattttaaatt

SEQ ID NO: 406727 - DNA, 867 bp, Cannabis indica
tcatcaactttcttagttttcgacgcttcttcattgaacctctttatgaaatttttcaatgtttctgtggatagttggttgatgtgagtcagggcgctaacttcaagattaatcttcctcgcggcgacaaactgtctccagaagctaacttgtatttgttccagcagtccatagatcctggttccaactttttgaaccattcatccgcggaaccgcttaacgttagtggaaagcacaagcatttagcatcattactgaccctcatgaccgtctttactcggttaaaccaggacaaatgatcgctgggttccgaatccccggtgtatgctgccatttcgggtatcttaaagtttttggggagctccgcctctagaatgtgtctggcgcatagctcccggtcctcacaatcagagtctgagtcatcccccttttgtcttcgggagacttgggcaatgtccttgcgcagtatggctagctcagccataattccttcgttcagcattccttcggagaccgccggtgtgtgtttctttttgtccaagtgatcccgcaaatcaccgtgcctttcattgatctgatgtcttagatcaatgggagggtatctttggttccctcttcctttttccctgggttcttggtgcacagaaacgctctttcggtcctctcgctcctgaggaccaagactccctttttggagtttgcccctctgtggacctttccctttcgggaaatctgagcggacttttcgcgaatcctgcatctttttcttttccccgggatagaagtagggttattccgttggtttccttcagagggataccgtatggagctaggttacctggacttatgcttctgagtgcttggtga

SEQ ID NO: 406728 - DNA, 567 bp, Cannabis indica
tttatttatataaatatatattttcattatttaataattaataaaatattctaattataattatattttttttgaatggataattatatttaattatcaaatattttaattattcaatttaattttcagaattagttattaaaatattcagacaattaatgtgacatagactttgttgaaagatctcacctatatagggtctcggtcccgacttcactattcagtactaaaatacaataaatctatcaaaatggagagagcttggaagtacgattacaaacactaatccgttttcttttaattcttttgcagatccaaagttcgtgtgggataaagaagctcaaagaatcaatgacgcctagaagtatttcgatcctttagttatattcactacaaaaaactgctacttttagtgataattttttagtcacaatataatttttttgtgactaaatgtgacttttaatcacaacaaaatgttacttgtgactaaaatatagtatttagttacaagttttcactaatttagttttagtcacaataagtattgtgactaaaaatacattt

SEQ ID NO: 406729 - DNA, 724 bp, Cannabis indica
atttttataaaaaaagtctaacatggatgaaaagttcaggggacattatttagtacatgtcaaagttcgagggacataatttgctagttatctggggagcatgatttagtatataaacaatcattgaaatagtaaaattgaataaaattagacaaaagtccttaaatccaacaatctcaataattcaggggcattagttgagggggcatgatttggtacatgtaaaagtttagggaacaaaaatcttaattagcctttttattattagagcactgttattgggtagtaaatataatttttcataaaatattaaattataatgtgattcaatacttaattaaattaatattgtgttatgtaggattgcatattcttttcatgggaatgaaatggcctgctcctaatgtgacggggattccttgtctaaatggggaatggggtggggacaaggattattttttgtcaccgaatgttaaacggggtcgagatggagatgacactccctgctcggacgagggcttgtttaatattttattttatatttctaataatattttatattttataatttatgtttgtatttttttagtatattattatccattttatgaattttaaattgtgctttacataataattagtttattaaataataattaatgtgtaatattttaatttttatgtaaataaatatttttatatatttaattttttataatttttt

SEQ ID NO: 406730 - DNA, 765 bp, Cannabis indica
atacatgcattatatatatatatatcatgacgatcgagaggatttgcactttgaacaaattcttttcaaatttcttaaattctttttcgtttccagaagatacattatatactaaattaatattcacatgacatatataaatatatttttacaattatatatataagaataaaattagtaatgggatctttgtagctaatcaattctttttaaatgacctagtttgactaattttttttctaaagtttgacaaattcaacattaataatattaggcacaatattaaatgagagattatacttcaaaaaaatacgatcaacatatatataaacaagatgtgtgctctatccatgagatgagcagtctaattagcagacgatttgacaaaacgtaaagaaacatccctaaattaaagaaaattaataaaagttgcttacaatcctcaacggcactaccaaaagtagatgacaaaacattcaaatttctaacaacttttaccaatactagacaatcaggataatactataacattcaaaagatcatgcttcaaccatgataacagttcttgagagtcatgggggctttaacattttttggaatataacttgcccaatccacagtcctgcagtcccatgccacgacccaacccttgtgatcccgaacaactccaccaaaactatacctttcatcctcatcaaacaatgcagcatcaatattcagtttgagtctttcataacctagtttagaccatagctcagccccatc

SEQ ID NO: 406731 - DNA, 580 bp, Cannabis indica
ttctataaatacattttttttttggataattacacaacatattaaaatctttaacttttacttttatattgtggtttttaaaaaatattgtgtaagtttcatactgtgtactgtgttaagttttcactgttgttttacggttgtttttagttgatctacaattgtttataattgttattttacggttgttttacttttaagttgttttaataaaaaaaaaaaatagtattttataaaaaattctgtgtggcagtaaaattataaattttgatccaaaatctaatatttttgtaatttttttttttggaaataaaatcaggacttttaagaggaaaagaaaaaacagagtacttggtcagaagacttttatgatgagtgtgttgggtttcgttttgtagactgtaacttaccattttgatcattcaatttatttcttttttgacatctaatctgcactaagtgcggattttatattttagatccaatctgatccgcagaacagttaaatctaatctaatccgcaatagtgcggattggatcggttattttttttaatgataaattatttaatgtttcatag

SEQ ID NO: 406732 - DNA, 489 bp, Cannabis indica
atatatataaaaaaaaagataattaaagagagaatttaaagtaaaataaaaataaataaaaagaataaatatataaataaatgaaaatattggaagcaaatttaaatagatagctatgtaaatatctaaggaattcaaatgatatatttattaaaaatgagaaaatagattaaatcagtaaacttgatcatgaaactatagaataaatataattatatttatataattttattatatatagttatgaaaaaaattgttataaacaaattacatgtatatttaaattaatattattagatacttttaagttcaaaaactctatataattctaattttattcttaattagtattcaaatatttagtatcagttcaaatattaataggatttgttttattattattattgaccgaggttttcggcaactaataaaatatgattatactattgagctgtaagaaagtgagaggaggatttttacgtggttggg

SEQ ID NO: 406733 - DNA, 873 bp, Cannabis indica
ggtgtaggtattaattcctacaaagaaaaaaaattgtactcaaccgagtaagaaaacaaaaaaatctcaaatcccagatgagatttttggcatttcattcacagcaaagagcctttcttctggtgagtctctcccaccaaatcagttttcagaagaaaaaaacttaataagagcactgtgcactgatttcatcaaacattatacacatacacaaattctaaactgaattagacatttcatcaaacaatatacttacatacagaatttacaaaatgaaattttcctaaaaatttatttcttccaatgtcaatttatctgctaccctataaaacaataacacataaatatatttgggtccaatcaaaccaaaggcaattactccattactactttttctccctaagatttgacactttacaagaatcaagtataaccattgtaaattcattaaaaaaaacaacccacaaacaataatttaacagcatgataaaagaaaacccaataaaaattctagtcggaagaaataacacttacaagcagagtttagatttatggaggaatatgtgtcttcggaagaaatagcagctccgtctagttatctgactgtgaggcactgaagctagagcgagctatgaatgggaaaagaagaagagagcaatgaatctagactagcaaaagtaaataaaccatataataatagaaattcatattgttaaactataaacagagagagatctgtgagtgtgtgagtgagaaaaattggaaatgaagtgtagcataaccctaagtagaaagcatatatggagatgaagatttcttcaaacctagaaaaaatttgagagagagggagagaccaagagagagagagagaga

SEQ ID NO: 406734 - DNA, 556 bp, Cannabis indica
gtcacttcagcaaacaacacatatatacataaatatgacaataacaataagaagtgactatacaatatcattatgcaagttaaaaaatacaagtcataaacattccatacaaaatactagcatacataataacaaaacgccatctcagctcaacaaactaggttcttaacaattccattcgagcaacaggttctaaaaacacacaaatgggtaagcctttcgttagtgggtctgccaacataccattagtaggcgtgtaaataaaaataagagactcgataactttctctttgacaaaatagcattttatgtcaatgtgtttggagcgggaagtacttctagcagttttagagaaagctactgctgcgtgattatcataataaaattttagcagcctcgagatagagtctataacacccaatgctgaaataaagttttgcatccatattgcttgacatgtaacctcataacatgccatataccctgcctccattattaaggatgctgtgagtgtctgtttgacacttttccacaaaacaactcgtttagccatcat

SEQ ID NO: 406735 - DNA, 917 bp, Cannabis indica
gcttggtgtaatggttaaggtagaagacaaatatattagagggtaaatgttcaaatcccactaactacactttatattttctttttaaatttatttataccctccctgcttttacaaaaaaaaattacccccccctcactttaaaatcgtgagtccgcccactagttaaaaataattatatacgttagagggtaaaatttcaaatcccactaactacaatttatatttttccttttaaatttatttataccctccctgcttttaaattttgggtttgccataatagtaagtttggtgtaatggttaaggtagatgacaaatatgttagagggtaaaagttcaaatcccactgcttttaaatttatttataccctccctgcttttacaaaaaaaaattacgccccctcactttaaattttgggtccgacattgttaacattattatatacgttagctcataattgtaatttaaataactccagatatggaaagctatatcatataccatatatttgtattaaacgaaaccattacatatatgtagggatcacaaccccgacatcatactcataacacaatcatagcaataacatataataattatttcaatcatatcatgtctttaccataatgtggcgtatcatagccactacatacacaacctgggcctaactggcgctacaataacctgggcacatttagccctaccattgctatagaataaagtatctctacattcaacagcactgtcgcagtatcataccttatcataacaatgtcatacacgaatcaaacaaatgtagggtagggtatctctaaattcaacgaccttatcccgtatcataccccaccataacaatttcatacgcgactcagaaaaaatgcagggtagggtatctctacattcaacggcctta

SEQ ID NO: 406736 - DNA, 532 bp, Cannabis indica
tattaagcaaaaaatttattcatttcaaactcttactgtcactataccaagattaacattttaaatgaatattcattatccatctataatgattgatagaacaaaaaaaaattaagtcttaccaaattagtagggagggtaataaccagtttaaatagataataagaatactttgcaaggattcacttcccttgtagaaagcttttaacttttgatgagctgccttttacattcaaacattatcgatctcaagttcttattttggtgtaggcccaacaaatgaggtggagtcaacatttacaagcatgcctcccctcccccatctttttgcttattctgtctaacgttaaattcatgtaattcattaatgttctttgattaagatttaagattagaccacttaaaaataactaaaatacaacataaaattaacaaaccaaacgcatatatatacaaaaaaatatattaggaataaactaaaaatatacaccatcacaaatatacataaattaaaaaaataactaaaaaataa

SEQ ID NO: 406737 - DNA, 843 bp, Cannabis indica
ctgagattccaggatatttgccgactcaagcgggtagtccttattagtcaagcttggctcccgaggggaactggatccgtccaagggaaactgattctcaatctcaatctgtatttattcaaagtggttttgtattcgtatatgggcttttaccttttactgggtcattaatgcatcaatggagtcaacttaatattcagtttttttagttgttggtcggccttgacgtatatatactatactgtattaacaactatgaaaactataactatttcatgtgttattattattttttaatattaacttattggttaaatatgataagtaattcatttagattttttctttacttttagattgatcaacttctcagttctcataccattaatgaactgaaaatatgggacagcccaatggatttagatatcttgggaccccctgaaatatacaaataccagctaatcaaaacaaccagtttaataaaaatccaaagtagtgctaatttacaatttattatttcaacttatttctcaaccaacatctttaaatatatatatatatatatatttatatatatatttttatggtgatatttattaaggtaaatattattttaaattttgtgttttgcaaaagttattaattggatttttgttaaataatataaatagtacaaataggaccttaaaggcctgaactgattttttgtcaaaataaaatttaataataatctgatctaaagatgttatgataaaactgtttacattttctgtatccgttcgtgttaggaattgccttcaaattggttatattaaaaaaaaaattgtcaaaaattaagcccag

SEQ ID NO: 406738 - DNA, 526 bp, Cannabis indica
tatatatatatatatgaattaatgtaaacgttatcttttaaacctaaaattcaaactaaatgattatgtcttggtgtagaagtaataatattgaagtaagttacgcgttaatccaatataaaataatgtttcgagaaaattaattatacaatttcgttttcatgtatcttatatatatatacataactgagacacaattgttagaattattataatggactaatacaatcataggtttaattccataatactcaatcattaactatgtgcctaatgttactcataaccataatgggatggttagcaacttaattatatgttagaggcacatgagagcacccttaatactatagttggcccattaaattatagtataccgtaaaagacctcaaaagccctattagttaataaccccttagggttataagggtaataacatgtgtatatatatatatgtgtgttatgtgtggtaagaggtaattagagagtttgtatggtaaaagcaaaggggttagctccacaagtg

SEQ ID NO: 406739 - DNA, 856 bp, Cannabis indica
attatacatacattgcaacacatgtagtatacatatagcagttttgttataagttaccagtacctaataccacttaaataacgtcttgtatagttaattagcgatattttattattggataacattatcacacataaattaaatgtaaaaatattgaatcatatataaaaacatgaactatttactcatcactaactaattttaagatagaacttcattattcttgttaactatatttcgttattttgttggttatttttaaatatttaattatttaatatttattaaaaaaaatattgagtatttttatttttatactttataacagttttttttttttaacttttatagaattccacatagaaactcatataacaactaatggagcaacctaaaccgcaatcaaaaatccctatagcaactcacctagaaactaccagagcaactcaaaatcataaaatttgaaaaaaaaaaaaaaaaaaaaaaaagtaatatggggttattcaccaaaaataatttcttttacacataaccaatgataaaagaaaacaaaaaattacaaattgaaaggggatgaagaaaaaaattgtatatataaaaaaatgtttaattttggtttaaattatattttttttataaataagaattagatatatattttatctattaagctttaaaaaaatattatatgtgttatgaggagtgctaccgtcaacctcctgttacaacctctaagtcaacttccatgcccgaaaacatatgtcggaatattttttttcaatttttttttttacggtggtattcgttatgcttacagcatcatccctgtaaatttttgaaaaatttcgaatagttt

SEQ ID NO: 406740 - DNA, 644 bp, Cannabis indica
ttcatgaaaatgtaagttaatatctatattatttattttatgaagtttaatttaattgcaattttcttaacagcaaaacatgggtcgcgttgagaactggaaggtttgttccacaaaaaaagacaaacaagtttgtcaacgagtatgccaaaaatcaatatgtaagactgtgtaaactaattacttttaaatatagggcattttacaattttgtatacattattttaattaattacaaaatatgtgcaaaaaaacttattatcattttctcatacatttttatatataattaaaaactttttttcaatttcttttataatatatatatatggtaacaattattgattattatatatatatggtaatattggttatgtttatttttatgtttaaacaattataataaaaaaacataccaataatataaaacattttatatatgtgtttatttttttttctattaattaaacatactaatttaataaacaaaataataatattcacataagtttattatatcactctatgtgtgttatgtttatttttttagtaattttttagtaaaataaataatatatatataaaaaattagtttatctttatctttttctttgtttattgtgtcatgtttattttttttaatt

SEQ ID NO: 406741 - DNA, 1061 bp, Cannabis indica
acattttaattattaattaaaataaaaactaaaatattaaataaactaacactacgtggcttggcacgtaacaatcacctagtatatatatatatatgatgataaaaagaatatgactaattttctttgtaataccaaaaatataacttatacgtatacatgtgtacatgtttgatgtttggtgagataataaatattaaatataagcatgatacgttttcttttaggaaaaaataggataccatagatgatagattaatttatggataattttaatataggacccttagtttgtacgacatagtattggggtaatttttttgcccaataaacttaaacttaaatagaggttacccagtatgataacgtgtacgtatacacataatttatttttttagttaaaaaatgtagctgctttacataaaaaaaaaaattattaagaaaaaaaatacaaggttactttatgtttgtagtgcgtatgtatacattaatgaatttgttttgtttttttttatttttttcagttttaagttaatttgctttattattttattttttttgttattaaaaaaatatgttttaaaaaaatacatatataattttaaattttttttaaaaatatattagaatatatcataaaagttatattatgttcataagaatatgttaacaagtgtaatttatgacatttgactaaactaaaatttatgtataaattagaaaaagtatatgaattcgaattgtatagataataacattaaaaaaaaaattcaaaaacggacttaatcttgcgagtgttgctcacttagctcaagctttacttgcagattggacttgggctcaaaattcaacatttaatcctacagctgcattccttactgatatcgatagtgctgaaacttgggcaaaactaggggtgttcataaaatagctgatccaatccaatccgcacgatctaatccaatccaatccgcaaagtgcagatatccgcacttgtgcggattgaattggattggaaaattcaaaatccgtaacttgtgcggattagatgttgattgaca

SEQ ID NO: 406742 - DNA, 978 bp, Cannabis indica
caagggtatataaggtgcaacttcggcacttgggatagggccccaatttgtgcgaatgggtgaggacacacacacttggcccaccacacacgcgcaccattcgaccagccgagctaagtcgagctagtttgtgtggtgtgacactttaatttttacaaaaaatttatttaataaaataattattttttatttttattatttaatttattttaaaaacatgtttaattgtgttatcccaatttttttccacctgacgtggcatgtccacgtaagcacatggagtacagccctgccaatagcagaacatggcctccatgcaagatatagcaaaatcgtcaagcaacaatcgaatggagtgaagcaagccctcgaggagctataccaacatccttggccggccaagagaagcctataggccgaccaagatctatgcataagctggccggccaagaagtgacttctggaccaagggagcttccattcgaccaagagaacctggtctctacaaggaaatggtgtacaaagttatcctcaacttacaaaaggttggcccccacactcaaaggctggcctcctcttggtggagctatagtaacctgccagatcctgcaggccttaacctgccagatcctgcaggccttgtcctgccagatcctgcaggtcttgggtggctagacctcccctgtaggtctatgggcagccaagattaacatggcaggactctatgtatagcccaaaacgtgggtagcaagtcatgggctgggaattgggctctagaagcccaacagaatggctgaataatatctagaatcaagagcactttagtcttttgtaattatctaacaacctatgccgatatctatggatttaaactgtaatttagggtttaggcttcctatataaaggtcttaaccctagcctagaaacctaagtcacttagcctctaaattaggggtgttcactaagtatccgatccaa

SEQ ID NO: 406743 - DNA, 604 bp, Cannabis indica
ttcaaatcaactactataaaaaaacatagtaatttgaactttatatttttaaaatatgtatgtaaattatatgataatataaacatatataacaaaatatatatacatatatataaatcctcttaatttggttgatcgagttagtttgagttgattggacaggttggtattatttttaacccacctaatataaagattgggcatgttattcggtttgcattatttgtcaggttatgtcggtttggtgtgggtagtttacaaaaaattatgtacagtcctactctgctatgcatctgcttgtattccgcaatcaattatgcatttactcgtattacacacttagttatgcatttgctcgtattacacacttcactatgcatctgcttataatatacacttcaccatgcatctgctcatagacaacatggtttgaccaggtcaaaaactacttctatatattttaaatataaaatagttatttattcttattcaaatgttcaattgtaagtaaaacatggacatttatcagggtttaggccttgaaaagctgaaaagatatttctatttataaataagagttgaacattttcatatatgcttgaat

SEQ ID NO: 406744 - DNA, 636 bp, Cannabis indica
ggtgcttcatgtaagcacaatgacatttaaaagtgctcaattactcagattgatgaactagaaagtggaaaggactcaatcaaattggttctttccaaagggcaggtgatactcgttggagttctcatttgaaatctatttcatttttgataaagatgtttagcgcaacatgtgaagttttattaaatatattgaagatggtacaattttttctcaacgaggagatgcagatgcagcttatgagtcattaacatctttagaatttgttttcattttgcatcttatgaaaaaaaattctagagatttctaatatacaatgtcaagctttacaacttcagtctcaagatattttaaatgcaatgcatcttgtttcatctactaagactcatttagaaattgagagaagatggatgggatgaattagtttatgaggtgaaatatttttgtcaacctgttaatatacctgtcccagattttaatgctcactatactacaaaaagacgaagaagtggtggacaataagatgcaattacagtggagcattattacatagttgatcttttcaattcagtgatagactttcaactacaagaattaaaaaacaaattaaatgataatacagtggagttactcatt

SEQ ID NO: 406745 - DNA, 574 bp, Cannabis indica
ggaagcatccccgtgttcataaactcccgaactagccgaaccacatctctccccacaatatcccagtatttctgataaaaccccggactcattccatccggaccaggggatttatcagggtgcatttgaaagagcgccacccgaacctcttcctcctccaccatatcaagaagaatagcattttgagaatctgtaatagaaggttgaacttcatctattacactactaatatcaacatcagaggcttcaaacaacttgttaaaataatccaacatcactcctcccaaaccggtttcccagtccacccacaccccatcatctctttgaagacgctgaatatgattttgcctcttccgtgaactagccaagctatgaaaatatttgctattcgtatccccagaccgaagccaaaattgcttggatctttgcttccaataaacttctcgttgcgctaagatctcaaacaactcctcttgcttctcacggtgcaacttaaccgaagcttcatctctctttttcttcaaaattctaaaaacccttttcaattactcaatctttctttgaaattcccggt

SEQ ID NO: 406746 - DNA, 523 bp, Cannabis indica
atcctaattagcctaattattaattttggagaaattgttaataaaagatatttacaccaaatattaatttttctttaaattttatatttatacttttaataaataagtttttatatttatattttccttacctaatattttttcacttattaaagcttcaaaaaataattctcttcttaatagttttttcagttattggttgatttttattattattattttttctttctttttcttctttctctttttcatctttttctaaatttatctttcttttttcaaactatagttttatctaagtatacactacaaaaaatcttacttttagtcacaacaaaacttgtgatataaagtaaaaattatgactaattataaattattattcctatattgtgactaaaaggtccgtggctaaaggtattagtcacaaaaattacaatttgttgtgactaaatatatttttagtcacaatacttgttgtgactaaagctaaattagtgacaacttgtaactaaatactatg

SEQ ID NO: 406747 - DNA, 837 bp, Cannabis indica
tttaatggtggtttctatataacgcgataggtctgatatagacctgattgcctttaaatattacatacaaaagtttgtacgaactatatgtaaacctgtttatgccacaaatgtttaacaaagtccaacaataattcaacaagaatacataatagtacaacacataataatattaaattcaacattcattttaacctcggtaggtgcaagtgcttctattgtgccccttggtaccacacttgccataatttcattttatcacaatcctttcaccattacaagcagtttagcttgacttaattcttccaaccttttgcttcttgggtcgccctactagttgcttttcaacaggcactccaactgtgatgttctttatttcatcaggcaattcccaatcatcctcgtcacaaactgacataattgtaccttcatatgtgctcctctaatattctattgcataatatggtgagcatagtgtgtacatgctaatacttcgttactgagctgcagcacatgcatgaggacaaggaaacttcatgatttggaacaagccgcaagtgcaagtttgttcctgcaagtccactacggcaccagtctcaactgatcctccacggtgaacctgcaacatgtaaggtccacatgtgtcaacgttcaaataccgagatttctcaaaatgcaatgccaagtcctcctccatttatggtgctaaggtcttcgtccacttgtcaactttttcttttcgcgtagtaaactaatcttggactttggatcttaggaatgctacaactgttgggttttatgccctaaataaaactctttacaatctgattagttatc

SEQ ID NO: 406748 - DNA, 696 bp, Cannabis indica
gtgtgtaagttttcattttccttggaattctatagtgagtgtgtattatgtgagaatttgtttttgtgtgtaagttttcattttccttttcttccttactttaccaaaattgtgatatggttacacttttttacgtgtatttggtctaaaaatttataaaaatgagaccaaatgtaactaaatatatcattaacattttcaaaatgtacaatttaatggaattttgaattatcatctaagataaattttgtgataattgagataaattatgtgggctaattttgcacaacatgacctaaatattcagcctttattcaatttagtttaatcctttctttatgaattttgaattagggcccacccaagaaacatattaatgtttttggtaatttttaaaattaccacatatccaaagaaataagggcccaataattaactttttcagtccaaaattgcaaataagtgacatttgctaagaagatgtacacaaatcatattttaaatgtcttacaatttctaccatttgaatttaataaaaatttttaaaatatcaccagaaataggttttataacatttttttaaaaaaaaataaaaattattaaacatatatttttgtgacatttaaattcgtcactataatttataatatacagtttatttttcctagtacataaactatttttaatttgaaccaa

SEQ ID NO: 406749 - DNA, 512 bp, Cannabis indica
gtgaataataactttgagattggttggataacgcgtgaccatgaaagaaatgtcacttcagttaattcaaagttgttacttggttgtgtacaaccgattatgacaattaacagaagttatgggagtcaaagagattcctagcttgatcaaacattaaattttttctcaaattgttattgaaattgattgtcaagttgttgttcatgcaattcgtcatactctctatatgtcatttctatttggcttgatcattctgttaggctatttttagcctatgttttggatctaatttatgtgcgtttttagctgtgttgggacggaattacgcttgttttctatgttttcaggttctttggaataaaagaggtctcgggtgcagaaattcgttaaaagatgtgctgagccgaagaaaacacaatttctgagtaattgtgcacatctggccgcggctaaacacaacctggccgcggctagatttcgaaaatctaggaggcttcagtcgccgcggcgat

SEQ ID NO: 406750 - DNA, 993 bp, Cannabis indica
gaccagctcgacctgcacttgacacaactcgcagagaaacagctaaaattcttgggagccttgcggtacaagatcgcgactggcgattactgtgtacgactgccaagctgcgagaacaccagttgattccagagaatgcaagtcatcaaagagagccagtatacaaggaaccatccgagagacaacaagagcggatagacaaacttctcaaccagtctcaggtaacatatcttatgtttataaactagtgccttgaaatttattcatacttatccttatttatcctcgcagagatgactttttgaagtccgcgcccgtccttaaaatcaagccaaagagtggaacagcgacgacatcgcccgttattgcccagaagaggaagaggatgttgtaactactcttgccacagattcttccaagaagctggctaagaccacgcaggacaaggggaagaaagtcatgatcgacccaactgtccgagcccgcgattttctgtctatgtaggagaagttcgtgggtgaggagttcatatccaaggcggagaagatcccttctgaggagcttgttcgaagttctatggagttggcttcacagtcgatgactctgttcataaaagctgtcgccgctggttctaaggaagctgactcgctaaagaggcacaatgcccatctccaggagaacatgaagagactgaaacaagaggcggctagaaaggacaaagagcttgaagaccttcgcaagtctaaggagcaggctgagctcgaggccaagaactctcaggaaaagctcgaggagatggctcacgacttggaggtcgagaaggagaacgggaagaaacagtatgatcaggcagtttctgattatatttacaccactctttctaaaaatcccagactttgacttctctatcctcggagcagaaagccgctgagatgggccgaggccttttcgcaccatgtcgcctactcaaactcaaggtggtggagggaatct

SEQ ID NO: 406751 - DNA, 1196 bp, Cannabis indica
gagtgaatgagtgagtgcccacacacatcaagtggtatctcaatcatagtgtgtaagactgtggaaaaccatccaacaagaaggagaatcagcatcaaaggaaggagagaaagagatccaggttcagatattgataatgctctgctacagaaaggaatcaagggctagatatctgaacggaaggagtcattatattccgctgcacccaatgtaaggtttcctaaactttatatgtgtttatttcattgttttagaattcatattaggatgttaatgaaacatacttgttagtaaatctagatcctggtaaaatatatccaacactttttgtccttccatatcacagaatgtgaaagcttgagaactagtggggattcaacttacaatgcacttgtgtccctatcttctaggtttgtgaatctcacgcgtccttcaaaagcgtgtggtgcctaggatattgtaatgacagctatctaatatcagcgcagacatcaaggagaatattgatgatagaaaaatgcctcgagtctagtaaggcgcgtaaattctacctttctagctcctcgaccgttggatagattattgtgctttccatggtaaaattttatcccttgatcgatgagtacgctgatcgccaacttcaactatagataggagtgcggggaccttttaccatttttacatatttgagctttcaatttcaaatttctaacagagagaagaaaccaaagaactctgttcttgcccttagtgaatgtatgatctctttgacatcattatccatcatcttctacaaattaaagaccaaaaaaaatacaaatgcaccaccactgaacccaatagagagatacccccattcatccgagtagttagacgtccatatgagtattgacatgaatccccattagccactctcttttcaggctaatcaccgccacactcatctatccccacttcctcttacaagtaagttccatttattcctcgaattgtataatttcttgatgctacagaaatgtatgccaaagttttgattttgaataattgtttgtatgtgaatgtaaggattgggtgtgtaatgcctgggcaattttaaagttgaagaattatttcagtttaagtgtaggtgaaactctgggtattttaggtcatggtttgttttcatgcattggttgaatatgaattaggcatgtgtt

SEQ ID NO: 406752 - DNA, 653 bp, Cannabis indica
ggccgaccagccttgtatgacttaaaagctgtcacatcaatatttcactcgtgcctgaagttcccaaccaaaaatggggtagggtgtcttagagggaatcagcaatctgctcgggaatgttacaaccttgcagtggccaaggctaagaaggaaatatcctccagccagagcccagacaagggaaaaaacattcccaagtaggaaacttcccaaggcgaggatgaagatgtggatcctcgacttggggacccaagcagcaatgttggacctgtggaagagttagaagagatcgagatcgatccagctatcccggccagaaagctaaaaattggaaagggtttgttgctcgaagtaaaatcagagttgataaaatttctgagagcaaacctagatgtttttgcctggtcacatgcggatatggtcggaatcgatccttctattatttcacacgtcctgaatatcgatcctaacatccggccagttcagcaaaaacgaagattgctggataaagaacgagcagtagccttgaaagatgaagttgaaaagctgcgcaacaacaacttcatcattgaagctttttactcggcttgggtcgcgaaccccgtactcgtgcctaagccgaacaagaaatggcgagtactgtattgatttca

SEQ ID NO: 406753 - DNA, 504 bp, Cannabis indica
gaggtggattaatcaacttatggtaataactgaattacaagataaggggaagactaaaacttgaataaacaaagatgggtttcagagattatgacctgtatttgtgaagagtctctccaaattcatggtaaggaacaacaaaatatctcttcccttgagacaaggaatttctctgattccaatgccagcttcggttcttttcatcacttaatttgcttctccattttcttggtctaatcagaaaagaaaaacacacatgtggatgactatctttattgggtttgcaaaagatatactagtttaaattattttgtattctatacatatttgacttcatgtgctagctagaactgtttagtcttaatagttcttatttgattaatctatttgctctgagttggctctagcgagctttcaatttaattaattaatatatatctttatacaaatttattgtgacatttatttaagggctcgtttggaacgccgtattaggtcgtattg

SEQ ID NO: 406754 - DNA, 588 bp, Cannabis indica
gtattattaatttcaaatttttgatatttatgtttcaatattaaaaattactttatatagatatttagggatttgaaattaaaaaattttaaaaattgtgaaataatcacaaaaatttggatttttgggtgaaaatcacccttgggcatactacaggctgcacgcagcctaaaacacgcgcgaaatagagaggatttagtgtctctgaccgagaaaactcggtcacctgtagcatctaggcgtgcgggatcgtgctgaatgtggccgtgatcgagctttagacactcatcttgtctgacgcacacgcgcgtaagccttccttatttgaggatctggtgcgatggtgcaccaacctcgacacccaatggaccaaatttttcaaacttttatatctttctcgttttcatcaaaatcgagttctttaaaaccaaaattgcttaatttttttttacaagaaatccaaataaattattttcagaacacaaataaaattatttttcatggaaaattcgtaattcacaaacattcatcaattcaaacataaatcaacatgaacacatctaattcatcaaaatcatcgttttaaat

SEQ ID NO: 406755 - DNA, 548 bp, Cannabis indica
aaatggatgaccatgggaagaaatcacctaaataattacgagaaaggtctaaggaggtgatttgtgtgcaattgtcaagaaatgtgggtgatagttgtacggaattgaatttgtatctagaaagagataaatcttgtaaatacttgaactttctacaaaggtaaggatctatcatgactccagatctagaaagattcaacactttcagtgggcggctccaattgtattgcggaaatgaagcagtgagattggtattgtaactcaaatcgagtcgttgaaggtttggcaaactgagaacattttctggaagtttcccctgcaaatgagtcaaactaagatcaagagatgtcaaagaagttgagagattcataaaggaatcaggtgaagtagaatacatatcaacacctctaagaaacaactctctgagatttgttagatttgcaacagttcttttccaactagatgtctctagtttcaaatcaaaattaagactcaagtccagtgtaagcaagttggacaagtaagacaattggagagggacttggcca

SEQ ID NO: 406756 - DNA, 776 bp, Cannabis indica
gtgcatccttgaactccgtctacaaagttcaacacatcagcaaagccatggccccggtaagcacttgactcatttctttcctcaatgttttgtctaaggcattcgatctcactcgtttctcctttttttagatttctgcggagaccagccgcctctccaggaccatcgtcaatcagggcttcgtcttgtccgaattcgagggcatagacgagattgtgaggatcctgtgggacctgtctgcttagagacgggcgatccaagagtaggcttagcgaaagcaggccctcgctaaggccaagctcgaggaggaggccaaacagagggaagcccaggcggaggcgatgctcccagaagaggtcctgcggagggataggctggaggtgaggcaccaggaggcgctgagggcgaagggcgaggccactgccaaggccaagcgcgagcttcgggaggctaaggaggccataaacgagatggccgccaaggtgaggtccttagaggagttgcactaggcggacttgcagtccagggctaacttggctgtggagatgaaggagctaaaggacttcagagatcaagccttaaagaaggccaaaagagatgagctcctctcccctgtctcctccaagcgttgtgtcaagcgcttcgatgatggcgtctacatggccctggtcgacaaaatggccatagtatcaagcttgacttctaccccaaacttgaggaggttattgctaaattttgggagaagaaagaaacttgacgccatgctcgaggcgcat

SEQ ID NO: 406757 - DNA, 878 bp, Cannabis indica
gagaagtgtggatcactcttctctccatttttagtatagtgtatatatttgtttgttatgtgttgggaatgtaataatatttataagcgtcgttgagtctctaatttggttacaaaggggaatggggagagagagtggttaagattaatattatagttgtgtgggatttttcaaagatcaatgtttgattattttgtacatgtaataatgtcgtactaactaatgtatcttatgagtgtatgactaatgtgaggtttgttaattcaatgtggaattacttttctttcttagtggacaatcaagtttcaattcccaggtcgtgaaggctggaattttctattatttctagatatatattttatattatttattctctattattatgtatgactaaatatacatatgtggtacttttgggtagcaaatatatgccatataccattaccaccattgatttttgtgagttgtgacagaactatgggtgaaagaggagaaatggtaaaagacaccctttattgttatttatataattaagtttcggatgtgatgaataacttttataaaatattgttaatcaactataaaatgtcattgtactaagtatttatatatggtgcttacagcaagaaaaacgggaaaagacactagcagtatgtaatactgctattggtctcatacaatttaatatattttttttttttttaaccactaatgattaatatcagggtgctacttttaaaaagtgctagacaccaataatatttaataataatattccttgtaataatacccgtagaagagttaaaataggataaatatcattttggaccttctgttttacaaaagttaccaattggaccttgtgttttgttaaatga

SEQ ID NO: 406758 - DNA, 772 bp, Cannabis indica
gtcaatttgatctacactacgttccacgcatttccataaatgggcaggcgctagcagacttcatacggagtgtaataaagctgaagctaccgcaaacatacccacactatcagtcccggcgtggaaggtattcgtggatggatcctccaacgagaacggatccggagcaggggtcacaatgatatccccgaacggacttcgatccaagcagccctacggttcgaattctcagcttcaacaatgaggccgaatacgaagccttgatagcagggctaagattagcaaaaactgtgggggctaaaagagtagaagtctacaacgattcacaaccggtagtaaaccaggtgtcgggagatatgagacgcgcggagaaaaaatggccgcatatgtggcgatagttcgggaactgctccacgagttcacggactatgaagtagaaagaatccccagggaaaagaatgctcacgcgggctgtctggctaaattagcttcagacagcgaaatcgagaaactgggggtggtacctgtgcaacgcttgacagagccaagcatcaaagtaaaaaatgccataacaacagttgagcaagagcccagctggatggtccccatcatcgaatacataaaaaaggtgaattgccccaagagaaggccctatccagtatgatacaaaatcaagcgcaccgttatgtgatgatggacaaaattctctatcgaagaggactcaacatgccttatttaaggtgtgtatcggaccctgaagctaataaaatta

SEQ ID NO: 406759 - DNA, 508 bp, Cannabis indica
ttttaggatctcggtttataattgttttataaaaaatatatatgttgcatgtttagtaaagttttaacactacaaaaaattttatttttagtcataacaaaacttgtgactaaaagtaaaagagttgtgactaattataaattattatttttatgttgtgactaaaaaattcgtgactaaagatattagtcacaataattacaatttgttgcaactaagtgtgtttttattcacaataggaataattgaggtaaaagtccccaaaaacttaaggttgatgcagattaatcctcaacctcaaaaattggcggtaatagtccctaaggtgacattttctgtaagcccgttggtcctttttctaacggatccgttaaacccaaataaagtgccacgtatcaattttttattagtccaaataataatttaaattaaaaaaatttaaaataaaataaaaaactaaaaaatatattttaaaattataaatttattttattttattatatatttt

SEQ ID NO: 406760 - DNA, 933 bp, Cannabis indica
gagttttatgtgtggtttgatgaatgtatgtgaattatataatttttctatgaaaataattatttggattacctgtgaaaagttagtaattttgtttttacaaaactcgattcccataaaaattgaaagagatatggattcctgtgaaaagttaagtaatttggtttttacaaaactcgattcccataaaaattgaaagagatatggattccttgtgcagagttaagtaattaacttatatgataaattaaataattataaatttgaaattaaactagatatttttattgatatcttaaccattatattttcaaattcatctatttgttattttgtgcaatattttatttttaataaattataaattagaaaaataatattttatattattttacttattagaaatttataaatagtattttaaatattcaaataacctagatatttttgtaaaaattaaaaaaaaaaaaaaaagactaaattaacgatattttgacatataaattagaaaattatcatttcttttattatttaattcttaaaataataattgtccaaccatatctaatttaaaatttatttattctgttattttaattatattaaaaagattaaaaataatattgaaaattatatttggtttttttgaaatcatttatcttattaaatatttaatttaatttgataaaataagttaaataaaacctagatattttaaaattagtttcaattttgaactttaaaaaagatatttaaggttgtttctacaaccttaaattttcaacatttagttggttatttaaatgataatttaattatataatattaaatatcttattccacatattattacatgggtgttgtttgtttatttaaattgtttattaataatttttttttaacgaacatattatttatttgatctacattgct

SEQ ID NO: 406761 - DNA, 509 bp, Cannabis indica
cgagattggggtgtttcctcctaattaccccttgaaggtcggggtggtaccccaatatacccctaagaggggttggggtgggtaccccgagacaacttacattttttttttacttcggagctatgtggctctattaatatatgctactatgtgttaacttgtctggcagataccacactatgcgtaagcattttttttttatagttaaccatgtaccacatataggttgctcgagacattgagcaatgcacaaacactttggaatttgaaaggaaattttcaaaattgtaaaatatatttaagtgagtgtgttttatgcttactagtccatgtatgagcgtggttgccccccaagtgactaggtaggttcacctcttgatcacttgttaagtaatcagggctttcacatagaaactgttattgtcacaggtttgccactataatttcatacactcttgaccttagttaggcttgcaatttgattcaataacaatcatacaagttgcgtc

SEQ ID NO: 406762 - DNA, 579 bp, Cannabis indica
gcattttctattgcccaaatcaacaaactatttaaattcaaaatcataatactaattaaacatatgtatttttgataggagaggaagatacagacaaaatagaacaaggagagagacaaccttgaagtgttgtgttttgctgaagatgacgatgtggccttggtcaaaaggagaagagggagacgagagagagggaaagtgagacgaagctttggttcgtcgggctgttggtttcaacgatctgcgaatggaggtggatactccgacgatatattagttcgtcgggcagagggaggcactagataataagaggcgatggaatttttttttaaggaaaatattcagctttaacataccctataagaactgcttaaagaagattgagacgcttaatattactgtgaagactttgaaactaaaattctcaaaagttgctaaaatatttgaaagcttaataatacaaacaatgaaataactacaactctttctgaacctaaaggtttgtatgtctagtttgtcactcttgatggaatttttttttaaggaaaatattcagctttaacataccctataagaact

SEQ ID NO: 406763 - DNA, 646 bp, Cannabis indica
tttacagttttaaaaaatcactatcatataatactgtattctgtatctgatggaaagagtttttggttgatgaaagtgaagtgagtgcaaatcattttgcataaattactgtattttgttatgtggccttcttttcctttggatatataaactgtagagggctggattgacagagagagcgccgccgcaatcgagtcggaaatccactcctggattgacagagagagcgccgagtgtctaagccgatgtctacgagaaccgtctcagcataacgaggacgagttagtgaagctcttaactcagttcgaggaccgagtctctcaagggttcaatcgcgagttacaggatttgatactgaaatcgaaattgttctcttctctggaatcggttctgtgtaaccctaacatttccgtatccatgacgattcgggggttttgggtctccggtggtgagacggtgcttcagctccggtggtgagacgagagagagaaagagggctgggaggtttctgcagaaaaagaagaagaaagaagaaagaagaagaggaaagagaaaaaaaaaaaaaagtaaaaaatttatttttttaattttttaaattaaaaaagtaaaaaaagaaaaaaaaattactgattttttttattttttt

SEQ ID NO: 406764 - DNA, 595 bp, Cannabis indica
acatgcatgatcactacatagtaaattttggaatgcatgtatccaatttcttgtaatttgaaatatatatctcttgtgaggttttcaattttgactggctatgttctttctttcaacatcttaagcccgatatagctgcaataaattaagaatcaaattgagaaaaagaaaatatttgattagtacaagttaaatagaataaattaatcacaagtaatttaattataaattaagaggaagctatatatactacaaagtatttttatttttgtagtcataaatcatgatgaaagacataaatgagttgaatgtttatatataatttttagtatgtgtgttgacgctaaaaaatgaccaattcggtcatatgtatagaagagatgacagctagaaataactaagtaaaatagagagcacacacaagaatttatattcgactccccatgtcgcgttggtaatagaattacgtttatttcgaaaaatttttattttttacaagaattacaaaaaaactggttgtctgaaagctctaacttctagagagagatgctctgaaccttatggacagttttttgaatgtgaaaaatgagctaga

SEQ ID NO: 406765 - DNA, 617 bp, Cannabis indica
aaaaataaattatcatttcaactattactatctcaaaaagaaaaatagaaataaaaaattgaaagaataaagttgtaataacaaatgtcaaattctatgaagaaaaaaatgtaatagaacaaaaagataaatcaaactgtacaaaactaaataaaaaaaaaatcgtaatataaaaatatattgaagagttgatattgttttgcttattacaattaggttaatattttattattttttatgttaatttatagttgtctttttgttattttttttatagttattttcatatttttattaatttgttctaagataattttttttagggtaaataccattttggaccctctgttttacaaaagttaccaattggatcctgtgttttgttaaatgacaaaatgaaccctgtattttctaaaatagtacaaataggaccctgaattgatttttttgtcaaaataaagtttaattacaatccaatctaaaagtgctatgacaaaactgtttacattttttgttatctgttcatattaaacattgtcttcaagttggttatattaaaaaaaagttgccaaaaattaagctcaggtcttttttttactattttagaaaatacaggg

SEQ ID NO: 406766 - DNA, 643 bp, Cannabis indica
ctcaaatagcagctaataaattttttgaaggtgaaccagaatcaatttgcctggagtcatggagatatgaccgggattgaccctaatattatctgccatcatttaaatgttgatccaaactacccagctaagaggcagaaaaggagacccttggattccaagagacaaggggcactaaaacatgaagtggacaagttgttagtcaacaactctatacgcgaggtgttttatccctcgcggatagccaattctattctcgtcccaaagcctaacggaacttggagaacttgtattgacttcactgacttgaataaggcgtgccaaaaatattattttccactacccaggatcgactagttagtggatgcaactgctaggcttgagcttatgtcatttatggatgcatatttgggatataaccagaaaaaaaatgtatgtctcagatcaggagcatacgagcttcgtaaccaacatggggctctattgttacaaagttatgccttttgggttgaagaatgctggggcaacatatcagtgatcagtaaataaaatgttcgcaaactaaatcgggtggaacatggaggtttatgtcgatgatatattggtaaaattaataaaaagtagggatcataccacagacctc

SEQ ID NO: 406767 - DNA, 648 bp, Cannabis indica
ctatgtttgacatatcagttttagcataagcagacaagttagtggaagatgctgagtaaaagaatagtccttggccagaggtacccttaagatattgtaatattctatgagcagcagtgacgtggggaaccctcggattggatagaaattgacttagtttgtttatggtaaaagagatattaggccgtgtaatagttaagtaaagaagtttaccaatgaggctacagtagatttttggattgtctaagggttttccaacatcagatgagagccgaatgttggattccattggggtgggagcagtagaagctcctaaaaaactagtgtgagttaaaagttgaagggtaaaaggttgttgggagacagatatcgcagaggaagaacgaccaatccccaatcccaagaaaaaacgtaaaggacccaggtctttaagttgaaacaaagagttaagttgctgtttaaaatctgtaacagcatcatcattattagaggtaatcacaatgtcatcaacatatattaatagtggatagaagataattgttgagttttgtgtatcattttctagaggcttgtttcaagccataaagacttttggttaacttacaaacaacatttgggggaatttgtcccttgggtttataccctttt

SEQ ID NO: 406768 - DNA, 1017 bp, Cannabis indica
aaataatgaggattaggctattaccgaactgctcggggctaaacctctataaaattcttgtttctttatatttgttttactatatatcgattgctataaatcacctatcgcttactaaataagacttattgtcgttggctaaaagcgaggtcaacatttttgtgctttcattaagagaaggatcaagaatcgctcctcattcaaaatctaatcccaaatacgatggtggtgcagactcgtaggggtcaaggggatccagccaatcaacagaccgtggatcctgcatcgcagaacgtaggaaacacaacggttctgctagttgttaatcctggatagccggcaaacgtgggtcacggtgtaacgattgctatagaaaatcgcgcctggtgtgcaaaagattgggaataacagttctgcaccaaaccagggcattcataacacagccgtcccgcccgataccaatgttcaaacaacccttagagatgctattgagttacaaaatctccgtgacgctcttggactcatgcagggtcataacaataccctacatcatgatcaggaagaactctacgctgaccgtaaatctcgcgtttagaaagaaaaaaggcgtatgtttgtttagtggagagacagaaagatggtggcgttaagggctcatcatacagagattgaaaatcgtagtgggcaagctaccgtgttgatacgaaaagcctaccaaactgtaggtcagtaacaaccgaatgtctttccccggggtgagacggacgaagatccaacgatcaatacttctcaaactacaaatggtcagctgcccaatccccagtcatgagttccacttgtgggccaagcggtaggcgggcagaccttgtctagtaattcatcgagagagatcatacctgatggttccaaccagatcaaaggtgccatcccagctgtcaaccaagcaaatcaatcgctgaggcagccagacgcttctgtattcgaaaggttgggcacaactcatgacctaaggaatga

SEQ ID NO: 406769 - DNA, 597 bp, Cannabis indica
tttttttaaaaaaaaatatattgaagtaagtcattaatactaaatgagaataatgtagaataatgtaagtaaaaaagtatattaattatagggattatttcacaaatacataaaaataataaaaaaattattaaaaattttaaacgtaaaaatgtaatttttttttttaaaagggggccttacgtaattattccttaattatatgtgtcaaattctaacttttagtgtgtgttaaatttgacacaaattttagcaccccacattatgagtgctcatcaaactgctcaaaccgcccgcactgcaaaaaaaaatacagtttgagattctttgcggtgcggtcgcggtttgaattattcctaaaccgcgcggagcggtgcagtgcggtttgcagttttgaattgttaataagcggttcaaaccgcaccgcacattataaaaatacaatttttatgtttatttaggtcgaataggtaaatgttcaattcaaaactcactaattattgtattattttttttttgtaaaatctaattattgtattgttgaaacttattttttttctatatttattttctaagccttatggtatttttgtacaa

SEQ ID NO: 406770 - DNA, 750 bp, Cannabis indica
tatccatgtcagtgctgactgccttaaagatagtttagataacagctgtgtgattttctaatgttatctagacgtattaaatggaacgtaattaaaccccacaatttcaggaaaagttcttatgtaattcgaatttaaatataattaattgccaatctatattactataaatagggccagaatatacagaaaaaaaaagaacaaaaagtcttggagagaaaaggatcactgattaaaaaaccatacttctgtatccagaaatatctgaataagatagactcgtagactatgcagagttaactgcaaaaccacgtagaaatttggtgtcaccattattatttttcctattaatttctttgtatctatgtataatttattacaaaacaggctcataaattgttaacgaaaatctacattaacaatttatattaaccaaacggagtctacatatcaaaagagaaatttacaactcttttacatttttaagaataattttatctatgctagacaacttcttttaaatctacttttgaggctttctttaatgttactatctatacaacttgaattcatacactttttcttatttatacacaaattttgctttagccaaatgccataaattgcacatgctaacacattcttatgaacagaataaaatttttatgacacattctaatatttttttatttttaaaattatatgtgtttttttaaaaaaataagtttttcaacaacaaaaaaaaaaaaa

SEQ ID NO: 406771 - DNA, 520 bp, Cannabis indica
aaaataaattataactctactttattagtattagatatgatattttcttttcaatcattgctattttttatggtaccttaagaagtaattctgtaattactatagtagtaattatactttattttaaaatacaatatgtgtatttagatatcaaataataattatacataaataaaagaaaaaaattaattaaaagaaagaaaaaaaaagtaaaatattaattaaaataaggataattacataaggtaccattttttgtaaaaaaaaattatatttttacgtttcatgaatttttttttatatttttacggtttcccgtaaaaacaacacgaaaacaacaagaaaactacataaaagtaacatgaaaataacatcaaaacaacaataaaacaaataacataccgataacaaaaaattaacaataaattaatatgaatacaacataaaaagactgtattttctgtaaataaaatcaaaaattcgtaaaaatgtttaaaattctgtgaaaccgtatttttgt

SEQ ID NO: 406772 - DNA, 739 bp, Cannabis indica
gataaagttatgaacacataccaagcttggatttgaactaattaatctttttcaataaatctttcaaaaaaacaaaaatatacaagaaaatacagaaaataatacatatcatactctaatttaaatttaaaaataagaaaaaaaatttacagaaaaaaaagaaagaggaaaaaaatacattacatttgatagatcataaacataccagtttgggggttgctaaaaattttaggtcaaaccctttttttcttataattttctttccactacagtggctccagctgctcctcctactgctccttccttctttctttctttgatttttgtgtttcgttggtggtaacctagtagagagagaaaatgttgaggagaggcttaattaatattgtgagtaattgattggttaggtgaggcgtgggtaaagtgaggtgagctcgtgaggtaagtaggtgagagagaggagtgattgattgtatatatataaataaagtaacaatgaaaaaagcaaaatattcctgacacagaaaaaataaagtaaaattatttatatatatataaatgaaaaaacgtttaatatatattatataaaatatattgaagatataatatatattaaaggtaagtaaaatgttaagattaatggtcggttaacggttataaccgccagcttattggccaaaccgtaaccgactgccagttacagcggtgtggtcggttttttttaaacggtttcggttat

SEQ ID NO: 406773 - DNA, 916 bp, Cannabis indica
atagttatctgtgtcatgtcatgcccaaccaaataattttcgtgttggggtcatgctcatgcctcttgggctcgtaccagtttcgtattgtgtcaaaaagtccgacccatatttataacactagggtccatatgtatactatgtttcttagtcctaaatacttaatttgtaagatgatacataagccttacttcttttttttttttagaattagcgattatttataaaagaaaattagatttcatgatcattacaaataatatttgttggaatagtgggcacatcaaccatatcagttaagttttggacaaacacccacttagtgacattatgagccgcaaaattacacaatctaaaaaataaaagcaaaattacaattcaaaaagtaattaaagagtagtctattataatttaggacgtagttattgttgggctttgtgccctaaataaaactttatttcaatgtaattttttctatccaattatcaataaaaaaacatatttattttcattacttatttaatgcgttatttggttcatgtgatcatttataaattcatccaaatccttattacattgatattcttgtttatgattaaatgtattcctatgatatattagtacccagggtttaattgctaggataatctacaatgtagtttacttgcaccttggataattgttatgtcctttccaggacattggttaaaataagctagggttgaatgtatggagtatgcatcagaaggaaccgatattgaacttggataagatataataagcttaccgtaatattaatcaattcaatatcacctagttaatcttagatcaaatgatcttaatcctgagatggttaggttctagttcaattgtattatttgtgttcttcaatctgttcgttaaagtcgatcaatgg

SEQ ID NO: 406774 - DNA, 1059 bp, Cannabis indica
aattatattaattatagttggatttattaaagtcaatatttagttaattgccaaaatattctaaatatgatcaatattattttgttaccaattttgatttagttacataaattatatttttttataattgtcaaaatatttttgacaatcaattgaggtagatactttgatgaaatgtcttcacctatataaatatagagtatttggccctaggctcactactcattatgtgaaacacaataaattcatctaaaaagagtagagagagtttggaaacccgattacccacactaatcaatttcttttgcggatccaaagcttgtgagggattttaaataatttcttctctacatatagttttcttcagttgcacttctcttgccagcattctatatttaattctttttctactacaattggttctttgttttttcaactcgtaaaacttacttttggcggccgtgatagttaattgtgttggcaaaatatttttttcttctagtgacataatttgcacccaaaaaaaaaaatatatgtcaaagatcaaacatttcaattcttaattagattatttggtcagcatgtttatctgttagagcaacactaatagaaatactattaagaatactcgatgatatggatatatttttaataattattaattgacacttactatcattagtataaaaaaatgccataaaaaataccatatagttataatatcttttacatcttctttcttattgttttattagtaacgaagtttatttatttaatatatatgaaataataattcataaaaaaatatatattaaataacaatataatattattttaataatttttagatgctgattattagattattttaaaataaaaattgttaaaatgtatgagaaatagaataatatatttatatatatattctatataaaatgtgactatataacaaaattcttggtttatgagaaattattgggtgaattttttttttaaataaaaaaaaataacaaattattagatattgtcacctaaaggatcagcatccatgtagttagt

SEQ ID NO: 406775 - DNA, 535 bp, Cannabis indica
gacctaaacttttctaaggcaaacactacaacaagtaattatttctcagttgtggaataatttaattgagcatcattcaaagttttgctagagtaggaaatagcatgtggtatcttatcaattctttgtcctaagacagctcctatagcatgatcagaagcatcacacattatttcaaaaggaaggttccaatcaggagattgaataatgggtgcagtagttagcatagttttcaatttctcaaaagcaatatgacaatcatgatcaaaaataaatgcattatctccggtagaaaccggcgtgacctaagaatgacttaatttctttcacagtttcaggtggtggagtcaggagaaattaataagatagggaatttacttggttaattcaagaactactaattggaagcttgattatatagaccaatggtcctcgcactagttgagataatattggcttgtagacttaattaatgagttttaattaatcaattaaaattctaaattagactatgtcttatttatgaattttcact

SEQ ID NO: 406776 - DNA, 879 bp, Cannabis indica
gctagagttaattgaagggagagagtatattggacaacccacatttaatgaaatataatatgaaagtatttttgattaatggatacaaaaaaacagtattcctcaacttatccctataacatataatcgaataaactaaatacttagaaaaaaaaaacttttttaataaatttaaatatacacatataagtatgaaaaatttatttaactattttctatattttaaaaaaaaaattactaaaaggttagataaaatatggtgtttctaacttagttaaagtgaaacaaataaatatataaattatttatgtttaaacaatatattttttaagaaaaaaaattaccaaacgtaaatatatgatttattaaattattattttcaaatttatctcttttttttttaacatttttcttaattatgttattattctatttttatataattattctttcaagtattctattaattttttttttagtttttattaattataaaaaaaatctgttactaaacatttttttttataacaatattgaaaattattttaaatatatatcatttattttttaatagtatattatataggctaattaagattttcgcccccccaactttgacatgtaccaaattatgttccttaaactttaaagactgttaaaaattcctcctgaactattgagattattggatttaagaacttttgtctaattttagtaagaaaagtctaacatggatgaaagtttagggagtatgatttgacacatgtcaaaattcgagaagcatgatttagtagatatcaaagttcgggaagcatgatttagtacatggacaatcaccgaattagtaaaaactgaataaaatctaacaatctcaatagt

SEQ ID NO: 406777 - DNA, 527 bp, Cannabis indica
gatcaagaagattcacacctagaattcagctgatatgttcacgagagtgtaacagagaaaagtttaggcatttcctaaacttgttgaacattgaagagcactaaaattcctctattttcagaggcacaacagatggaatggtcaaaagctttaaaggatacaaggaaatcttttaccaaatgactaaatattgttggagattttagtaacttagtgtattgctactgctagtcacatctagtgaactgtcaaatggagcaggtttgtgcagccagctctcgaggtagttaaatttcggttaactaactcgggtatctctcatattgagttttctatataagaatttatgtattacttcttaagtgatgatctaaagagaaatttagatgattattacgtttgtaatgagtgaggagggttgttatagagaataaatgtgcttgatcatacctctcttaagtgatttgatttgtaaggtgttgggttttatgccctaaataaaactctttacaatctgattagttatc

SEQ ID NO: 406778 - DNA, 733 bp, Cannabis indica
tgggagtgtcattgcgcaagagctttatggttcagtagtccattccctatctgttgtgagaatgggagtgaaatctcggtaaaggagtggttagtttgggcactggagcgaattccaatggagctaaatgatcaattcctatgtttcacggggtgtttgtttgaaggtatatggaaggcaagaaataacctcctctttaaagggaagctagttgacattgctacggttagagaatcaatcttgagaagatataatgagtatcttttgctggcaactacaaaggaaatcacagagattaagagagtgtcgattcgcccagcggttacgaacggaagtggctgggataacgccacagatgtattttgtatgacagatgcttcgtggaaagatggcagagcaggaatagcgattggccttctggatcgaaggcaaggaaaaactttttggtttgcaaaatttctgcagtcttcctcgccagctgaagcggaattattggctatcaaatgggccatggagttggctgctgagagggggtgccagtcttttgcgggagcctcggatgctaaggtgctaatcgaagctttggtggctcgccaatgtcctcctttgtggaagctgaaatcgttggctttggaggttctaaatttgtgtaacagttttaatttatgtaacgttttttatgttaagcgagtagacaattcggcatgtgatgctatggctagatgggccagga

SEQ ID NO: 406779 - DNA, 790 bp, Cannabis indica
acctatcaaataacacaatttccacataaaatcagtagtaaaactctaaataaacaagatagaaagctaccttgaacttctcttaaacacaagcttcaaattcaccaccacacaagattaaaccaaggctaatttcaagaatttagaatggttgaagattgaaatgagaaagaatgagaggtggtcggctagggctgaacaacatcaaaaataagcttctaatttcagtcaagtttcccttttgttgaaaattaactcaatcaagcaaaatgacaataatgcccctagggccataactcctcataagcacatatacaagggcaaataggtcaatatcacataacacacaatttaattaattttaaaattaatcacacatcaataaaatgccaataaataatcccaaatataaatttcggccccgaacccggttcggcccgaaattcccaattgtgactataccgcgctgacttgtcagaaaacacctaaaaaaggacacaacaagtatactatataataatatagtccataagcatgtaattaaattaaagtcacagttttacccttctcgggtcaaaattacaaaaatgcccctggctcaccaacggggtcttaacatgtcatataccagattaattcacatataataaattatataataatataattccataataataaatatttatctagttaggattttactaatccattctcttgatcctagggtattacaattaccccctccttatagaaatttcgtcctgaatttacctaatcaactctggat

SEQ ID NO: 406780 - DNA, 710 bp, Cannabis indica
tatagataaaaagataaaaacagtatagtagctatagtttgtgtattgtataaatattagtagcaatgaatacataaaaagctaaatttttctatatagagatgtgaaagatgaatcttttccaactaatattacaaaactatatatatattaattgtaaaccctattctctctcctcattccactgttcaactacagtactagagatagaaataagacagacatcatagatagagaaatcagatatgaccagtcaaactatattaattattattattattagctagctcagctgcatgggaattaatattgttatttatattttatttttagcattattattttagtactcaagtgtatttaatattaatacttttatatctgcctttttcttctctctataaatatatataaagcctcatatagtttgtcacaacacacacccactttataattactttactactattttcacttatattctaaatctcatatctctcaaactcaaccaaaaaaaaacccttttgagatcatcattcatggcagctttttcatcatcatcaatccttcttgactctgtttatttgcccattattaataatcacaacatgttcatgaccaataagaacatgtgtagtgaattaataatggatcataataataataataataatcatttctactcatcatcatcatcatctgatcatcat

SEQ ID NO: 406781 - DNA, 738 bp, Cannabis indica
tttgcttattattattattatttgctactattatgatatatatagttagctacagaatttatgaccgtaattggatttatgtattttattttatgcttttgacacaaaattatggagttagatttgttactatatcatcattgttaattatttgaagaaataaataattaaatattttaaactcggccaatttcaaaccaaacaatttgttttaagtggattggtttggttttaattttaaaaaatctgctatattggttttgttttgaaaaaataataattggaactataaaatttgacatttcatagtgtgtaaaactaatttaaatttaatacatcaactaatttaatttatattaaatatgttaactgttcactcaattaaaagtttaattttttaataaattaaaaattaattgatgtgtcaaatttaaattatttaataatataagacactaatttttaagtgagaatcttggttcatccgtgaccaccgctagatgaaccatatgttattggcttaaacagaccgaccaactaaaggtcaccacgtaattccttcttatctctttttttatttttttgaacaacattcttatctctttcttttcacagtatttttttcttatttaagggagaagagattgcgaagaagacaataaagaaaagaaagagaagaaaaaagagtagataattataacaatgacagagttctgtgggtcgactaacctctttgtt

SEQ ID NO: 406782 - DNA, 505 bp, Cannabis indica
atgacacatactaaggaatatgagggttaatctctctcccatcttcatcaacctttgctggtgcaagcccaacactataaaaaaacagttatttcagtgacaactttttagtcacaacataaattttttataactaaatgtaacttttagccacaacaaaaaatcatttgtgactaaaacatagtatttagatacaaattgtcactaatttagttttagtcacaacaaatattgtgaataaaaatatatttagtcacaacaaattgtgatctttgtaactaatacctttagcatagaccttttagtcacaacatagaaataattatttattatttgaaaaactgaatttttgtaaatatcaataataaatacgaaaacataaaaatgtatacgtctgcagaagcaggatgtaatcatgttactgcagaaacctgttttgcaatgacaaaacagaacaggcataatataaaataattgcaaaaaattaaatcacttgacacaagag

SEQ ID NO: 406783 - DNA, 592 bp, Cannabis indica
tatgagaattcgttgacaacagcaactgatgttatatggttgccttttttataaggattaaataaaccaatcaaggtatattatgaataaaattttggttttgtcataccaaaatttaaatgtcaaggtatattacataattgtatacccttattttaaaagacaaaaccaacaaaattgatgttatatttttggttctgtttatttatagtgtgtgtgtgctcctttgtgtttttttttttttggcatgttaggttagacaatggattgagatttttttggcatgttaggttagacaatggactgagattttagagagttgtgaggctatttagatactgaatatttgcataaagatggacgattctaaactggcaaggtcttaatatctgtcatataaaaataaaaatataaaatagtttaagttcagatcattttaagtttttgaaatcattcttatttccacttagatagattttttttgtttttgtttaaatataaatttgaattagaatttatttttgtattaaataaatatacatttgttttctatttaaaacttattgggaaaaaaacaaggaatattctaaaa

SEQ ID NO: 406784 - DNA, 716 bp, Cannabis indica
gaaaatatcactgattacaaacttaagcatcttagaactgacaatggtttggagttctgtaatgatatttttgacagctattgcaaagaagtaggggttcaaagacatagaactgtcagactcactcctcagcaaaatggagttgctgaaagaatgaataggactttgatggacaaagtcagatgcttgttactgcaatctggacttgccaaagcattttggggagaagctgtgatgactgcagcttatgtaatcaatagatgtccagccagtgctattgattacaagacaccagaggaagtgtggtctggaaaacctccagatttgtcaaatttgaaagtctttggctgtgcagcttatgcacaccaaagtgtgggaaagttagagcctagagctctaaaatgcatatttttaggctatccagaaggcactaagggatacaggttgtgggtaaaatctaaacctggtcttaaaactattaatagtagagatgttatttttaaggaagatgaatttccttgtgttactaacagtttatctagtgcagaaacttctttacagcctaacaatgcaggtacaaaagttgattaccaagttttgagtcaaaatcaaacacctggcaccaatcaggtggaacacaatgtccctgaacctgatacaaatcaggtggaacctgatattcaagaacaagggggtccagaattgaatgttgacac

SEQ ID NO: 406785 - DNA, 849 bp, Cannabis indica
cggattggattggattagctattttatgaacaccctttaatactaacattataataaaattatttttgagtaaatatatatttatacatgtattacaatttggaataaaattatttaattttacataaataaatttataaaacatatgtatatattttttattgagatgtaattatttttatatagatgtatactttgttaatacgagatttagaaaatatataactaattatattttaaatgttatttttatttataattggtccaaatcgaaactttattttctataataaattagagattattcttgaatagagtattcttagatgaaggttttactgtgtaagattattcttcatttaatgagtcaagatattgtaaatatgactcttctctattgtataagatgtattggttacttatttaaaataaacttagatactagaaaacttttaaatatgaaatattataatatttattatattaatccacaaaattagttagtatactagttttgttcaaatttaacatttaattaattctttgttaataattgataaaaagaaaaaaaaatattacttttatcttattcatctttgtttatttcgaaaaaagaaatatgtttctcacaattcaaaatatagtttaaaattgcttaaaaaatgtaacgtcaagatatcttattcagcaaaaaaaaaaaaagtcaagatatcttaaataacaaactaaagaatatagcctaaaaattttaaaaataaaatcatagtcttaaagttaactaattaaaataaacaaccaaatgtgtatgtgaaaaaaattaatcttgaaataattttttttaattaaaaa

SEQ ID NO: 406786 - DNA, 991 bp, Cannabis indica
aagtcatacaatggtttgactgggtcaaaaggcctatttgaccgttgggttttttcttggtttccttttgctgtgtgtaggatatattaggaataaaattcctacagttttcatagcttcaatttggtttccgagccaatggccaggaacatcggaccaccagacgctacatctacccaaaatgtggtcgtcgtagctgtgtattcttttttattttttttttaagcttatcttttatatatatctataacataattgatgttcacaacaactcaaccatacaagtaagaagactattgtctcatggttgttctagtttttacttgcctttacctgcaccacaaagcatacgtgagtcgccactctgcaagaatagtaattaacaacataaatcaaatagataatcaatcaaagttaaagcacgaataaaatccatactgattatcataagtataacaataatccataataaacaaaaaattatctcattagacaaaccatcaatatcactatatagaatttaaatattctagttgcaatctagtaaaatatccttgatacctaagccagtatccatatatcactgtcattggcaaaccagacaacccagatacctagccaccagtatccctgatatgtcactgtcgttatctgatgagataaccagcaagtagaaaacttaaaaacagtttaagtttaaattcatgactattcttttataacggtcatgatcgcttcttcactttcataacaataatgactgtctcgttggtttcataacagtaacgtacgtctctttagtatcataagggtaatgaccatctcgttgcttttataacggtaatgaccattgtggtgaatcttcaccctcaaaacagcagcaatgttcaagaatgcacaaacaaaactaaaaccaatcacaacattaaaactataacttaattgaaattaaataaagaaaacttagttcaataatgaatgaataatggat

SEQ ID NO: 406787 - DNA, 663 bp, Cannabis indica
cattgtgttgttgttgagtttttgtgaaagtagttttgttttgctttgttaggttaggcttggttcttactactttctgggtttttttcccctgttttataggaggaggagacgcgatgtgcaagagttgttgaagataaagaaaaaatctaaaggttctaaatcgaaggtaaacttctgttctgttgtaatgggtccttaaaggaaatggtttctgtctttttgtttttttttttttttttgggttcatgcaagtttagtagaatgctcttatatttatttttgagatttaatcgcaccaaacacaacatttgcataattatcaaaaccctattatgggtttcattaagttttgtagaatgcacttatattcacttttgatgattgaatcacacctgcatttatttaattatcaaagtcctattacgaggttcattaagtttagtaggatggtcgtatatttatttttgatgatttaatcacacaaaacacagcattaaccctattagaaaaattctgtctcttatacttattattggaattcaaaatattacagaaaaaagttgtggtagaggatataccattgtcttcttgagtttgtgtgaatagttttgttttgcttggttaggttcttacctaatattttttttttcttgtttttgt

SEQ ID NO: 406788 - DNA, 414 bp, Cannabis indica
ttttttttatgaaatattaatatttaagaataaatctaagtaaaatattgatattaatttaatattattttgaaatatttttttctttattatttatggattataaatttattaaaagaaaaaaaattactgaaaaaaatgaaaaattaattaattagaaaaaagtggagcaaccacgaaatacgtacacttagatcgaaaagcaggatttgtaacgtacaaattatatatggttttgaacaaaactaatcatgttcttaagggaattggtttggttttaaaattttacaaaaaaactgtaatatattagtttagttctaaaaaggctaattaagatttttatctcttgaattttgacatgtaccaaatcatgccccttgatcttttaagatcgttaaaaatgccccctgaact

SEQ ID NO: 406789 - DNA, 778 bp, Cannabis indica
gacctactaatgcctccaccaatggatgagcatttacaagtcatcattaggggctcacacattgctggagattcaggcaaagctcgggagagttatgcccaaactttacagtacgaacaaaaggaagtagttttacccgtagaagaaaggaagccaaaaatgccacaggtagggaaacccactataaccttcattgaagaagatgctatccacgttcgcttcccgcacaatgatcccttagtcgtggaagtgcagatagcaaataaaacagtggcctagattatgatagtgtggggaatattttaccaggatctagatttactaacaagtatgttgattaatatcctaagtacgaattctctaaaacaataaaaataaacacataagggtttaagaaaaccttacattgattgcagcggaataatgactccttccgttcaagatctctagcccttgaaacctttctgtagcaaagcattatcaagatctaaacttggatctctttctctccttcgagtttggttaccactgtcttactcactatgattgagtacttgacttgctatgtgtaggcacaacactcattcactcaaggtttcgaatgtgaagaacaacaaaggaggcttaaatcactaaggaaggaactctctcatctaggttggttaaataatcaagatgacattagtttgacaaagtgtgaagtggatgagatgagagtatcatgttccttttatagtatttcgacttgggcttagggttgaattatatggattaaaaa

SEQ ID NO: 406790 - DNA, 719 bp, Cannabis indica
catttgatcttcaagaaacaccgcatccttgcttctaataatcttcttgtttaatagatcccacaatatgtacccaaactctgcatgaccataccccaagaaaatacatagttttgccttatcatcaagcttagatctctcgtctttaggaataagaacaaatgctctacactcaaagactcttaaatgatcgtatgagacattttttcccctccatactctgtcatgcacatcaccgttcaaaagaactgaaggagaaaggataatcaagtcaactgcagttctcatagcctccccccaaaatgacttaggctatgtttggtaggaaggagggagaataagatggatggagatttgatgaaggatggagaatataagggagggagatgagagtaataatccttttatgttgtttgataggaaggatggagtgattgaatgatagataattactaaattataaaattactattttatccttataattatttttaataatagttattgagggtttttttgtaattttataataattgaagatggagagttctaatacttctattcttggagggattctgaattagggatttgagtgcatttgctatcctctcacctctcatttctctacttcaattcctctagccaaacaatgggatttgtgatctcctcccacctctcatctccatccctccacttctccctcttaccaaacatagtgt

SEQ ID NO: 406791 - DNA, 590 bp, Cannabis indica
tacagtaaacgtgctattaatattttaaggtgtatttaaatttagtctaattatatattagattttaaattttatcatttggtttaattaatttttgtcatttaatcaatttaatatttattatatgttgaaaaaaactaaaattttagtattaatttttataaatatatatagaattcacgtataataatataaattttaattatttattaaaattaatataaatgtattatctaatttaatttaattagatatttaaaaataatattgatttaattataattaaatatttaatatatcacggttagatcagacaatttttattaaattggatcgacttatacacaattttacttaatattttattattttctctatagaatttgattcagaggaaccaattgaagaatggaatgaactagagaaaaattgaaagtcccacattgaaaccaatgatgatagcaatgaaatctacaataaatatatagagagaaaataaagagaaagcaactaattgggtgtatatctttatatattaaaagtgcttatctaacggtattttttggtttaacattcttggtttaacagaa

SEQ ID NO: 406792 - DNA, 959 bp, Cannabis indica
aaccaagaccaaaaccgagacctggacccaggaactagataaggacctgggcaacaaaactaggactggacctaagacccgaccccaaacgcggacttgaacctaggacccaactcgtgactcggcacccgaaatggaaccagactgggaaccaagatcgggatccttatctggactcggggcttggattgaactcgtagtcagtgtctagatttgggacccagaccctaacccagaccaggacccgaacctagacccgtacccaaaccgaatcctagacccaaaccctgtgacccaaaattggaaccgaaaccagaagtagaccgagacctaagaataggaccagaactaggacttggacctggacctagaaccgtaactggacctggacctagacctggaaccgtaactggactaggacctggactccaacccagacctagacccgaactgcgacctagacccagatcccaacccagacgtcgacttagttcggaacctagaaccgaactcagacctaaacatggaaccagaatcgggacacggaactagggttgggacctagaactgcacccaagtctcagtcccgaacccaaacttggacctaggacccagcacctgaaccagaacaagaccgagacacgtgatagggatccagatctgggactcagaccaggacccaaacccggaccctgagccaaacccgcgacctggaactagaacatgaataagaaccacctgttggaaattattttaccaggatctagatttactaacaagtatgtttattaacaccctaatatgaattctaaaacaatgaaaataaacacatataaagtttagaaaaccttacagtaggtgcagcggaatattatgactccttccatgtcagtctaaatcaagtgttctgataaatcagggaataaactttattttgaacatataattaagattatatt

SEQ ID NO: 406793 - DNA, 395 bp, Cannabis indica
tgaatgcccctacactgcgtactgttgcacattccgatcaatcctccatacttccgtgtccattccattgttccatatcaccaagttgggatcaatcatccatgctttgttaaggtgagcatgaacaccttatgttgggctcaacaactatcaatacctaatcgatttttatatcaaaaaccagtgggtgataaggataggtttcttccaatagctagtagggccaacgaattattagagaactttccatgtccattcggacaatgaaacgcccctacactgcattacttttccatattctaataattcctccatacttctgtgtcgattccattgttccatataaccagttgtcgcatcaattgttatggtaatctagtagccgatcaatctag

SEQ ID NO: 406794 - DNA, 522 bp, Cannabis indica
actatttaaaataatttttttttcctttttcttcttctttcttcatcttacttgacaaatagaagatagctggatgataaagaagtgccttcttaacctgtatcttatacccaaatactctccaaagcacaatacattctccctctctgtctttatcagagccaaaatatgcaaaaactcgtgtaaaattacaactacccatttatcttattcatcatccttgggaggaagataaattgcatattcatagggataaacataaggcaatttttgccaatcatcttcccacttcttcatgttcttatccatttaaaaatctctagataaatgcatattgtgttatacccaaaatttgactatcaaccagaagctgacacgtataatttaggaggaatattaatcagctcaataattgtattattaaattgcattattaaatgcaacttaaatgactcgttacagaaagtaaatactattttggactctgtgttttgcaaaagttactaattggaccatctattt

SEQ ID NO: 406795 - DNA, 893 bp, Cannabis indica
atttatttggttcagtgtaattgaatttgttcagtgtagttagatcataaatcgatcacaatcattattaaagtttagtaagagaaagttttaaagttaaggtaaaaatatttaattacgtacatttataaagagtgtatcattatattttattttgagaaacacaacatttaaattataatttaactaaatataaagaacggccaataatttttacaacacaaattcaaaattgatatttacttttttacttcgggcgactaaatttactagtatataaatatttgagttacaactcactaagaaaatacacaaattagcagtccactgataagctaaaaatatgtcatagcttcactagctaggaaaatttggtacggctcatatataagaccaaacttttttttttgggacataaattaggggtgttcataaaatagttgatccaatctaatttacacgatccaatctaatttgtaaagtgtggatatccgtacttatgcggattagattagatagaaaaaattaaaatctacacttgtgcagattgaatgttgattgatatgcaaaagtaaccgatccaatctaatctgcacatctttataaaaaaaattaaaaatatatatatatatacaaataataatagtaatttaaaaagtctaatgcatataatacaattatatttcaaaacttaatagattaaatgtatattctattcttacatataattttttttttctacatacaatttaaaataaagtaaatatttctttatatatacaacttttttcttcttttgaatttgttattttatttatttaatgtgttcttggacacataaaataattataatttattttattttgttgttatgtggaaaaaaaatatttttt

SEQ ID NO: 406796 - DNA, 719 bp, Cannabis indica
tttcccaacacgattcccgctctaataccagtagtcacaaggctaatttctcacactcaaattttccctgcgatggcctagattcacccaaatctagtcagccaacccaacaacccgttagtatgcacacacactcacagtttcacttttacccagcgtcactcaacaacacacaattgctatcaagtaaatgcatacacaagcataagaacacacagtatacaggaaacccttttcccaaccttgttattcacacaatatcaaggattacacaatgttcacgctggacatcacacactgatgactctagcgcccatagcctactatataacacaataataggttgcggttgacatccccaactgcctaggccatgctggactcactagcacattacacatcagcatagcatatgcaaaataactaacacctgcgtgtcagccatccaagccctcacctagattccatgcatctgtcttccaacagattacttaagcccacgtgcatgtctttggatagacataggtaactttcgataatcgtcattcatgtgtgtcaccatgcacactgtctgagaaaccgtttgcatgcatgcccatgcaaagtcacgtccatctaagcccatcacgtagccaagcttagctaacataccccaatgttgccgtgcgcctatgctgctgctgcctgctgcccccctggtaggtgcacttcactcatat

SEQ ID NO: 406797 - DNA, 944 bp, Cannabis indica
gtatgtatttatttggaggtttttggttctttgtgttaattgaagattgcgcaattgtagctctatttactagagaaaggtataatctctaaaaatttataattctttgtttagtggagcttgaatatgttagatattcatgcatagtgaagtaggttctgtgattaattgtactgcggtcggatgggtggaatatgcatgttagaagagtttgaatatcttaaatattcatctatagtgaagtaggttctgcaaatacatgtactgcggtcggatgggtggatgattttatattattaatatttttttgttattattgtattattttatgtttattaatcattttttttcatgtttttaatttttgggaatgtccaattacagccgttatgctgccaaaattttgctagatcgaattaggatatatttcactaaaatgcataaaatttaataaaatatatatgtttgtggtaattaatttaactgattatttagtacacatttaatcaaataattgaataaagtttttttagaagtttcgaaatggatagaaattgaatgagtgagaatagattatcagcggagtatagtgaaggtgttgaccatttcttggacttttgtcagaagtatgccaaaaatcttaaattggttctttgtccttgtcttaaatgtggtaacatagagcgtatggacattactaggataaatgagcatttatttaggaatgaaatgtacaagagttataaggtttaagtttaccacagggaaaagaatagagttccgggcgagggaacgtctaagtctaacaaggttaagggtgttaatttggactatgaggatgatcacattccagaaatgattggagatgcacaatatgaattaaatgtcgatcctttaaaatttcaaagttttgtagaggatgctgagaagcctatttaccctaa

SEQ ID NO: 406798 - DNA, 569 bp, Cannabis indica
ctaacatcaagaaaccggtttcttggtgatttttccagcgacaatgctaattctgacgactttttcggcgccggcagcaactccggcgactttttcggcaccggcggctactccgacgacttttccggtgccgacagtaaactccggtgacttttccagcacgagtgacaacttcggcaatcactatagttttatttgttttatttttttaaaaaataaatatgaagggaattttaatattttttatggtaatttaattaagtttttattttttatgaattttaaattcagatttctttttaatgttttgtatggttttttttagaaaaaaaccatatttttagtttgattggttagataatgccatatttagtggtatttactttttatgccatatttatcataaccttaataatttttcccatatttttgaaaatagcccatagtaataaggggagtagctctttagccttatacagtgatcaactgttgttttttttttcatcaaaatgtgttattgggaaagatatataagtaattttaagaccatctctaacagtgacgaagcc

SEQ ID NO: 406799 - DNA, 621 bp, Cannabis indica
gcaagtctttttgaagcaaaaatagaaaaaatataataataaaaaaagagcttcttttaacttggatggattttctattgcttaaaatgagtcaaagattgcatttttagctcttaattttgtggtcaaaagtcaaagatgggaacttttaaagttaaggtggaaaattaaagaaaaaggaacctaacctgtaaggtcgcggcctagtaagaaaggtcactaccttacccctgttccctggaagaaaaattgaaacgggaaactaccagaatcaatgaagagtgtggaaattcgtttataaggtcgtgaccttcgtataaaatgagaatcttcaatgtttggctccatttaaagtgggctgagtcaaagctttgacatcatttgaaaattgagagaaattctgagtgtagaaggagagtaaaaaacagaaggcaccggtaaaggattccaaatagtgttatttctcctctatctctatcttttatgtcttttagtttaatttatattgttttagaatgactttaattagtagctaatttcttttaaggattattatgttaaccacttgagtttattttaggaattaatgtgattgttcaatttcttcttcttctctttatt

SEQ ID NO: 406800 - DNA, 718 bp, Cannabis indica
tctgacctatataaagaattaaccaaatatcattgcaggaccatggaggatgttcttgccaaagcatgggctcaaagtaaatgggaggaagatgaatcgaacaggcaaccgatctccaactacttaagttctcgtgagaatcgggggccaagacgagtagagtgcaagtcatccacgatcatgttgaaccataccccaccaacagatccagatcatttcaaggcagtggaagagctccgccccaacgatcatgtgattaccaagaaaggggacaatcgtcccaaaagtttagaggctatcaagataaagcaccaatcccaaagcatactctaacaatagaccctgttgaagtggttgctataatgaaatgcatgggaaataaagtcaactagcctgagaagattcaaaagctggaagctctgaaagatatgaccaaatggtgtgaatttcatggcgatcgcggacacaccacgactgaatgtatagcactcaagtttgaagttgcagagctacttcgtcgaggacaactacgagatttcctttctgataaaggcaaagcaactgtagcagaaggggataaaagacaagagagtccccctgaactgtaataccctgggatcccatttacaaaatactttacaaaaagtttactgttcattacaaaatacttgttgcccagcgactaactacagaatccctgatgtcccgaggatcatac

SEQ ID NO: 406801 - DNA, 618 bp, Cannabis indica
tatttatgtacattatagctattaagatatcgtaaaaatttttaggaaatttgcaatcatttacaatatagaaaacaatattcaaacagtctacactgcttgaacgtaatttttggcgtgttaaattttttcgaatttcttaaaattttgcaggatgtcttaaataagtataataacttctttaaaatttatatattatttaattataagatcagatattttaatattgggtatattttaaattaaaagatagcattacccttttaatttgaaatattatattaaaattatcttataggatatattaaataattataaatattttaaaattaacctatatatttttatagacattctaaccataatatttttcaaatttaaaatttgttattttattaaatatttaattattaataatttataagtgagaaaaatgatattttatatcattttacttatcagaagtttataaatagtattttaaatatctaaataacctatacatttttgtaaaaaattaaaataggcttaatttgagatattttgatatataatttgaaaaattattattttttattattttaatcttaaaatgataattgtctaaccatatttatt

SEQ ID NO: 406802 - DNA, 621 bp, Cannabis indica
agcaaacaaacacattagaaaaaacattacgagaattcaataacctaataaaatctatcaaacgaaataaatgtataatttttcaaaaaaattaatcggtagaaatatagaaaggcaaaaataataaaaaccctaataaagattcatttataaaatatatagatatatcacttcaaccaaaagaagattgaaagattcgatttttctaagattagaataaaaaagaataggtaagcaattatgaacaaggaagcaaaaatatgaatatctagaatgtaagtgcgcaaagaaatgattatggttcttttgggaccttttgatagggggtagagattgttgtgagattcagctacttcaatatcttaaaccacaaccaaaatctgttggaatatgctttaccaggagttagatttactaccatgtatgttatttaacattctaaatatgaatatctaaaacaatgtaaaaaaaacaaatataaagtttaggaaaccttacattgggtgcagcgaaatattaatggctccttccgctcagatctctaacccttgtatcctgtctgtagcagagtatcaccaagatctaagcccgaatgtccttctcttgattctagattcttca

SEQ ID NO: 406803 - DNA, 753 bp, Cannabis indica
aaataaataacatagtgataaatgttggccgaggtttttggtaaccaatttaataataatatatgagaaagttgtaagaagtttagtgcatgagatttttacgtgattgggacattaatgagccttagtccacgagtctttcttatttatgagagtattcattacagataatgttctcagtggatttctctcttaattgctctctttaattcttacgagcccagaattctcgactcccgtcttagtgtgtttgaggggtatttatagtgtttttttggggtaatccctagaattgaaccacttgtctttctgtgtagtttcagtaggggcacatattcctagcagatacaaaataggaatacatgacctattccatatgtatcttaggggttaggtggatataatcttttatcccttctttattgatgtgatccatcataaagtagacgtcactaggcttattaatcatagcgtaatagctacaacagaggggttacgccgtcagacttattgcttatggcagttccaatacgtcttctcccatgcgacattaaatgcaaggtgactgttcaaatggagtctggtatctcccggaggtgccctaccatggctctgacctccgagagtatgtggagcctttgtatctcctccgagcggtattttctcgttgatacttctgatcccaaaaagacttagttgattttatctctagagtcatgttctcagatccacgtgtcgtagtcgcattggtcc

SEQ ID NO: 406804 - DNA, 1016 bp, Cannabis indica
ttatagggttcatttgagttgaacttagtttctagcagcttgttttttatgtttggattaggttttgtgcatgtttgagcgttgaaaccttaactttgatctctaatggcatgtttgtttatattgagtttttctgggaaatactggttggattatgttttttatgcattgtataggtgttctggaatgtatggtttgcatttggtggaggattgagtaaaaaatcggaatttaagggtgagctggtgtgaacatgctagtcggttttaccagtacctgtaaaactggctagccggtttgtgcagggttcccgaatgctccactttctcaattctagtccattttagtgtcgtagttgggtgtttccctatttgctgagttagagtaatccattgagagtataacagaacctagggttgtgggttcgggtttctcagattagggttttggatcatgtgatttacccggtttcgttatgtgattagggcatccatctagcataagactttctgttcaggtgagctagcacacttgaatttggaaagaaggtaagaactatgtataatatgtaatatgaatatctgagtgtatacatgtgctaagtgtatatgcatgcttatgtgttagttgcactaccaacacttgtacagttatggtacatagtgcattggtatagtgaatattgtttgggagtacattacagtgataccggcacaagtacgggaaagtactaagtgtgtgtgtggtatatcactcagtggtactcagggtacgaaacaaaccctatgctaacactcgtacagtgaggtacgtagtgtatgtggtatagtggctacaccctaatattgaatgttcttactcatttgttaagccttgtaaatatgtgtacgggcgcatagttacaagtcagaattatatgatatgttatatgcttttcttactgagtctgtcgactcacagttctgcttccatgtgtaggtaaagaaaaggggaaaagctgaaaaagagtgagcctg

SEQ ID NO: 406805 - DNA, 705 bp, Cannabis indica
tttagtaacaaaaaaaaaaaaaacaaaaatgagtaatattatatttagcacactttttacaattgtgttccttaacaaataatagaaaaatgtaatattgtaattaaaaaaattgtattaaaattagctaccaagccataatctcatgaatgatgcaaatattatttttgacaaatttttaacattttatggtcaattattctttttaaatatttttacaaaatctttattttttttttaattttcacagttttttttatgtttttaattacaatttttttttgcagtgttttataaaaataacatgaaaattatgtaaaaatagagatttttttttttcataaatataggaaaaaaaattagagtttactttaatatgacataaataaataagagtaatgcaaggaaaatatataggaataaaaaataatcaaagtttaaaatatgggaaatcaaacaaaagaccataaataaaagttgataaaacttttaatagcaaatatcgttggagaagacacagtcactaacactggaaatgttaccgttcctggaaaagtcaccaacgatgtcatcatcgtcggaagagtcactggagttagatgtctcaaatataaattaaaataaaatcgattctataacataatgaataaaaacaaataacacagaataactcaaaccggtaataattaaaatagaaccggttct

SEQ ID NO: 406806 - DNA, 590 bp, Cannabis indica
ggttcgtaattagttttggttaaattatcgttttacctttctaattacttttttatcctttagtaccattaattcactagtgatcgtataatttacattcaatctaaatttatgcacaactttttcgttctagaattaacacttacagggaactaacacgcgatttgttaggaaagtcaggattctataattgtaaattatgttccccactatctatattattagatttccaaaataaaagttgtaagaatcttcttctctaaaaaactttaatgagtgaatcaaaaaaactaataacatcaatcacagttcatgattattatggatttatgtcgatctaccattgatcatcattatgatatgaatcgggtctttatattacacgacatgtttgataaaaatagcttaattacatatcgctccttgtcatgtatataatctctattttatacagcgcattcacttagatgtcatgctacatcagtcaactaaatcgagattacttgcaccgaataacagacatcggctgcactagtaaccattgattaaaatttctaaactttatatgttgctgactgttttattcatgg

SEQ ID NO: 406807 - DNA, 730 bp, Cannabis indica
catattttttaataaaaaaaaaatcggtatgggcagttaaatcgaccaaaccgtggttcaaaatggtcgattttaagataagttctggattggtcggtcggttttcggattgcaccaatccagaccaaaaaccgaattctagatttttatttagaaaaaaatcgaccaaaccgaccgatgctcaacccataaggcataggggttaaatagtcaaacaccactaccttgcctaatcctgatattccaaataatatttaagattgtcccactaaaaactaagattctaagtctaacccatgtgactctaatggacaaaccatcgtatttctatcgttaccgagaaaaaatcataaaaatgataaatttcatatatagcatatataatacatttagagttgaataaaatctctaaaattgagaaattataactctaatgcctatttctttaaaatagtgcccataacatatataatcacatataattattaaatacaaataattaaaactaattatcttaccaatccatattctaagtatgcagtcattacaattatcccctcgttaaaaggattttgtcctcaaaatctaacacgaataacttcgaataatgagtcctcataccagacttataaacgaaaatttccttttatgtccttgtaatagaaaacttttggttactccttgtgaatggattagaccatagttctattggctttcttcttagtttctt

SEQ ID NO: 406808 - DNA, 719 bp, Cannabis indica
aaaagcacacttaccacccacgggtattttggtcatttctataatcttgaatattaccgacattttcaatatctatctaacttgccctgctattaaatatacaattaccaaaataagtatgatatttttaatctaatttatttaaataagttcatacatattaatatatttataattttttttattttattacaaatcacaataatttttttcttataatatttttttaaaaaaaatatatataataaaataattagctatacttatactaataataataataaaataaattatataaatatcatctattacataaaaataatagagaaagatatattggggagaagagaatctcaaaataaaatggtaaaaaaggaattttataatttaaatgagggtaattttgtcaagtgaaatattcattaaaccaacaaaatagcttcccttataagctaatttcccaaagttggtgttggccaacttttgcaaaaagctaaaattttgtcttaaattcttaaaaaagctagttttctaattttaccatacacattttgaatgatagctttttaaaaaagtgtttctagctttcttaaaagctatcccaaacgcaccctaaatagttcttttgattttaaaagttgtaaaaaaaatatatgcttctcacattttgaaatgatgacattgaagagtagattataacgatatatttttaaactcaa

SEQ ID NO: 406809 - DNA, 436 bp, Cannabis indica
ataaaaaactcggccaaggaaaaaagagtgtagtatgaattgactccgtcttatttaggattcgtggagctcttttaatcgacgaagtctaatcttgtatgtcgtcttctcaaatgttgatgttcgtaataattgtgaatatgtatgcatatttgttgcttgattaaatctattaaacatcagttgatatcaccactctcttgaagatcatctgtaaagaagaatttagttaaatgagttttatctccttcaatttacattcctttagcgatgcaagcaattatccttcatatagaactattggtacttctttatggtgtaattcatatgtactcaactaatgatctcagttacacacattatctacttgcttcatgaagtataagtatgttagcattatttaaagttgtctcgttaaaaaccttgtcagaaaaac

SEQ ID NO: 406810 - DNA, 553 bp, Cannabis indica
ctagcataaggagaagggtttcactggccaagttgcatcttatacatatatgtatcaaatacaaatgagaaaagtcacccaaggctttataaggtccatatccgcccactgccataaggaaatggcagtgcccatcaaatttgataggcactgccccaatagcgtgacagtggtcagctattaggggtgtacatcgatcgatttcgtcgggttatagtgtatttttaccaacccaatataaatatcgggttgcaaatatctaattgtaacccatccaatgaaaaaataaaaaaaaggtataactcgcccaatgatttttgtcggttggtttggattaacccgtttaaaccgatctttattttttattttttttgttgttgttagtttttggtgttcaaataattgattagaaaaaaataaatgaatagtatatgcctttcaaaattaaaaaagttatagtttaaattaatgtcaaaaaataaatatgaattgaataaacattaaagtattaaacaatatttttcaaaaaatagaattaaaaaaataaactcat

SEQ ID NO: 406811 - DNA, 827 bp, Cannabis indica
tgatattaaatgtatttccaaaatatacatttcaataattattaattaatctacatacataaccttaattatttgatgattcaaggtattaatcatactgcggtctttacaatgttggtgtgagatctagggtttatgattcaagatttagattcaacaattattttaaatcaaaagttttataattacagttccgttgcgactctcatatgaactataaaaaactaacacctcatactctacccataaccaccaccattacaccatacaaaactaccaccattacaactattccactgaaaccccactgatgcaaccatcaccaccaacaccatatttaaatctaaaaaacacaaaaatattcatataaccatatttatacacgaaagtatacaaaaaatcaaaaatgaatttggaaaagtgaaaatgagaaaaagatctctatggacctgtgatctagaaatcaaatatatggaggacgactgagatctcgatttcccatatttgacttgtcctagtccagatctgatcgaacttaacccaaatctaaatgtatcttcgagatctgacagtgacctacaagaagaataagagaagatggtgagacaatctaagcgagaagatgaaaaaagaaaagaacaaacagagagagggagagaaaaacaagatgattggcggtaacgtctgggttgtagaggcgtgtttggtggggttccgttggtgatgacgtctaggttgcaaaggtcatcgcagaaagagagggaggcaaagagatgaaggttgtttttttagggaagaattgggttttttttaacttttatttattt

SEQ ID NO: 406812 - DNA, 576 bp, Cannabis indica
atggagacagagacacagagagagaaattgagagagggtgggaacaaggacgaagacgtccgcgggctggaactaagtgagaggaaatgacagctgaggtctcgagttttttataagctagatatttgatctggttaagggacgggggtgacgatgaaggtaaaggacaggggccggttggagtttttaggttatgctcgctgtgtgggagagggggacgatgaagtagggcatatatctgataatttattattatttttaattaaatgatataaggtgacgctcgacgcgtgtgagcaaaggtttttaccaacacgttatgcgcgtcgctaaagccacgtgctttacacgttgttttagcgacgcgcataacgtgttggtaaaaacctttgctcacacgcatggagcgtctctataggctttttttttaatttttacaaaattataaattttaggttttagtatttagtgacacttcatatttttcgtgacatacatttcgggtgataaacactaaatatttagagtcttattatgtgtgtcactaaaaaccactcctaactttttagtgaccca

SEQ ID NO: 406813 - DNA, 591 bp, Cannabis indica
atatatatagtgcttcttaattaggtgggacattatttttactctttcgaatttttttttttattattatatgatgttaccatccgtttttgataaacttttgaatattttacagttttaaaaataaaatttgaaaataatttttttacacgcgtgtatgtttggattatacactgtaaattatttaaaatttattaattaaaaacggaaaattattttatatactattttctttaacttttttttcaaatttacggtttgtaagttgctatacgatttttggttgcaatttaggttgctctgctagttgcaataggaatttctatatagaattctataaaaaatgtaaaacaaaaaaaaaaaaaactgtttgaagtgtaaaaaaaaacaacataaaaaacagacaatatatctattataactatataatgtatatcatcatataaaaaaaaaaagttaatataattttttcaatatacactatcaaaaattactacatttagtaataattttttagtcgcagtataattttattctttttgactaaatggacttttaattacaacaaaatattacttgtgactaaaatat

SEQ ID NO: 406814 - DNA, 550 bp, Cannabis indica
aattaagcaaaaaaaatatagatattatcctttttaggttcaaaatctactaatatctaaaattaattaataaaataataattaattttaaaatgataattagatttaaaatttgaaaaataaaaatctacttaaaaatttacacaaaaaattagaaagtaattccatgaaaaaattggatttggtgcggatggtatacattgcataccatccgcgcatgcaggaggagggagctgaccgaagtttcctgcactagcaccttgcatgcaggatttctacaggcggaggaggccttcagacagctcctgggcgagctactttggacaaaatcgtgtccgaacatgcgtgagccccgagtgacactcaggtgtccgcgcgtgtacatgggtgatccccattctgaattttttttttaattttcaaaaaatcataactaattcaaataaaatcgcaattcagttctataaaaaattaattgcttaatattttccataatatccaaataaaataattctagatcgtgaatctaattattttacttaaaaaattt

SEQ ID NO: 406815 - DNA, 782 bp, Cannabis indica
tggataagtgttatgtcctctctggggcattagtaaagtttactagtatcagatatatggagtattcattagactagatcgatattaaatttggtaaagatatcataaacttaatgttatatctttctaagtcaatatcaccaagtcgatcttagataaaaagatcttaatcctgatatgattaggttcgatctcaagagtgttatttgtgttcttaaagttgttcattaaagcttaccaactggttcgggctaatacttacagcttgggaatgcgatagtacaattgagtgggagagctaatcatagatacagaatctatagtttctatctagacatagatgtgaaatgatgattttcttcgagcttggcttaatagagataaatgaaagatatcttattttagtaattatattagtttacttatatatcatttataggaagctaggtgttttaaggataaaacacattgagggggagaacggtaaatttgtccctactcggtgtaaatcatctatagaagatctttgattatttggattataacaatagttacttataaatataattctactatatagtaaaattataaatatattatcttatttcatattattataaataatttatttattaaaaactaaatgcacaattttattaattattatttagaattatttattaagaagtttaaaatttattatatgtagtattttgttgtgaaaattatatacgcaagtatacgtagttaaccaagtaatacaatgataagtaagattgtct

SEQ ID NO: 406816 - DNA, 623 bp, Cannabis indica
tgataccctaaaaatctcaattttgaataaaaaaaaaaatttagagtcgggagaattatataagacgacagtaggtttcgagaagaggaagttttagatttaggtttaagaaattttagacttagcaattaaaaaaaaaaaacaaaattgaagagtattatcatttttattttgtaaaatataaaattaaaattattatttaataaaatataaggatgaatcaataactcttaccaaacataaactaccatagatagtatttatccataaataaatattagggtttttttcagttttaaccaaaaaaagtaacaatattacaaaaatactttcaactggccaaataaacaaatatacagcccaataaaaaaaattaacacaaataccacttacacacaccttcaactcaggatccatgcttcctgggcaactatcgtgcaaccatcgtgcaactatgcagcaacccaacgcaaccgaaataaaaattcaatgagaaagagaaccaacattaatttcggcgacttcacctgaaaagacgaccaaaattaatcaaaacaggggctgcttcgaattcataaaaaaatgtaaaaaaactactaagaaactaaaattcaactagaaat

SEQ ID NO: 406817 - DNA, 727 bp, Cannabis indica
gttgcttaattattttagcaacgattcccaaaaaaaagtgtttttaggactatcgctaatatccctttttgtaatagtggtttgtgtaaaaaaatatttcattggatgcttgtactcatccaaccaagtatgcagacagtagcgtacttggattccagacatggcgaagtagcggaagatttaaaattcatcattaccacgtaagttcgataatcaacatcacaatatataactgtgtttgatattttacatgctaactttattttttgtgtaggtcactcaacatgtataatacatgttatattatttattatataatataatgtttaagattaaaattgtaatatgttatatatattattacatataatataattgggaattacatgcatgtaataatcacaatattgtgtgattgggagttacatatagttgtaacatataagaggtggagttaatattttgtaacttccacatgatcactaattaaatgtgtaaagagtggttacacaacttaatttttgaaattcaaaaactataattcaaatatagttgttggggattgaattttatcatttataatgtgtataagtgatataaaataaagtgggaatggtttggaataggttggagtgttatttgcaaaagctgaaaaatttagtaactagtaactagttactattttttttcagcattaatagtagaacgttttttgctattgggatgg

SEQ ID NO: 406818 - DNA, 592 bp, Cannabis indica
caataggggaatctcaccgtgatctacaattgaccccgttgaagcagccgttagaacttgccagaagctattgccactaggggaaatgcataggatgaacataaacgctgaaaaacggtgaaaacaacgaaaaatgatggcaaggcacaatcgaggaaaatctagcatagtgatggttgctgaactgtttagaaggaagttgacccatttatttttcaaaatgaattattaattgttttaagttttaataattattttttataagaatatatgtatatattaatattatatatttgaaattaataaaatatttaaaaaaaataaaattttgataatatattttaaaaataaataagttttggtatatattttagaaaatgaagtagaaaaactaagtcatcttatattaatatatgcaacttcaatatctttaaatttgaaagaaagagatgatttcttttccgtaatgacatgtacaaaattacaagaaaagtccagtcataactgagctcttttctttttggttaattagtaatttttccccctgaacttggacatgtactaaattgtgccccctgaactattgagattg

SEQ ID NO: 406819 - DNA, 579 bp, Cannabis indica
tcgtgctggaacaggtctgcaatcaacctcacaccagcaactactgcaacattccgtgactggtttgattctattacccgtagcagtaccagcagcctctctgctgatgttctcatgattgcttggcagatatggagtgctaggaatgatgtgctatggaatggcaaggtcaaaactgctgctaatattgttcttgaagccaagtcttatcttaatcaatggttgtatgctcaaaagaatcgtttcgaaccgatccttgttcaaagtaaccaaggtttggatgttgagcgttggactaaacctggaattaattcgattaaggttaatgtggatggagctatatttgcaacaatcaattcgtttggtatcggtttcattacaagggactgtaatggacaaatcatagaagctggatccaaatgcaatatcggcaatgttgcacccgaactagctgaaatttgtggtatcaaggaagtcctaagttggataaagaacaaaaattggcatgatgtgattcttgaaactgattcttgctggctgtacaaggcattaatagcagttcacaaatgccatctgcct

SEQ ID NO: 406820 - DNA, 822 bp, Cannabis indica
ctagtaattcatcggaagaagtcgtatctaattccaaccaggttaaaggtgtcggtcagcatgttaaccaaaccaatcaatcactgagatagtcaggcgtatctgtattcaaaaggttgggaatgactcatgatctcagaaacgatctgaatagaatgagaggggcagacgatcagcttggcacacagatcgtgcagcccggaacctgtgctcaaattctcgctcagaaagatattaacgtgactcaaatcgttcaaaatgccaaacaggttagtgcagctgtgcaagcataactagatgaactaaaaaatatgttccaagacatggccagacagggaaacaatgatctcgagtcagaccgagcacgtggaacccctttctctctcgagattaatctcttggcgttgccccaaaagtttaaaatgccaacctggaagatgacactggaagagaagatcctctttaccacctaaagtatttgaagatgcaaatggatctgcagggggtacgaggagatgtatgttgcagaatttttcctaccaccctctcggaagccgcccaacaatggtatttcaagctagcccgtggaaagttcaactcatggaaagctttctcctcggaatttcatgcaaaattctcctcctttcatcaacttctgttgcatctaggagacctagtagaagtcaagcaaagaccaggtgagcctctccgagcatacatcagcagattcatgacggaagcgacgaaggtttcatgggtaactgaagatggaaatttgtccgcgatactggggggcattgaagtcctcagtgaactttggaa

SEQ ID NO: 406821 - DNA, 544 bp, Cannabis indica
ataaattttatttatattttatagccaatgtataaatatatatttattaaatattttattaatattattaatgttataatgttattattattctagattgtttattataataatagacttaggggtgtgtataaatcaatccaatcaaataacaaccgatcgatccaattacaaccgaccaccaaacattagatgtccaatcgtaatcggatcggattgaatgttattttttaatatccaattggatcggatcggatgttggatggggtgtccaaaaatctaatacatccaacatccaatcgaactaattaacattttcatttaatttggatgagtaatttgattttatgttgttatacgttaggaaatatatgtatatatgataattaatattaaaattttacatttttttttaaaaattggatggatccaatccaattcaataaatactggatctaaaatattagatggatccaatctgatccaaaaaatactaggtttaaaatattagataattctaaattaaaccaatagatatacatga

SEQ ID NO: 406822 - DNA, 604 bp, Cannabis indica
gatttatagatcattcaacattagatagtgtagttttttatttttttaaataaatttctcaatattttagatctattttttataactaaatatttttaaataattatgtataaattatgtaattataactcattattttatgtattgaataaacttattggagacaataatttgacgtatcaactataaataaaatacaataatgacatcgtgtgaaatagaacgatgacaataattttgaataatcgagtcagaaaaataatattaattatgggaaagaatacagttcacttaaataattcttagcaaataacaacaataataataatctaattttttctctatatcaccatacttatttatttttatattaataattaattttttaatagaacaatttaaaattctagatattatttattaatagtataaatattaagcatcttaataactaataatataacttttcgattatcctattaaaagaattttattttttaataaacaaattattaattttaatattattataaatatgatcaattttttaagttattatttattaattgataaatacttatttttatgattatactaaagcagg

SEQ ID NO: 406823 - DNA, 531 bp, Cannabis indica
taaaataatttccaacagcaagtattaaaggcagaagaagacaaaatagagtgctttcaatacagaatcaagatggggagagacttgtagaggaagcaaaaatttcaaaggcctttctgtcatattataaagggctactggcactaaagtggagaggagaagaacgtgataaaaagcttggtgcattcaggggctgttctgtcagattagcttgctagttggctttgtcaggactactcttgtgaagaaataaaggctgctgtctttgcaataccaggaatcaaagcaccaggtcctgatgggtattcaagctacttttttcaggataattgggagctcattcaaggagatgtatgtgctgtagttcagaatttcttgcactctggaaagatatatatattaaagtagatcaatttcactgtgcttactctcattccaaaagttaaatgcccaaatactgcaagtgatttcagacctattgcttgttgcaatgtcatttacaaaattacaactaagttgatctattcaaag

SEQ ID NO: 406824 - DNA, 577 bp, Cannabis indica
ctttaatttttattctctttttcaaaatttactatgattacttctttttttaatcattctactaattttacctctatcacacgaaaggaacacaaatcaatcatatttgaaattatgtcttaattttgtgagtgtatgagtataatttggatacaatactcataaaaagaagtatatttgaattagataaatttggagataaatttggttaatgtataaaaaaaaaggtattcttcaacttcttccaattattagggtaatagttacactacataataattacattgtattttaaaatataaggtgtgcttagatatcaaatagtaattacatgtgaatttttattgtcatgcttgacatgacagttggtaattacacaataaattaatattgtataatatttaatataataattattatcattttgtaataaatatttaaaataaataaaaaatatcttcataaaattgttgctataattttaaacactacgcaagtatacgcaatcaagtagtaaatctcacacaggtgaggtcgatcccacagggaattggattaagtaccactaaattatact

SEQ ID NO: 406825 - DNA, 808 bp, Cannabis indica
gatctcgatctgagtctgagtttagttctggatctaagtcctgggttctgatccttgtctgggttcgagttcgggacctggtgcaggtctatgtttgggtctaattcttggtctgtgtctgagtttttgttcgggttagggtttggtcctggtatgtgtttgtgtccaggttcttgtcctagtttagggcccggggagatttcatgtctaggtcttggtccgacttcatattccccggtccaggtcagaacctagaaaaggatgaagtcccaaatttagataaaggtctgggtttcggggcctaggtccttggtctaggtgcctgatccaagtccaattcctaggtcatagtctggttccaagttcgggttcaggtcgtgagtcttagttttagtccaggtcgcggtctgggttcaggtcgagggctcgatccctatctttgtttgggtttaggttcgggtccttgtcagggtctagatccttgtctgggttgcgagtgtgaggatctggtgagggtttaggacaaggtcaggtccatgtcccgattccggtcctagtccaggttcaagtcttaggtctcaggtcccagttttgttctgggtctgggtctgggtcaaggtttgggtcaaggtccgagtcttagttcgagtctgggtacgggtttttcggatctcggtctgggtccaggtctgagtcaaggttcaggttcatgtcttggttctgggtcccaagttcgtgtctgggtctacgtctgcgtttgggtctaggtcccgtgtttcaatccctgtctaggtttgggtcggtattt

SEQ ID NO: 406826 - DNA, 653 bp, Cannabis indica
taatcacatagaagtgaaacgatattcttcttaaagcttggctaaaacggtaaatttctccctactcgatgtaaattatctatagaggatcactaattatttagattgaaacaatcaatattcatagcgtatctatacttggtataaatcgttctatgtaatcaagagtgcaatttcgaatctataggggagtcaggaggaattaataagataaagagtttatagggtaaattctaaaactacttgttgtgagcttaattatatagactcatggtccccacgctacttgagataatattgtcttgtagactcaattaattgattttattaatcgattagaattctgaataagactatgacttatttatgagttttactaagcaaggacaattttaagaaaaagagattttagggtttgttctaagagatttttaaaagtcaaactaataaataaatcaaatgacaatttatttgataattaattataattattaaatatataaattatcattatataaaattatcatttatactgttagaatgaaaagacagataaagtctcataaaatgataaaatcaaaacctatgggcctacatgtaagtttcgatcatatggtttaaattagggataatttcacaaatgcacaaaaaca

SEQ ID NO: 406827 - DNA, 526 bp, Cannabis indica
aaaaaaaaaaaactatttttttttttaggggaagtgggtggtttgaaaagtagtgattttttaattggggtgttgtttgtaattgtatgaaatttttatgtataattagacatattaaatgttatttattattattattttaagattttgagttgcctttgttttaataaataaataaaattggagtgacgaggtgagtgagtgagtgagtgaggggagggagtgagtgagtgatgaggaagtagcttactaaactggcaagtcaaatgagttttgtctgtgtttatatttcttcacttgttttttaacagaaggacccaataagtagctgccacgtggaaggaaaatcacgtgaggagcggatggtgcatgtcatttgcttgggtaataataatgattattttaattaattaattaataaataatttacaacataaatatttaaatttaatttataatcacaaataaatatttaagtttaatttttagccgtaataatacttaattataatgctgcaattataat

SEQ ID NO: 406828 - DNA, 543 bp, Cannabis indica
aataataataataaaaataattaggtgtaaatattaaatatatatattttatgttatattagatgtaactatataacaaaaagtattagaaaaaaacacattacaatttaaatttaaattcattactttctttattttttataaagtgcatagctccaatcattgttgtatgcggagtaagattgaaggtgagtgttgttttataatgctagaaaaaactcagctcgcgttgaaacccctattgcaactagcgctgctaggggtgttcatccgatccaatccgcacttttttggtcaaacaacatccaattcgcactaagtgcggatttcattttttggatccaatccaatccgcacaatagctcaaatctaatccaatccaatccgcaaaagtgcggattggatcggttactttggattggttactttttaatattaaattatttaatatttatgaaaaaaatattttttttcacataactagcaacaaaaaaaaaacaaattatagttattttatgtctacaacaacacattaaataaata

SEQ ID NO: 406829 - DNA, 961 bp, Cannabis indica
gtatcacataattgtgtacatacagatatatataatgatgttgttctttctcaatatttgaatatgggtgaactaaaaaaaaaaacctaattgagccccgaggtaaaaaaaattagttagactatctctaacggtaacaccaatttaatataagatttttttttaacagtaacacttccaataattcacactaaatatacaactaaataaatatattttacttacaatatctagccttttatattatttatataaataacctaaaatggttaatttaaaatttaaattaacttgataaaataaaatatttatttaatcaattgaatattacacaattttttttaaaaaaaaaaaaataattaaaggatttaaattttataattaatcctaataaacacgaccattttcaaaatgagaatacgagaattatgcaaaaaagaactcaccaataatactaagattctcaaaatacttcaagtccatatcactaatattttaatatttttcaagactaaaattctcatacgatcaacttgactattaaattattaattgttcttttttttttttaatttctcgtttatgttgtttttttaagttttataacttagtgttattttgtttttattttattttatattagtatttttgttattgttattttatactttcaaatatgttagtattttgaaggaataattacataagataccattttttgtaaaatatttagatttttacgttcaaagaatgtttttttttttttttactatttttacgattttctaaaaattaacacgaaaacaacataaaatcaacaagaaaactacataaaagtaatatcaaaataatatcaaaataacatacagatacaaaaaatcaacaacaaattaacaagattacattataaaaagaacgtattttctgtaaataaaatcaaaaaaaatacataaaaaatatt

SEQ ID NO: 406830 - DNA, 693 bp, Cannabis indica
ccaacaactcgattcttatggtgatgtgctagaatgtataggaacattgctacaatctcctcgacagagacatttcttgtttttcttaaatttcccctagtgctaagtatgttacataacctttgaaatgtttctctatccattctcaattgtgaaacacaattgacatcacttgcatatactaaatcatgcaagttttctaactgtttgtagactctcattatggataatggttgattgaggcgtcttctagaatttatccatgcataagcactcacaatagtacatacagttaaaataacatctaaaatcacaattaaattttgcaccacaataattaacttttgctttcttactaaacttaaacgagctattttatttacaaaaaataaataataaaaaaaattatatgacaatattaacatatatacataaaacacacataaatatatatgtacaacatataaagtaatatataaattttcttaaaaaaaaaaataatgtgtgtaaacaagtaactaacaaatatgttaacaaaaaaaatttcaataacaaataggatatatataatgtataaaaaaagtaattgacaatatagcaatataatgtagtttttattcatgtactcataatgaataaataatgtatatatatattttttaaacagtaaattttatcaatttctctcaaaaa

SEQ ID NO: 406831 - DNA, 594 bp, Cannabis indica
aataataattagaaaaattatatcaatgtaataatttgaaaaaataataaagaaagaaaacgaaaagtttatacacagaaaattaaatttaaagagcgagttttttatttgattatagatcgatattaatggttaggaataattatataataataaaataaaaattagaaaaaaagaagaaaatacataaataaaatgaatatatagttctgaaggatttcgagaatgtcaaccccacatgtttgagagaggttatcaataataatagaatatgtatataaatagagttacaaataacaacacaaaagagacgtgttatagagtcaagcacacataaaaaatagttaagatgaacacataagaaatattcactaaaacagtataaaattgtaaaacataataaatatgtgctatatatatactctatgtgtatgtgtgtgtatatatatgtatatacttaattagaagattaagttaaaattattgagatcattgtcatgattaaaatagaagatgtaaacttgtgataatcaagcttataagagagagtggaatagagaagaagaaaaaaattagtacaaaaagtgaaatata

SEQ ID NO: 406832 - DNA, 550 bp, Cannabis indica
ccacatctattcctcaagctagtttttggttttctgtgtgaccttgggaaataatgacttctagtgaaaattatatgtatttaattatgtacatgtgtatcataacatgacagaaaggaacatatataataaggtaaatttaattaaatgggaagagaatctcatcaagtattaaaaaaaatggaaccaaaaccttctttgtctttcaatacgtactggttagaacatctccaacaggtgatgtaaaaattatgctatatttagcacaaaaaatagttttgtggtaaatttatactaaattttaactttgtgatctaatacataattacaaaattttgatgtaaaatttaagatctaattaatattttattaaaaaaataaaatctaataactttataatcaattttataattattttattatataagacaataaaaaaataatataaatatttcataatttaatgtggtagttaaatattctaataaaataataaaaatgatataaatataaatgaaaaaatagtacatttatggtgtaaattttacat

SEQ ID NO: 406833 - DNA, 585 bp, Cannabis indica
cccccctcttggaaacatatcctgggctaacaggcacatccaacaaacagggttcaggtgcatgggtaatattaatattgtcggaaggctttaagtttcactacgctctgaggttccaatttgacgcatcaaataacgaggctgaatatgaagccttgatcactagcttaaagatagcagaggccttgaaagtcaaaaatctcatttgtcatagtgattcgcagctgatcatgaaccaggtcctcggggaatgccaagccaaaggcttaaaaatggcaaagtatttagagaaagttcaaaagaacttggaaatattcgattactttaaaatcgaacaaattctaagagaacaaaactccaatgccaatgccttagcaaagctggcctcacagaatgacctggatgaactaaatctagttccggtggaaatgctgagcgagccaagtatatgtgaaactgaagacgttgagatgataaataactctccaatatggatgacgcttattatcaactatttacttgatgggcaacttccaaatgataaaaacaaggcgtaaaaactattgtatacaatgcctcgctaca

SEQ ID NO: 406834 - DNA, 1448 bp, Cannabis indica
ttaaaaaaataaaaatattaaaaaacagtagaaactctgacaaataaattatacttaatcaaatttataataaatacataaattcaattcaatcatgtactgtaatatttatatttatagtgttttaaaaagttgctaaaaagtttataatttggactttatactttattggatatgtatttagtatcaaaaatctacatgtaaattttaagaaaataaaatttttaaggtaatattagtacaacttataaaatggtgcgataaatggtgttggactaccattgtgttttagtgatgtccatataccataatcaattaaaaagcgaatacttttcccttgatctatattaatttatgtacacaaatttttggaccaatcacgtcaataaaacacaattcacccttaactcataattcatacatcaccttcccaccacattcaaaactaaattcataaattctctcatttattattttcaatcgatcctatttgactttaatgactataacgacttacccctcaggatgaagattcaacttcaatatcacgcaaaacaattccccaacgctgacttgactccgttttcattgatacattcttatcattctcttggaaaaacatataaggatctgtttggaaagttatttgagaattgaaattaaatataatttgagataattacataatttaatttgtttatttgaccacacaattatacagatctcaattattgtctccaattttcatactttcagtgtaactaaatataaaaaataattttaattatttaattaatataataatcatttaatataatttattattttattatattttctcatatatctaatattttttcatgtataatactattttataatatttttttgttttgtttgtaaaaaaaaattataaaaatcaatatacgaatatatcatatttgattttttttccttaattaatttatattttgaattctcttttaaattaaatatttaatagatataattgcgaattaatataaattttgattgattaaaggcttaaatttattttattatttaactaggcaactaagccgcgctttgcgcggtcttataaatttttatttttattaatattgtgattacaaaatattagtactaaaagaatggtatattatacaatatactattattattttctaaaaatcatgtattttttgaatgaaacaaattaacaataatgaagacattatacaatatacagatactgttatacaatatactgttattatatatatatattaaatttctatgttttaaatttattttgtcatcaatatataaatatttttcatgtatgtaggttaaaaattaagtttgtcagcttttaaagatataatatatagcaatatcttctcgctcctctttgtatccatttgctaaaaagtaagtttataaagata

SEQ ID NO: 406835 - DNA, 761 bp, Cannabis indica
ggtattagcaggggaccccaccgctaataataataaaaatatttattaactatccgccattaatgcttctataattaccccatctgaccctcttcccccatttttttccagtttttttcctctaaccctaattcccttcagcctcttccccatccgaccctcttccaccaccaccacgacacaccacgcgggaccacaacgacgtacctccaccaccaccgaataccggcacactatttcatgtaagtattttttttttttgttttatatttctgattttattttagttgaaaaattttaacgatataaattgtttttaggttttaaatttatatataatgtgtatttatatatatatttatttatataattaagtttgggtatatatataaatctgtgtataaatatatatatatagattattttagggtgtgtacagatttatttattatatatttttaccgtatatatttttgatttgtgtatatatgtatttttgatctgtgtatatatatatatatattttatctgtgtatatttttttatatgtataatatatctatagtgtagtatatgtgtattatagatatattgattatttaaatgtatatatataatatatatgctttttttatctatatatctttatatattaaaagtgcctatctaacggtatttcttggtttaacaaaatatacttaaaaataaaagaatattctgttaaatttaacgattaggtttgatctcccgttaacaaataa

SEQ ID NO: 406836 - DNA, 505 bp, Cannabis indica
ataacaataatttaggtatataaaattttctaagtttagtttatacaagtttataattttgaaaggtgaatttcttttgtgatgtcgggacatttatttagaacatttacacaactaattatatttgtaattaatttatttatgtatatttttatattaattaattttcaatttatttataaatcaattaataaatttagttaatattttttactttaattcatatgaatttacattacttttttcttatgtgctttttattgcttttgtaccattttttatggcttgtccctatttgtttagaatagttttgtggtatgctcaattgacaagagaagtgatttcttttgtgctcatgatttctacttcaacgaccttttcactttaaacatgttatttttggatggcctacaataacaggaaatttactcataactttaattttatatataattttttgattttgattttcaacaatttatatttaggtgttagtatgttgtta

SEQ ID NO: 406837 - DNA, 295 bp, Cannabis indica
agagcaatgataggggcttctggggtccctagatagtcattttcttttgtaaaaaaaatctttgtgcctctccccagatcataacccttccccaggcccaaaataatctcttcgtgaccttccacgattaaggagacttaatcagtaattatttggactattaccttctattttttaaccatgtgtgcttcatccagaaatatagataagaataatggtaataaatagttccattacattattagattttctctttttaacttttgtaatctattacaatgtaatacttattaca

SEQ ID NO: 406838 - DNA, 761 bp, Cannabis indica
taggcgccatcctcatcaatctggttaggaagtgaccagtcattgttcacccaaggtccttcaagccagggaccccaatattgggttttcccagggcttgcagtctgttcatgtgatgactcaatagatctctgagggcttaacggctctttccagggggatgattgattccctaacgaggattattttcttcggtgtcatccattacttttatatcaggaggctttttttgagctttttcacagaggctctcaatgaaagcaccaaaatattaacgcagatttgtgttaaccaaatttgggccttatagtatttatttcaaataaaggctttcaaaataaaagtatgaacatagggttttttatgtggttttgtagttaaaattcctcatagtccacgagtcaatcttattaagatttcggattatttttcagggcctctcttgtataagttttttcgtccccttttcttatctatcttgccaatatttataataatatagtgagcagttaattacaaagttgattgtaatctttacagcaattactccctcaaatcatgggatttaagttacaaatcatgctaagtaaatgcaatttttatttagaattcacacaactatgaatgtcctgctttattcggcagagatgagcgcacattaaagatatgcggtaagccttatctcatggggatgcctcgctgagtataccatgttatacacgctaagtattgttattatatctcctccacgcgacgaggtt

SEQ ID NO: 406839 - DNA, 661 bp, Cannabis indica
ctattttttcaacttggtgtcgagaagtcccgaatcactgagttcagttatatataaattcatataaccattatatcatgatatgtgaaattcatcaatacacttacattttgatcatcacatatcaatagatttatctagaaaatgaaatagaattgtacctgcaacacactgctttatcagacggactagtaaagaatcatttgtagagtgttataataaaaacaatataataataactaaaggggtgagaacgagataacatctgcacagaaaacagagagtatgtaatcaatcattgaaatttagattacaaaccgaagcatattcctgaaatattattatatatctcaaaaaactattttaacttttctcctaaatgtttgggagaagcatatttcttaagcaatattacattcatatcataatcatggcattgagatcaaacgacaaaccaaaccattactattcaacaaaaaaggaccctaaacgatattcatatcataatcatggcatagagattaataatgctacaacgaaatataaatagaccacacgattcatacctgtactgtgagtgaagtttcagacactctatgattaccaaccccaaaccctaaacgaaattcctctgagagaagggttatggtgtgatacgagt

SEQ ID NO: 406840 - DNA, 1110 bp, Cannabis indica
caattaattgagtctataagacagtattatctcaaataatgtaaggatcatgggcctatgtatctacactctcaataaatatatccaaaatttaccaagtaaattttcttgctaattattaattcctcctcacttcactatagattagaaatattgcactattgattacatagaatgctttatataccaaatataactacgctatgaattatccattatttcaatctaactaattaatgatcctctatagatggtctacatcgagtagagacaaatttactgttttatcctttgatatgttttatcattaaaacactcagctatatataaatgatatttcagtaaactattataattactgaaataagcgttcatctttatatgctttagccaagctctaaggaaactaccgtttcacttctaaatagttatagaagttatagattccaaatctataattaacgttcacactcaattgtattatcgaactcctaacatttaagttgttgggaatattttatcaagatctagatttactaacaagtatgttgattaacatcctaattatgaattctctaaaacaatgaaaataaacacataagggtttaagaaaaccttacattgattgcatcgaaatataatgactcattccgctcaagatctctagcctttgattcctttctgtagcagagcattattaagatctgaacctggatttctttctctccttcgagttttgttattaccaccgtcttacttactatgattgagtacttgacttgctatatgtgggcatggcactcattcactcaaggtgtttcgaatgtgaagaacaacgaaggaggtgaaatcactaaggaaggaactccctcatctaggttggttgaatagtcaagttgacactagttggatgagtgagagtatcatgtttcttttatagtatttcaactagggattatggctgaattatatgaattaaaaaaaaaatattgggaaaaattaacttctaggccgtacacttcaatgagcaaactttagttagatttttaccactttattttaaccacttattcttctttcaataatatcatattttccaattcaatctta

SEQ ID NO: 406841 - DNA, 796 bp, Cannabis indica
caattcattctaagtaggttgttaaatgtcttgattctttaaaagataattttagcttgtatgatctcctattgggttgtatgcatattttaagtaaacgggaatttgagaagtttattgctctttgttgacgcatttggcataggcgcaacatctttgttcatgatcataagctttcgtcagataatatggttagctcttgagctcttaactatctttggagatatcaagacgctcaaagtggtggttctttaaacactagtcaaccctctccttgtttagggtcgagacctatttctggcaccagttgacgttgggtaaggttgatctttttattgatgctcgccctcgtaatgaggattctaagatggggttggggtagtttctttggatcccaagtaaggtagtgtttttttactggtggttttcctttgggtggtacctttgagtcccacgttgcggaggcaatggtatttttcataaagaatgttacaactttctctgattgtcttcgcttggtctaggcgaacataatattcgttataatgaatttggtatattgcttaatgatataactcatgtttggaaatctttctttagtttatcctttttctattgtaatatgtctttaaatatcatttctcattctctagtaaagagggcttttattttagatgagtctcgtgtttggtggtcggagctccctatggatttagttgttatattttttgaactcctctttatattttgtggccttttaaattttgtgccttttaatagaatattttcattttct

SEQ ID NO: 406842 - DNA, 703 bp, Cannabis indica
aaatataaaaataaaaaaaataaaaaataatagtaaatggaataatgtcccttttttaaaatagagatcatgaattcaaatttggctcctttaagaatcttaaatatgagacattattttaagggcatccgtacacgtggtgcttggttgaaattcatgtgacactttttatcgtagtaggtgcatacaatacactttagaaggttttgacgaacattcgtgagcgaaattaaagttgtcataattacacccaaagagagaagtcacaactgatatctcctcctctcctttttaccataaaaaataatcattctaattttttttagtgataagatgaagtaaattttatttcaaaatcaattagcaatagaaagagtaactcattcatcttgttaatgcgggactaactcttaatattaaaataaaaaaaaaaattgacataaattaagaatatattacgaaattcaacaccattcttatataaatagaattttcttgtcgtttgcgttagttatttcactttggtatgtttgtttctttggaaaagagagaaagaaacacacatatttcttaattaaaattataaaacattcttccattgtctacataataattgcagaagatacaagcaagcaattgaagattcaagcactgctttcattggctttcattcataaaaaaagcaatcttagcacttagaagc

SEQ ID NO: 406843 - DNA, 670 bp, Cannabis indica
atcataaataaattatataaaaatctcgtaaaacataggccattttattcttcagctttttcattcataaaaaaaaaaaaattctaaaattatatatccactcttccatcatctattgtcatgtattttctccaaaagaaaaatatcatatatatgattggataaattaataatatatatatatatatattaatataaaagcagttcaaaggcagcaaaaatagtacacctcagtcctgggcgagcagttcaaaggcaattgttgtgaataaacaaaagcctaaaactgtaagtgtacttctcattataataataaataatcaatcttctttattatttatattaatttcttcaaaatatatatttttaatttctcatagtagaatcatcacttttttctctattgccagcaacgttttttttttaaaaaacttttaatatatgtggaaaaattataatcaaaatattgtgtatgtgtattatatatcacaagcatgtattgcatatgcctttctaagaacattttgaaaaaatatttacagtattgaaaaaaaagtttaaataatcagaattctaggcatgttagtttttaaatttttcgagcattgcgtgtaattaattatttaaggtgtataatgggctcgtttggaacgtcgtattaggtcgtatt

SEQ ID NO: 406844 - DNA, 288 bp, Cannabis indica
taaattaaaaaaaaaactaaaaaaacaaatacataataaataggtactagcccttgttaaacgaaaggtaatctcagattcaacatgttccatctgtcatcaggcttgggaatccataggacatgctttatttgggtgcaaatatgctagagcggtctggaggcactctaattttctgctggactggaataattcttcaacaatgcgtaaaggtgactatctggtacatttgtcttctatatactctaaggttgagatggaacaaatcctttgtatcatgtggtcaat

SEQ ID NO: 406845 - DNA, 1260 bp, Cannabis indica
ctatagatggtagtaaatctacatcctggtaaaacatattccaacaactgacctcagagccatagtaattatttactttcatgaaatataaacgatgtttgtgttgatttggatggtttcatgatggtttatgttgcttatttatgatagtttggaaatcgcaatatatgttgtaaaattatttttttttcattcttaaaatattttactggaaagtagacaaaaaaaaataataaatttaggcttttacagagcccaatttggatgttttatgagttagttatgattttttgaatttggatggaaatatctagttttggatgcacaggtgtgtgcgcacggggctaagcatcacttggacagcacgcacgttcagacaagagccgacctagaatttttggacgcagccctgtctgaatggctgctcacgcctagtttcctacacatctgaggctgcatgcagcctcgttcctcgcccagcctcctccatccacgcgcgcaggggtatgcattgcatacccctgtgcaccaattttaattttcatatttttttattcaaaaatcgtttttcattgaaacaaaagtcaaattttggtagaattttgtgtataatctaaattttcaattaaagatctaattatcagaataaaattaatttttattaatttttaattaattaaaattagttttagatattagtaggctttaaattttgaaattttgatttttcacaaaaatatccatatggttaattgaaattttagattattttattcattttaattataagatcacaaaacaacattttttttattattaaatttgaatgatcgtattttgatattaaaataattttttaaaaaaataatcttgtttaaattttcaaaatttgctaacaatatcgtattttttcaaatttactattttttgaaatatattttattagttaaaattataagatttgataaatgttagttttaacattttatcttattagatagttttttaattaaaattaatttttgcaaaaataaaatgaaattcgaaaagttggttagtttaggtttgaatagaaattttatggtttctaaccataaaatttttcaaacttattattttttttaataaaattggtaatttcctaacaataaaatatattatttttcaaattgtttattttgtaatatttaattttattataagattaataatataatactaggaatatctaaattttaaaaattcaagatattatattat

SEQ ID NO: 406846 - DNA, 542 bp, Cannabis indica
aaaaaatagtgcagtgcagtgcgacttatgcagtttggactatcgctaaataattaaactatcacaaatactacaaaattttagcaacacttgtacaaaaaataccataatgctgggaaataaaaatgaaaaaaaaaaaggtttcaagtttcaacaatacaataatttgtggacttaggttgggtcttcacatattggacctaaataaatataaaaattagtatttttataatatgcggtgcggtatgaaccgcatattaacgattcaaaaccgcaaaccgcactgcactgcgcggtttaggaaaaattcaaaccgcgaccgcaccgcaaagaatttcaaaccgcattttttttttttgcagtgtagtgcggtacgggcggtttgagcggtttgatgaacacccctactttatataatattttttaacttaaaaataaaaaaaatattatattcttatttatttaaagaatattgtttgaaactttttttgaaactagatgattgttacgtgccaagccacgtagtgttagttttatttaat

SEQ ID NO: 406847 - DNA, 585 bp, Cannabis indica
ggtgtaaataaaatttcccctttactatttctcccaacaaataaattgcaccttctatattttaccattttaccttcacctacctcatttatgccaagaaatctctagaaaaaaatattttattaattattttaattcacctattttagctataaatagggaagagatgagacctcttgagacacaacctctcaccccttgagggcagcccctttcattctctctttagtgtaatttttatagtagagaaactatagcaaaatttcttttcacttttcttctcatatttctttatgagaatgattaacataatggtctaatcttccttggaaggttagggatgattccatatgcaaaataggattattttgtatctttgattcacttgtaatattttactgagcaatgcaagttcttatttcacttttattttcttgttcttcatctatctatactattatatatgctattatttactaaatatatatagacttagtcatgctctttctatatatttttatttagtgattctagtaataatagtatttatattgttctatctttatgttcattcttatttacttt

SEQ ID NO: 406848 - DNA, 503 bp, Cannabis indica
acgaccccaaccacaaccacatcccgactgctaactccggccagccctaaccccactccagccctgaccccacgaccccaaccacaaccacatctgtatgtataatataaattcgtaccatcatcaacaatcagatctggaccaccacctggaccccaatcaagagcacgctcagtacaccaccaatactcttgaagagtctcacctttccaagtgaaaacagcagccgaatcacgagctatggcggtcgcagcttgatcctgagttgagaaaatgttgcaggagcaccatatcacctcagcaccgaatgcggttagggtttcgataagaacatcggtctgaatagtcatgtgaagagaaccgtgattctggctcccttaaatggctgagatggaccgaattcagtacggcatgagacgagacctggcatttcgacctcgagttcgatctcgagacgaccgaaatcggcctgagaaaggtccttgaccttgtattcacggccg

SEQ ID NO: 406849 - DNA, 676 bp, Cannabis indica
tttccttaattagaaaataatttccataaataaaatattctaatattacttccttaatgtggatgatttgatttaataaagattaatcattactaaatatatatatatattaaacattactaataattataaaaattaaatagaataatataatttttcctgtataattataataacaatataattattttatattaaataacttaatgattttcttgtataagaacgtattgattcacatctttttttggttggtgatttcataatagccaaagtgaaaggtccctacctctctcaaccatgttatggaaagaaatctaacaactaaaagaaaaaagtttctcctcacttaggatattataaatgctctctctttacatagattgtcttttatttctaaattaaaaagaaaaattatttttcaactagtatcttattatattagttatttttctagtaggcttaagcttcatgagttatctttcccttaaaaactcaatttagtgctagtagaggagagagtatgttatttatggagaacaatttgattaacatagtctcatcttagtcgtatattaatcgttctttaatgacggtctccataattaaatttgaatgagatattttgtaccatttaaaaaactatataataataagagatgatgaatgatggatg

SEQ ID NO: 406850 - DNA, 625 bp, Cannabis indica
ggagttcggttcaaccacttcgtcggtcctgctctcgctccttcgctccaagctgacgagccaatttgtcctcccatctcgacccaaccgcccggaccaaaagatacgcagcctgcgcttccacgaacgctatttatcaggttcaggacatcagcgctgccatgactgcggtgagtttctgttattgattcttcttcttttttcttgtgctttatctcaaggcgtttaatctttcatacttgttttcttttttaaattgccgcagagattggtcgcctctcaaagaccctgatagaccatgggtacgtcatgtccaaatttgggggtatggacgaggccatgaagagtatgagagacttggcggttgagaggaaagcattctgggaggaggcccaatagagggaagcacaggcggaggagaggcaccgggaggagctgaaggttcagggcgaggttgtagccaaagccaagcgtgagttgagagaagccaaggaagccgtggaggagctgaccgctaggctaaaatccatggaggagctgcaccaagcagacttgcagtcgacgaccaatttgaccgtggaggtgaaggagctgagggacttcaaagatcaagccttgaagaagg

SEQ ID NO: 406851 - DNA, 560 bp, Cannabis indica
gttattgtattatattgttttttttgttatgttaaaaattagatattgaaaaaagactaacagtcgctcgctacattgacgagatgaaataaaaattgagtagagtaaatagagagacacaaaatttatagtagttcacccttcatgttgcgatggtaatagagctatgtctattatgagtttttacttttcacgagtattacaagaaatttgactaagtctagaagctctgatttctagagaaaaaaactacagagagatgttatgatcttatgggtactttttggacgtgaaaaatgagctagatgagctctccttttataggaaatgagatcctattaaaataacaataaagtatggaaaaaaatatagaaaaataaacttatgctatttttgatcgttgattatgatctaacaatgaaattgactccagaggttggtctcaatttctaaaacatgagttgcgtcctcaagaattctgttatatagccacattttatatagggaaaaaaacagaaaaatacaaaaaaagaaaaaaaattacaaaaatactttgggcc

SEQ ID NO: 406852 - DNA, 553 bp, Cannabis indica
tatatatatacttatatatactaagaaaatgaggttgatgaaaaagaaatattttattagggcaactcccaaaaaggaaaaatacgcgtgctattattaaagcatttttattgggcaccaatgaggccaggatcttttataggtggtgttccacgatttgttagcgatatttcctcaaaattattttcttaagttaagttatataagacccgatacttaattacaccaatagcatgttatgtcaccgaggaggattctaggtagtcctaatagtgcattttagcaattctctataaaattatatgtactagctatttttataagctatcagtagtatttagcaccacctggaggtagagatttttttttaatggttagcgatatgctatagtaattattagaataaattatgtgggatcagaaattttttgaaaaatcaaaaagtatattgcaataaaccaaactaatttacaaattagcagcacctttaaaatccatcttccctactaacatcttttagtcaaatcaataaaattctacttttaacactttc

SEQ ID NO: 406853 - DNA, 753 bp, Cannabis indica
atgattcaaaaatagataagaatgttttttttacaagataaaaatgtatctagctatataataatatgtaagtacatacaaagtaatattattattattattattcattaatcaaatttaatgattgtaataattatatgagaaatgcaatattaattagttcgatccttacattttaaccaaatactttatttgatttatacacctgattttgctcaagtttttaatttcttacaattattatagtttatttgttaatttttcaaacttaaagtaattaataataaaattaaagaaatttaattaagaagtgcaatatgaaattttaaaaaataatattaattgttgtaaaatttatataatatgtttacaagtgtacaaatcgatagtaatcaaaattaattaaaatattaaatacatgaatattaaaacttaattttcgatttcaaatgtattcaggaatttaaaataaattaacaaagaatgaaaaaataacaaaaattaaagttagagaataatacagataaaaactaattatcaagatttcgatttcactctaatcactactagaaaaataatgaaattaagctgagtccttaatctgaaaacatgaacatgctcaaattaatgatgttatgctttgaatttaagagaaaactttcgggggttaagttgaaaaatactatttttattaatcaattaatcaaatttactttttaatgttatatttaattgaaacatacctctttttat

SEQ ID NO: 406854 - DNA, 594 bp, Cannabis indica
acaaaaacaataaaaaaaaattacaaaaatacggttttatagtaatttttaaacatttttatgtattttttattttattttatttacagaaaatacgattcttttatgttgtactcttgttaatttgttattgtatttttgttatttgcatgtttattttttgttgtttattttggtgtcattcagatgttattttcatattacttttatatagttttcttgttattttcgtgttgtttttatgaaaaaccgtaaaaataataatataaaaaaaatctgtaaacgtaaaaatataattattttataaaaaatagtgcctcatgtaataatccaaaaaaaaaaagaaaaaaaagtagagtacattaagaccacaattccattactatttttttaagatacattcctaaacttttagtaataaattttttagggataatttcataaatcaacaaaaacaacaaataaattacagaaaaaatgatcgtacataattttaaacatttttatggtttttaaaatttatttacaaaaatatgatcttttgatgtatttttatattgtacttttgttattttattgttgattttttttatt

SEQ ID NO: 406855 - DNA, 534 bp, Cannabis indica
ggcatgcaaagggaaacatgtctcgaggcattaattagttagagcattaattagccaaaaattgaagggatgcctggtcagactcacatcaaatcacgaacaaacgaacccaacacgtgtcacccattcaaagacacctcggataagtctacacgcagctttggaagtcccgtacaaacttgggggcaaatgttatcccaatttttgcactgtgatgtggcatcacatgctggtgacatgtggatttgattctccatacctgctcgaaggagacgtcccaaacaagacaccatgtatacctgtacggacaaggtcctcccagctgagcagtggataatccaagcagcatatcaatgcttagcaattcaagtatttgcatcatgaagcacaagagcaatccctacaaatctaggattgtgtcacagagatatggcaagctttccaaatcccacaatatgtggattctaaatatgtaatatgtatcctcaccaattatatacattgtaagcaaaaaggaaaccttccctcaagcat

SEQ ID NO: 406856 - DNA, 547 bp, Cannabis indica
aacgccgtatttaggcgtattgtattgtattgtattatattgaattgtattttatgcaatatttttatataaaattatatgtggtattaacttttatagacacctaaatatataatatttttagtataaattaaactttaacatagtattatataaaaatatgatatataatccaaattcaatataatacaatacaatacaatacgacctaatacggcgttccaaacgagcccttaattgtttaagtagtacaattttcatcttttgtttttttttctttataaaaatataaaccaatttaacctaaatatcttaagattttataaatattatgtttggtgtgattttataaaaaaagttgtatatttgtaccaacatacagcccacagttgtatttatatattacaactattaaatatcaaatcttaatccattatagagttgtgataattggataaatagtatgattttattttatcaaaggataattgcataaaatatatatatttttttttgtaaatttttatatttttacgttttaaaatat

SEQ ID NO: 406857 - DNA, 684 bp, Cannabis indica
gaatattctaaaaaattatttgagaaatgtgatatgtgatgaaaatggcttaatttcccttgtatgcatgtatgtgtgttatatggccctaggggtattttggtcattttgcatatttgaataactttcaacaaaaggaaattttaaaggaattgtaatatatttttctaattttcctatccctaaaatcgaaccccgcttttactctctcttcctcaattgtttcatcatcttgcacccttttcaattgaaattttgttgaagtgtaagaatggatttgggaaggtgttgaagcttgattttattggaagcttgaggtagctttctacaactttacttttaagtttttattgctggaatttaagttggtaaagtatgcttcttgctgttggagttcttgtatgcatgtatgtggaagattaaaatattatctttgcgcttagtgcttggttgtattgatgagttgtgattatattattggtaatttttttttttttgtaacaatatattgtatttagtatagtttaaggttatttgtgtttgaattctgttataggttctcattttagttgtgtagggcaagcttgagttatgttctattgaagatttaaacctaattcagctgttgttattgtttaattgtgtggttgagcaagtttgagttcaagaactcttagctcgctc

SEQ ID NO: 406858 - DNA, 566 bp, Cannabis indica
tcaagtatgtctattgctcaaaaacaatttatacaacctaatatcattctccaagcaaaagaatctaaatatttataaaactttacaaggtaacaaactattctttctcacttttggttgctttttttggccatatacatgtaattctttttttcactatatttttcacttttataattacaatctctacatttgtattgaaatgttaccaaaaaatattatttcttgtgagccatatttcgtaaacaagagctactatgacagcaactaagattgacttctttaccttgcttacttttgccctccttaaccaccttataattctttccgaggtagtagctgccattccccaattcagccatgatttcaccttttccaagcattctaaagagaaggaacactcaaaaaataagtgaggcacaatctcatcttcagtgttgcaaagtaagcattttgagttctcaagatccatgtactgcaacctgtctttgttttgattctattaagcatagaaagccataggatgaaactatgcttgggaatgtttaacctactccaaacaattg

SEQ ID NO: 406859 - DNA, 594 bp, Cannabis indica
actaattgttattttttttttttacatttaattattgtattttagttaattgtgataatgagactaacaatataaattgaattcaaaattcaaatcaactacgtaaaaaaatatagtagtttaaactttctatatcttttttttggagtagaaactttcgatatcttttaaacatgtatataaattatattttatatagattatatataataaacatatatatatatatatatataaatctcttattcaggttgattaggcgggttagtgttatttataatttctcaatataaaaattggacaggttatattttttgatttaaatttttcgtcgaattatctcaatttagtttgaacgaattattcgaattgagcgaattaataaaaaaaaaaattgtacaagcttttaaaagttttttttgagtttgttgatttcgtttttagccaacgataatgagtctttttgataagcgataaacgatatgtcgtaataagaatatgtaaataaagtaataataacaataagacacagaaattttattgaggttcagccccgagcagttcggtaatagcctaatcctcgttagttgtatt

SEQ ID NO: 406860 - DNA, 621 bp, Cannabis indica
atagatatgagcatttagaataaatgtagagtgctacatcaccgcctcatgtctctcctttatatatatagatagatagatagatagatagatatagattaatatatatagatttttttttaaaaggagacattttactaattttgtttctaaatttagagttattttgtatctcaatcttaaataatatacctttttatagaaattacaattttaattctataaaatgaaatgaaacctccataccaaattccccttaatatttaagaggaaattacattttatatcatttttatattgtcatcttttatttttatcttcttttttagagtctatcattttttacctttttttttttttttaaacattgtactaattttgtccttgtcacttcaagatacttttcatgtgattcttctatgtcagggtattttaggtacaataaagaagtatgtttcaattaaagataaaattataagtaaatttgattaaatatgattaataaaagtggtatttttcaacttatcccaacatttaatttctggctccaccagctgctcctatccctaccaatatttttcctaaacgatttccaaaccgaattttattccattgtataat

SEQ ID NO: 406861 - DNA, 571 bp, Cannabis indica
aacattagatatttaggtccgaaatttaaacctagatttaaatttgattttgttgagcttctttagttttgggttttcaatttattttaagtttttttttttttttttttgagttacatgggttttcaattttcatatgtgatttggttggttggtttgatttatttattttgtctttcacaaaatatattaaatttactttacttggttttttttttttgttcgccaaaatattgcatatgttatatatggaagattggggtaggattatttcacaaatacacaaaattaacaaaaaaaaaaatacaaaatgcaattttacgaaattttaaatatttttttgattttatttatagaaaatacgatctttttatgttgtactcttgttaatttattattaattttttgttattagtatgttattttttgttgttgttttgatgttatttaaatattatatttatgttacttttatgtaattttcttgttgtctttatgaaaaacatgtttaaaaaaaaaagttaaacgtaaaaatctaattttttttaataaaaaattgtgttatttaatt

SEQ ID NO: 406862 - DNA, 654 bp, Cannabis indica
ggtaatgtgttatacataatttttctaccttacatgtattaaagaggttgattagctcaggactttaaacaaatgatgcatcatgtaaagttttggtttttaaattttgtaaaccacaaaaataaaatgtgtttgtttactacttttgttttgtttttattttgaaaaaaaaaaatatagagtgttaggctgaaaatactataagagcttattagtaatttgtaaagggtatgaaagtttataaatatgtaattgtgtagctattgtgaaatatgaaataaaaaatagaactttggctcaattggagtttgacagactcaaagagtgcattttacgagatttgttttgtctcaaagaggactactatctaacaattgttagtgtcaaactccaattaaaatcaaaagttttaattttttcatttcatattttacaatagctacacaattacatatttatagactttcacatattttataaattactaataagtccttatagtattttcataatctaacataaagtgacatgcatctaagtttattattgtcgagagcgattccaagacagtagtcaattccatttccagggaggctcctagatgggaaattgacaactactcctatttttgtaatagagtcagatcttcttttg

SEQ ID NO: 406863 - DNA, 713 bp, Cannabis indica
tttcacgtgtgtaaaaaactagtgaaaacaatataattaaattccctgcaatgtgtctggtttggttggtagtactagtattccctgcaatgtgtctggtttggttggcatttcacgtattcttaattccacataaatatgatacatatatgtagtaagtttttatcaacttatcattgcctaatcggaatttttgctctatcaaattatactttttaaatttttttggttgttaaaaattatttttagattattgagattattagatttaagaatttatatattaaattatgctccatagactttaatatctaccaaatcatgtctatcgactttttacatgtactaaatcatgtatcttgaactttcatccatattagacatttttaactaaaattagacaaaaatctttaaatccaacaatctcaataattcagggagatttttaataactttaaaagtttagggagtatgatttgatacatgtgaaagttcggagtacaaaaattgtaactatcccaaataaaatgattggttgaaattataaaagtgtaaatatataaatatgtatatacatgtcattactctatttaatttaccagcccccattcaattaataaaatacttcatccacaaaatttaaagggaaaaaaatacaaaaatacaaaaatacaaaaaaattacaaaaatactatgggccggcccattaaaca

SEQ ID NO: 406864 - DNA, 854 bp, Cannabis indica
gcattaacaaatttcaacctttatttaaaaaaaaaaaatagcttttttaaggagattgtggtttaaaactcataccataaaaatttgcacataatatccacacaataacaataatagtaataataatctatataatttattacacatttacatagcatattattgacattaacaaatctcaaaccttttactttaaaaaaaaaaaaatcaaattattttttaagaaggttgtgatttaaactcataccataaaaattttcccataatctccacaaaacaacaacaacaataataatttatataatttattacacattcataccccctactcacacaaaaaggaaacaatatacaatttatgattttatttatttatttattatttaaaaaatgaaaaacaaaattacttcacatactattttttatttttttttttaaatttataatttaagttacttcggtgatttctatgtgggttaatatataattttttttttttttttttacaatttttacgttaaattctacatagcaacctaaatcgcaatcaaatttcacatagaaattacaagagtaacccaaatcataaaaaaaaatgttaaaagacaccagtagtgcctagcaacctcatacgtattaatattgctattgattcaactaagtttgagttttatatatttatgtaataacttttagagagaatcgttagctaattacaagatgacacatttacaaggtgctcaaccgtaaattttttaaaaaaaataaacaaaataatatatggaattaattaaaaaaaaaattaattaaataaagaacaaaaaaaaaataataatattttaaagggtgaaaaa

SEQ ID NO: 406865 - DNA, 624 bp, Cannabis indica
tttggttcgaaaaataatagaaagacacggactcaggaaaaatttcactaaaggcttgaatttcatcatctttaagtgtgagccatcactatctatttataggcaaccacctaggtttaggttaggatttattagacagtaaaataaatgaaaaaaaattaaatggtaaatacccttacaagtggccgaccatagtaagtaggtcccacctttgcaattttgctatttttaaacaatttttcttattttctcaaaaataccatttttccaattctaaccacttaaatgccaaaactatttatttaataattaaaattaattatcaaataaaatttctatttaatatatttattaattagacttaataaagtctattaattaataaattaaccctagaatctattttcttcacatttaagccattgcttagtgaaaattcataaattaggcatagtctaacattagaattataattgattaattaaaatcaattatcggagtcttacaagcagtatggtctcaactagtatgtggaccatgggcctatacaaccgagcttccaataagcagaattagaatttaccaaataaattccctgacttattaattccttattgcatccac

SEQ ID NO: 406866 - DNA, 784 bp, Cannabis indica
ctggtattatgagtatcatttatcagcaggtatattgtttgtttgacaattcaattatttgtagttagaattatatttgaatctacctcctccccttttttgtttatttattgttttgtttgtgtgtgtggtaatgtattgattggataattttgaaattgtaattataggctaaaaactttggaagtcttttgaattcatatagaagttttatatgcactctataatatgttgaattttgttgttcgttttttttttgttttttttttttatttatttaatgaaatttttcattattttggaaaaagataagaaaaatgaaaagagagagtagtcgcatgttgtaaactaatcaaaacttgtgttatagctgtttggaacttcaacgaaattagttttattttacttctcaattttatcgtttttgcatatcatgattttcgggaatctgattacattaatattattctttcagtgtctatgcatcaaccaagcagcccggtcaaaattctctgagggtgaaattcagacattcatgtctatagatgttgatcgaactatcaacttgtgtagtagtttccatgatttgtggaggtagcactccttgcttatctgcatatagttaattacttattattactttttttgcaaaacttacttttaattattagtatttatttgaagatgtttttttttttttccttttgaaattagttataccaagttgattttacagagattatttttagaattgcatgcacttcatatttgcctggaatttgct

SEQ ID NO: 406867 - DNA, 832 bp, Cannabis indica
aggatatctattatgtttcaaataatttttttgcaatacaaagcactcgaaattgagtaaacacttgaaaatacaaacacattgagaatttctcaaatttggtttatattgagaaagagcattgctatgggttgctatagcaactcaagagatacttaggtgttgcatggctacaatgagcattaattgtaattacatatattaatataaaaaaaaacttagatggttgatcatgtgtgagtatatgtgtgggaggaggaataggatagattcaaaatatgtataaaaaatagagtattccattttcaaagaaaaaataaagactgcacattaagtataataaagttattttttttaaactcccatcatatgatgtatatttgggcaccaataatatttaacatcttttaaaagtattactttgtgttaggacagttagttgtgtctgttaagttggttagtggttaacttcggttaactggttttcttgtcttttcttagttttggttaggacactgattaagtgccttagttcttgttgtatataaaagcttgtatcaagtgtgcttaatcaatgaagagttctttctctctttctttctttcttcctctttctctctgttcatcttttcttctctttctgttactttcctaatgctgcaatatctagaagattgaaccaatccaacactttgcgattaactatcgatatttcttaaaaatattatattaaattatatgagactcgatatttaattacactaataataatattacacctaaaaaaatgctaaacactaataacattttttaacatttctcatataatata

SEQ ID NO: 406868 - DNA, 568 bp, Cannabis indica
aaaccattttacaagccccgttccggagcgttgagttagctttcactatgttcttccaaaactaggaatcagagtccttgtacctacactggagaaaactttttcctctcaaatacttagcttccaagatcttgcaacatagagattggcatccaattaacagattccaaccccatttagccaaaaaggcttgattcatctctctagtatttcggaaacccaattccccccgaggcttaggaagaaacaacttgtcccacgctttaatgtggatcccttggtttcccttttcaagccccaccagaaatctctaaccatgccatcaattctggtcacaaaatgactagactgttgggttttgtgccctaaataaaactcatttcagtataatcatattgttttatgttgcatggttcacatgatttatttcatgattatatttaatatataaattctattaagtccagaacatatgtaaatatgtatatatttgttcatgattatagtgtcgtcaacacagtggaatataatcatgattatatgttcaaaagtttaattctcatgattt

SEQ ID NO: 406869 - DNA, 529 bp, Cannabis indica
gctgactcatggctaccctaatttacccttgctcttaccaacaccacaaaacactcgtaagtcaaaaaagatacaattaatcacatatgcataacaatctaaaatacacatttatttgtcttataagacaagctaaaacagttacttcataaagtaatctgtagaaaatttagctatgatacataggaattaacttttgtaattctagcttcaagattacacttaaacaaataaaagttaaattaaaataaacaaattaagaacaaaaatcagcaaacacatattaaaccagaaagataacacagatgaatctagatagctttcaaacacaacaacacacgagaattatactagttctgatcctaagttcaatgtgaacttggtcatactccaatttaaaagtattgccaccaatctttattaataatgagaattagagatatcaatctcagaagctacaagaaaataatcacagtaagtcatccatggtgtaatccctcaacactcattaactcactaacccgagcca

SEQ ID NO: 406870 - DNA, 755 bp, Cannabis indica
tttgggtgtttgaaatttatggccgaaggtggctattggacaatattgtccaatatggataaaatgtaagaatattaagccatatataagaatatgggctactccactcattgctaattggttttgaaatagaactgggggtgaaaatcagtcggttatggtcggtttttacaattttataaccgaccgtttagaaattataaccatataaaaccgaccgtgcggtttttggcggttttcggtttggcgattttaggcggttttgacgattttttggttaaactatttttttttattttaaaaactgaaaccgaccaccatgtcaaacgattctaatcttacaatacataccaagaactcttcaaacctacttatcatatgaacagcttaagaagactcgtgatgccattactactcctttatggattagaggaggcttcaatttgtttctctacaatctacattaatgccacttatgtaagtatacttacaaaatttaaattcatttgtgtatatataacagttattcatttaactattaataatatatatatatatttgtggggatatgattttgtcctatgatgtactttcacggaatgtattccgcggtacattaaatgggtctcagggtacattaaatgagggtcatggtacgtttctactttttaatcctaactacccctagatcaatcttagccgtcagattaaataactcccttatctgacggctgtcgtgttggaaattattttac

SEQ ID NO: 406871 - DNA, 541 bp, Cannabis indica
atgtgaaattccgtaaaaatgtaaaaaaattattattttaaagtgtaaaaattaaaaaaccccaataaaatatcaccattgatagttttgtttaggctcaattagtattggacttattcaatcaataataattatttaatgaaagattaaattcttttcttttgggccttgtgtgagagataggggccaatagtagtgggtatgacatacggaacctagccctgtctcacatgaacaactctaattatgaaggcccatttaccttatttaaataattatattaggctaattagactagtttaacctatttaaaattgaattagcaatataattaattttgaaataaatgaaattaatttttcattagattattttaaaattaatttagaaaaatacacttagtttaaagaaaaaattatagatagtgattttcagtaactaatttatattttctaatatttatttaagtagaaaaatatgtttaagttaaaaattaatctgttaattaattttagagtaacttaattaagatatttttctt

SEQ ID NO: 406872 - DNA, 835 bp, Cannabis indica
taggaaataagatgattttacccctctaaactatatgctaagtagcttaatcattacaccaaaattaatattatgcttataagtatcatctttatttaaaaatatctattgtaactaactaaaatacatatgtatttttttttccaattttttttaggggggttactgccccaccttgcttatatgtgggtctgtccgtgatttcaccctgaatcatttcatcaggcttcaaataaaactttcatcctgaaaatataaaacaactcgtaggaaacttaaacttattactgttgtaaacaactcatgatataaaaaaactgaaaataaaccataaaattataataaacataaaaaactcaatgtttttttttaaaaaataaactgacagtaaatttaattttttgaactaatttttttataaaactaaatttaattattaacactaataaactaatttttacattattacgacaataaattaagaaaaaaaaaactaccaaaattactaccacagtaaactaacaaataaactaccagaatcactactataataaaccacaataataaactaatataaaaaactaccaaaattaaagaggcattaataaattattatattaccaccaaaataaactataagtctataaccagggccgtgtcggaatattttaccagaatctagatttactacaatgtatgtttttaacatcctaatatgaatttataaaacaacgtaatttaaacacataaaagttatgagaaaccttatagtgggtgcagcggagttaaatgactatttccactcagatctctatgctggaaattattttaccag

SEQ ID NO: 406873 - DNA, 660 bp, Cannabis indica
tgcacaagcagcgtaccgtttagacgcgcaccgggtcagctgggcgacgtactcaccggtcatctcggtggcgaaaggggccaaggtgggcccgaggaaacagttgaaccagtccgtcagggggtctaggttcagatcccacggattccggtagttctcctcgttaagaaagttttgcacttcctctcgcaaaaccctcctcaaggcctccacctcagcgtgccccgggtgtattcgtcaagggcataactatacttggcaatccgaagctcttggctcgcctcatctccgggaatcggagtcagcacaatgccatgaggcactgtaaactcctttgcctcgggagggaacctggaattatgactcggggccagagtgtccaccctttgcggctgtctagaagactcctctgctaccatcttgcctttgcgcttgcgcaccagagcaacctcttgctcttcttcactttcttcaacttccccaggaagagcccattgctcttcttgaccttcttcagcttcctcaagaagtacctcctcctcatccactaagtcaatagtgttcggaggggcactggaagaagccttcccgggggtgaccatctgggaagaagtagggggaagggaagcattaggactgtgggctccagcaagggtggcc

SEQ ID NO: 406874 - DNA, 688 bp, Cannabis indica
ttattttattagtattaaactatcttataaagtcaaacacgcagcgtccctataaattatggtgttacaagtaccatatacattacaaactcaataacaatggcaatacaagcgccatgtccattacataatattataagttgacattacatagagattaccactactttaccaaataaagtacaaaaagaaatacacaaataatcatcaaaaaaaaatttccaatttctcaatacccatatgtgaccacaattacaaccatgaacctttctcaaatcttgatttactttcaaatgtttatttgcttcatacaacatcaattgattttcaagtttgcttatcttcctcaagagacctggaattatttctctacaccttccacaagattcaacatccatccattcaaaaaacttacatcctccaccagtctggataacttttgaaaaataattgacgtgttttcttataatggacagaaattaaaaaaaaaaaacttaaatccaggaggaaaaatgtaatccttacacttaaaaatctacacctcttgaagcgacgacctgggtttgcctctgtgtttgatgttcttacaatccacgggataccatagtagcaattttaaggttccctttcatggattgaaccaccagctactctcaaccttctattattgataccaaaactactgtaa

SEQ ID NO: 406875 - DNA, 651 bp, Cannabis indica
taataaaaaatgacttccatgtcatcaaggtataaggttaaaataaaaatatttaatttaaattttaattaatagctataaatatcaaccattagatttgatccaatgactaataatagaatatccattcatgggtaatacccattaagagcatgcccatacaaatatatatacatttaatagttatattaaaatttaaataagtattatttttttatgacctgctataatagattattaaccgataataatattattttcagacttaaattaattatatatttaaaataaattaattttaattaaaacatttaataagatatttttttacaaccaacgtttataaatatttttttatttataagaaaataaacaaaatcagtgctatatcaggttacatttaatttattaattattttgtttaatttttaagtttatcataattatttaactatgatccaacgattaaaaataaaagtaactatcgtggttatatatttgatgtttacttcaaaaaatcttactttagttacaacaaaacttgtgactaaaagtgaaaaaattgttaataattataaattattattcatatgttaaaaggttcgtgactaaaggtattcgtcacaaaaatacaatttgttgtgactaaat

SEQ ID NO: 406876 - DNA, 600 bp, Cannabis indica
tttgaagataactctattctattaattgtttttaggaattttaaatcttgttatcaatcttttccgatgtatatttacttttattgtattttattttactagacgtacactataaataaaaataagattatttcattaaaagaatttccttctttatattagattgaccaacatatttttaattactcatccataaagttttttggtcattttattacaaaaaaataatattataactacttgacagattgtttggtggatttgtttttttgccaaagcgtgttggctgctggggttaatttgacggcaattggttcttttgccaattggtttgctactacggttctacagcacgcagatggggagaaaatgaggttgatcgcaatgacattattgggcaatttggaaacatcgaaatgagctagtatggtctgataagtcccctactgttgcgagtgttgctcacttagctcatgaagctttactcgcaaattggactcgggctcaagattcaacatttaatcctacggctgcattctttactgatgtcgatggtgctgaaacttgggccaaacagctgaaaacaccttgaagattaat

SEQ ID NO: 406877 - DNA, 650 bp, Cannabis indica
cttttaaaaaaacttaaaaatttacttaaaccccaaaaaccccgttaaacccgtttccctacttaatttaattaaattaaaaactaaaactaacgtaaacgtaactactaagtacggaccgaactagttccgttccctacttaatttagtaagtaacgtacggtaagtttaatttactttcccttacctagttagtttaacttaaactaaactaactttaacttttaacttaattaaactaaaactaagttacgttttaacttttagttgggtcggaactaagttacgtttaaacgttaaaggaaagtaaaaacccttaaaaaaccccctttaaaacctttagttttagtttttacttacggtaccggttccctttaccgttaaagtaaaattttaaacttttcctacaaagtagaaaagttaaaaaagttaaagagtcgaccaactaaaattaaaattagtaggaaaaagtaaaaattacgaaaacaaaaaaagtaaaggtttacgtttacttaaaatttaaaatttttaaactttttaggttacgtaaactaaaaaataaaaaaaaaactgcatatgggttaactgaatcccatatttactttatgatccttgaatttgtgttgcggcatgcctttagtcaaggatct

SEQ ID NO: 406878 - DNA, 618 bp, Cannabis indica
caaaaatggagatttttttctcttctacccaaattactctaaaatatatatacacacatgatatcttttaagattcgtttggtatctcgtataagggtggtattatattaaataatgaataacactatatttagataaagcagtgtattatatcaattatttacgaccaacttgtttaatacaatgtatgttgtattatttaatacataataaatggttcgtattaacttgtattataatatttacaaaagatttggggtcaacaccaatctccgacccggaccccaggactcagactcggagccgagacccggacctaggacccggacccgaacctaaatcgagacccggacccagatcggaacccggacctgggactcaaacctagaccgggacctagaccggacccggacttggatccggacctggaaccggactcgagacccgagacccggactcggatcgggactcggacccagacgcagatccaggacccggacctggacccggacccgggacccggacctggacccggactcgggacccggacctggacccggacccatagttggtggtgggatctagtgtattaaaaatacattataactttacacaatc

SEQ ID NO: 406879 - DNA, 760 bp, Cannabis indica
taacaactttcccttttccaaacaaaggaggggacgaccgagcatgtgagatgggctcccttatgcgaattgcatgttcaacaggcccgggcagggatggaagcttcttcctcctcttgattggagtcacctgctcctcctcagcctcatcttcaggattcaagggctcctgagcatactgcttttcccttgcacctcccttcaacttagcttcgtgcttaagttgaatgagttcatcctcctgatgagctcattcagcccgtccagcatcaaatttcctcttcctaccctttactggtttgggaatgaagtcccttggatagagcacgtacttcacaaatttatcctcggaggttaaccgaatgatattccggtcttcccccggcagtcgagcaagcctttgagctctatctcagagagcaagagtgaggggagggcggtgagtgcgagtgatgcccgtgccatccaccatgaagtactcatcagcaaaacacccaatcttgcggatggccgaatcatcggtgcccgtcaaccacttgaagtctggttgagagaaatagaataccccgacctaccttgcttaggggtggacttaaaatcaacaaaccagatgacttcgtgaggagaaggcataccccacttcttggaggcgtaaaggacgaagagggcaaacaaatatttaatgcccttaggagtgaactgggccgagctaaggccgaataagtctgccacattcttaaaatattgatgcaaaggcatc

SEQ ID NO: 406880 - DNA, 519 bp, Cannabis indica
gttaggtgggccctagatacaagcttagctcgcctatgctttgagccggaccttcaagtatttatagaatttttagaattataacttaagtattattactgttaaaaattaaatctaggtattattcacaaccgcgagttaaatttaagagaaaattacatgatatacccattttactttatttgtttttatttttacctccatttttatattttttaagatatacccacttttaaagatgatatcctcattaaactccttaagtaaattatatacaagacttaagtagggagtgagagtatattgggcaactcactcaaaaaaaaaagtgaatatatttttaaaaaaaatataatatgagaatatttttgattaatggaacaaattaaaaagagatatttttaatttatccgtaaatttaagtattcatagtacaaattaatctaattaataaattaattaaattacctgaagatggctcttaaactggtcgtttgtgaggttttccactttcatttg

SEQ ID NO: 406881 - DNA, 752 bp, Cannabis indica
agcgattggataacactttttcaagagaatttctttgtcggcacgagaaagaagttttagcatcccaactatcaattcttgctattaccttggcttcaaaaatcttagtacaacatttttatttctcccaataatgtttggaagtctgagatagaggcttccttcagaggcttcagacatatggagaatatcacaaatctggacacgagttgcaggacacatattaggactgaagaacacaatagacttagaaaagttcaccttttgtccagatgcagtttcaaattgattgagcaagtttgagacactgccggcagcactagtagttgattgacaaaacagatagctatcgtctgcaaagaacatatgagtgataggtggtgcctcatgagccaccttgcatccttgtaaaagtcgttgagattcaaacttcttgataagtgaagaaagaccttcaatacagatgatgaaaagctatgttgaaagagggtcaccctgccgaatacctctcgaaggaatgattggacccatattgtggcttccatgaataacaatataactgaccgaattgacacatgccataattagattaatccatctctcagcgaaaacctatacgagccataacgagcctaagataatcccactccacacggtcacaggccttgctcatatctagcttgagagccatataaaaccttttttgcctttagtcttcctcttaaggataatgcatcacttcaaacgccacc

SEQ ID NO: 406882 - DNA, 687 bp, Cannabis indica
ccaccgatatggagtgatatgaagagcttgaagtccatgtcagtatcaatatatatttgtattttattattaaattgtatttttatgtctttgctttcctttcgaagctcactgacaaattcttgcacagttctcttactgccaattgcttatccgggaaaattccaaaagagtggggagattttccaaatcttaactacttgtaggtttgattaatttcacatcttacttttataaacaaatacaattttttttgtgaaaaggtctgctattatataaattaacaagagtcatttacaaggggatgtcctcataccacatacaatcattatctagcgctaatgcatgtttagccaagccatgagcagcttggtttgcatcccgtcgaacatgagatacacaaacattagggaaaaaagataattgattcttaacatctgaaataagatttttaaatcctaaatttctagatgataaaccatttagagcagtaaccaacatcagtgaatcagattcaaccaaatccacttggagatttaaattttgagcccatttaagactatggtataaagccttagcctccatttcatgtgctttaagattaccagctgctggtttggaaagggcagcttgcacatggccatttgagtcccttataattgctccaaatccaagtttattgcacac

SEQ ID NO: 406883 - DNA, 578 bp, Cannabis indica
ttggtacaatgtttaaaaaaagaggtaaaaaatgaatagatttttaaaaaagagggtaaaaataaataggacaatataaaaaggatatagagtgtaatttcccctatataaagaagttgatgaatactcttttccttttattacattaatctaatttactttcaaataaaattttatttaaatatattttcttatgagtattgtacctaaattatcctcacatactcaaatataataaatatgtattatttgtagataaatgtgtaggtttgtgggaaaattacagtaaaattttgattagagaagaataaaaattatcatgaaatgatatgggtaaaattggtagaatgattaagaaagagataaacataataaatattgaaaaaaaggataaaaactaaagacatcaaattaaaagagaaatgtattgtaatttcctcataaacatatgtgtggaaattgaaatctatttgctcatatatttttctcttttattttttattttattgtcactaactctgtaatatccagattaaaatagtatttaatttttttttctctccttgggatattaattg

SEQ ID NO: 406884 - DNA, 560 bp, Cannabis indica
tatataataatatactccataatcacgatatatcataaaatttacgattttacccttctctggtcaaaattacagaaatgcccctggctcactaacggggtcctaacatgttatttcttaatttaattcacatacaagaaattatataataataataataatataatttcatataaatacacatttaactagttagggtttgctaatctgtttctctaaatcttaggatattacaattatcccctccttatagaaatttcgtctcgaaatttacctaaacaactacagataattctgctacatatccgtctcaagttccccggttgcctcttccactttactgttcctccataatacctttatcagtgtaattagcttgtttctcaagacgttttctctactatcaagtatttacaccggttgttcctcgtatgatagatctggttgaagttccaatgcttcataactcagaatatgggacgggtctgagacatacttccaaagcatcgaaacatgaaacacatcatgtacaacttccagcgctgggggcatagccaacc

SEQ ID NO: 406885 - DNA, 366 bp, Cannabis indica
gagcgtaggtacgagttcacctggttaggtgatgcctttttcctggaacgtactgggcataagtacgggcgtcactgatatatgatgagtactgagcataggtacgagctcgcctgattaggtgatgtaattttcctagcgacgtatcaagtgtaggtacgggcgtcagtgacatatgatatgcaccgggcataggtatgggctcgtctgattagacgatgcgatatattagtgccagattgttgcacgggctcacctaattaggtgatgcgattatatgatatatgggtgcaggtttttggcacaagctcacctgattaggtggtgcagttatgcgatatatgggtgccaagctatggcacgggc

SEQ ID NO: 406886 - DNA, 517 bp, Cannabis indica
tcatatttatatttaaaaaattttaaatataccgccgcaaagtgcgagttgtttactagtttaaaatataaaataaaaaataataaaattaaaaatatggttaaaaatatttataatattttatatttaaatttctttatataaaatatttacataatttttcattttattttaatctaaagttaaaccaataaatttaaataagattaaaaatatcaataatattttaggtattttaaattaaaataaaaatttatttatataaaatatctatataattttattttaaatatatataataatattataaaattaataaagaatagtctgttaagtaataagatattctgttaaaattaacataaaaaccaaaaaaatattgtcaaactaaaaattctcttgaataaatatagaataaagtctaattagaatttttgtccctgaactttgacatgtaccaaatcacgcccctgaacttttaaagttgttaaaaatatcccatgaactattgagattg

SEQ ID NO: 406887 - DNA, 575 bp, Cannabis indica
ttttttagttcttttttttttcttttttttttcttcttcaccttttgaactgtagaatcgggccgacccgatttcttttccccaagatgaaaactccaaaccgaggcttggtacaagtagaatgatagttgagagagtttggtcattaaaaacttattttttatatagtttatttactgtttaacatgctagtaatatgactaaacaagatataaaaaatttgatttagttatttagacagaaggaaaatatcatctaaagataaacctactgttaatgttgtgaacagtagtgttctcttgagctttagttgtattggtgatgtaatattgttgtttgatttaatgagaattcatctactttcacacacaaaaaaaaatgtctttattatcagagtaaatattattttggaccctgtattttataaaatttactaattagattatttgtattgttaaataacaaaatgaaccatgtattttccaaactggtaaaaatagtatcatgagtttaatttttaacattttttttttaataaaaccaacttgagacaattcataatagaacaaatacag

SEQ ID NO: 406888 - DNA, 800 bp, Cannabis indica
gagaggactcaagcttgaggcactaaccaatgggcctccacctaatcttgaacgacctacaaaacaacgagagaaccaacgagagtcctcacaaagtccttctaaatgttctcatgatacaagacatgagaacttatgagggggaagggacctctactcaaactaaaataggtagtaggagacactacttcgaaaccaaaggctacgagatcaggcaggtaaggaccgatgaaccgcctcatattcatactcgaaagtactttcgagatgaaatgggtaaattgtgttgttactttgcacgtgaccccgatggccaatagtacaagtacttccctcgagtacatagggaggaattgaatctgagctcataatctgtgtttgagattaataattggtatctagagccaaattattgattttagagctccatttctttttaaaaaaaaaccccattttataaatcagaaatttattattttttttgcttttttgaattaatatggttaatgttgtgtaagtatgagatttactttttcaaatgggtttatatatttttggatggttatttttcattgttgtggaggtgttcattaatggtgaaacccattttcagatttgtattttatgggtaatgtttattttgtgaaaatggatgaaatatatgttagaaattgatagaggattgaaaatggaacaaaacccctcaaacgacatcggttttggtggccggagatggtatatacgaccacgtcgcaccaatctgggttgtagacccgcaaactcatgtgtgcgattttcgg

SEQ ID NO: 406889 - DNA, 644 bp, Cannabis indica
agagtgttctcaaacgcactatgataattgtcgacgcagaaaaacttctagctattatccgtgtttctggacgagagacacgtggcctgaaaagagatgtacggttttaaatagtcactagtcaagtctccctgattggactaggtcacggagaacctatgctgatccacgaacagatcaagaccaaaggatatacggagatttaccctgccttataatgccatccgggatgcgaaaggcttactatcccttcgagatttggagatgatcaagttagtgtgcccaaacgatacctgaaaggttacttgaagggcctgtaacgaacactgaccacctaaaagaaacacagacgcctaccttgaagaagaacccagatcgcccaacgacggttatgctctaacacatgatcagatcttatcccctgtgtcagaccatggtagtgcacactgatgggttttgtgccctaatcagatttactgattaataaagatcagaaactacattttatgttgcatagtttacatgattatatttaatgtataaattctattaagttcagaacatatgtatttgttcgtgattatagtgccgtcagcacagtggaatataattatgattatatgttcaaaagtttaattccctga

SEQ ID NO: 406890 - DNA, 633 bp, Cannabis indica
atgagcaagccacattcaaggtcgttcgtcctatacgtgctctagatgcaacggaagaatgcttagcaatttgagatatggatccaaacatggttgaggagtcataattcaaaaatagtaagaatgtgataaaacgattccccttaaaaaaattgccaaggatcacgagccatgagaaagcaaagacaaagcatcatttgatcctaataatccacccaaaaagaagagaaagaaaaagaagcttagtagaaaaatttggtctcaaatgtttgaagttgggcaacaagtgattttttgtaactctttaacgaaggatactcatggacgactagattcaatgtgtgatatatctttcttggtggtaagagtatatctcgatgggctggtggaactacgtgatgcacttttaagaagaaagttcttggtgaaaggccaaggagtaaagtttgggggtggtgaggtcaaccgagcaaatacctccatcactttgaaagaagcttgaagaaggacttcaggttgtcttggccttattgtatcacatttgggcaacccgagagcagaagaacaagattatatttagttatatatatattatataataaattttggagtgtgccaccccttgaaaaaaaa

SEQ ID NO: 406891 - DNA, 801 bp, Cannabis indica
gaacaattaaaacaacagtagaacaacttcaaaacaaccgtggaacaaccgtaagaacttaacacaatacacagtccaaaatttacagttttacacagtatttttaaaaataattccaactcacagtaaaaaaaataaaaaagttaaaaatttaagtatatggtgtaaaaactccaattaaaaatgacaaaaaaataataatatatatcattgtaattttgtcataaaaaagctaattatttcatataattacaaaaaaaacaaaaatctttatttttttttacgtattcatgtttttcacagtactaatattcctcctaatattgcgactcacatatatataacctattcctaattaatatctaattatatatttgcttttccaaatccctaattatctctattcctaaataatcggtaatcccaaccaaattaacaattaataataacaatgggtcaatatatttatatatatcttttttatcaacatttaaaatatatatatcagagtcaggatgatctaatctgacggattaggtaattggtaacttcatttttgagaaatggaagggttaggtaattggggattcatggagaatagaggagaggttagtaataagccttttcaacatttaaaaacgtatagtgatattttgtgacgaagtttgagaatttcgtaacctttttcatcattgatgagatgatgagatgaaaaaagggttacgaaattctgaaacttggtgacaaaaattaattggagacctctacaacccgacttccgaaatcaagctcaaagtcaag

SEQ ID NO: 406892 - DNA, 536 bp, Cannabis indica
acttaattacgatttgatcaccttatcattatttcttatatatttcattatgtcacttagtatttattattttaatttatataaaacctatatattttaaaatacactaataacaatattcaacttttatcagatagtaaaaacaaaatattacatgcatgtatatatattttatatatatatatatattatatactaggtgaggctagcatgtgcaatgtacatgctcttcttgttccattttatttatatttttttaggttaagttttatttcataaaaaaattcttaattaaagtgtatattacaaataatcattaaaaatagtacggggtgcaccataaaagcttcttaattctactataaaattttcaaccaataatcatttcaaatataataaaaagaaaaacttagagaaaatatgtagtacaacaataaaaagaaaaacttatctatttcaacatcaaagcgagtttttgagtccaattttttttttatcatgatcgtgaatatgttgtagttatttagcaccaccta

SEQ ID NO: 406893 - DNA, 696 bp, Cannabis indica
cttctcggatcttcaccagttccaaatcagttaactaagtgactttaattctgtctaacaaatcatattacaatgtcaaattatgaagtttttcctacaacaaactcgatgcctgatctgaccatgtcttctcctagctgaggtgaaatcttaatcatactagttacctgcccggaaccctttctaatcagggcatcagccaccacattggccttcccaggatggtagaagatttcacagtcgtaatccttaaccaactccaaccaacgcatttgcctcatattcaaatctttctagggaaagaaatacttgaggctcttatggtcagtataaatctcacacttttctccgtagaggtgatgccgccaaatcttcaaagcaaaagctactgcggcaagttctaaatcatgcttgggcaccactgttcatattcctttaattgacaagaagcataagcaatgacccgatccgcctgcatcagtacacacccagaccttgtctggatgcatcacagtataccacgaacttctctttatcagatggtagggctgaaatcaaagctatgattaatctttgtttcaactcctaggagcttgcttcacacttgtctgtcaacaaaatttgctgattctttttggcgagttccgttaagggtgttgagattttagaaaatccctcaacaaaccaacgataata

SEQ ID NO: 406894 - DNA, 869 bp, Cannabis indica
taagaattaaactattaataatctatatctatctatatatataaaggagaagtatgaggcggtgatgtggcactctaaaataattttattctactctagaatttttctccttttttcataatttttaatcacattaaatattaattaattcaataattaataaaaaaaaattcaaaaacaacagcatatcactttttttatcgtttttttttttggtttttttttttttgatattttcttaaaaaatctcatttttgcttatcttttttttttaaattaaatttttaaaatgatatatttgatgacttttttttttcttttatcacttactaaattttatatatatcctaaactatttctcttaaattcataattcagtttactatttactttctatcttcttctctcatgatggagcataaagattagagtttgtagaatgtgggagtctcttagtactaaggtgattattatttattcatattttccctcttattgttttttttttttttttatcatttatcaattattaaataatcaatgtgtttactatttatcctataagaaaatctaatgcatgcaacaataaaaaaaaaatagtttctaagtttaagaatctattaagtttattcttaggtttttattaatcttttttagactttctattaagtttattttagagtatcttttcttataatatttagtgttttgttaaatttttttaaaattaaaaaaagtcgtgatagctaggagatatgtgaaaaatttagagttatatatttaaagaaaataaaaatctatatctatctatctatatatctataatctatatctatatctatatatctatatatataaaaggagagtat

SEQ ID NO: 406895 - DNA, 497 bp, Cannabis indica
agagagagagagagtatctggtttggttcgtttgaaaagagagggtaaatcctaatgcattttatttaaatatgatatttttaaaaaaatattttacctaaatatgacataattaaacccatataaaagcttgttcttaaaaaaatgaggtttttataaaaatactagattttgagcaaaaggtttataattatactgtcaaacagaattttttacaaaaatactgtctttttataaaacaaccgtaaaacaacgaaatataacaattaaaatagcagtggaacaactaaaaaataactatggaacaacagtgaaaacttaacacaatacacagtatacagtataaaacttacatagtattttttttaaaaaaaatacagtatttttgaaaaaatcctgctccacagtaataaagtaaaaaaaaataaaaataaaaatttcaatatgtagtgtaaaaaccaaatatatataaggctgattagtatttttttttcccc

SEQ ID NO: 406896 - DNA, 622 bp, Cannabis indica
ggacaatggtgcctgaaggagcactggaggaggacctccccggagtagttaactaggtaacagccggaggtagggaagcgtccggactgtaggcctcagcaagagtttccaggagatcgtccatgggcctagctgctgcaataaagaaataagtgttaggacattaaggaaaacaaaccacacttagcgaaaaagcaataaaactagtcataccctgactctctaattcggccctagcaaagtcttgaatcatggcgctggcctcatcatccccgagataactgtccaagggaagaaaccagctggaagatacgtaggctaaatgatccaaaggaataggcgccgaaggtccggaacccatcaaagaccgacctaaataatggcctaagtgggaaaagtagtactccttggcatgatctccccaccgggtagaaggtttctaaacctacggagacactcatcgaacccctatgggcctaagacgggaatactcacgaacgggaggaacgtaatgtattgataaaggggacttaccagaacccgaagtgctggcatcgggagccccggtatttgggactgggaccacgggcttgggcctatgggtcctctgctccggcggagc

SEQ ID NO: 406897 - DNA, 590 bp, Cannabis indica
atgtgtgttaaatttggctcaagttaaaattgtgttaaatttaacacaaaagatagcattagtcaaattttaattcataataaataccacattttttattacctctttgccatttattaatactatttattaattaaaaagattcttatatttataaaatattaaaataatatagataaaattaatttttaacgaatattaatagtagtattgacttttataaaaaaaatttatattgtgcattagagcacaaatataaaagtgaaccaaatatagttgtttaatatattttgtaaattttgttatattattttataatataataagtgtagattaaaatgtagtaatatatattattatgtgaataatatgtattaggtgtttggtaaataaattgtgtaacatataatttatttaacctaaaattgtaacctacactttataacatggagaagagttacaaagttaattgcttttgtaacttcttttggttgatcataatattgtgtaataaaagagatgttacacaatttgatgataggattcaaatggtttgaaatatagttgttacaaactatattaatgctcat

SEQ ID NO: 406898 - DNA, 560 bp, Cannabis indica
ataagttgtgttttttgtcatatttagagttgtgcgttttgttttatttgtacctactattaatgtttttgtcatttctttttttttaacctcaaattttttttcttcaaaattttttactccatttttgcttttgattttttcagatctcttttaacaagttttaatcaaatttttcgtatttattttttcaattttcttactagtaaatatataatagtataaataagactataaaatcatacatatcatattaattattttgttattattctttttttttttaaataaagttttgttaattattattttttttttcaaaactatgcttatttcaaataatagtagaacaaattatatagacctacatttagacagcacgattaatgatcttaactttaataaaagaatctataccactcatttgttaaacataacttcttttagcaattgtttaaacataattactgaaactaagatatataattataagcgacaaattataacaagagttatgtatctctagcacgtcctccacaactaaaatatatatatatata

SEQ ID NO: 406899 - DNA, 415 bp, Cannabis indica
agcctatcttgactcatccaaacattatcactgattctatccagaaggaaccaagcaccagagtgaaactgaacaatcctaaagatctcattcctgaaaatcttgaagaaaacatggtaactcaaaggatgtatgttaatttgattagctttctttgatttgtctcacaatttgaaccaaaaaatgtgaaggaagccacgacttttgaagaatggctcaatgcaatggaagaagaactcaatcagtttattcgcaacaaggtttggattttggttcgaagaccaaaaggtatcaatgtgatcaaaacaaagtggattttaaaaataaaagtgatgaattcggtacaattgtgaggaacaaggctcgatcggtggcacaaggatacacacaggtagaaggtattgattttgatgaa

SEQ ID NO: 406900 - DNA, 928 bp, Cannabis indica
aaaaaaaaaagttttaaagtgtacaaatgaaaagccccttaatattaataggaggaaatgcatatataataatgtaggaaaatttgcggtaaaagtccccgaaaaattcaatttgatacagataagtcctcaacctccaaaaatagtagcaatagtcctaaggtcatgttttttatttgtccgttggtctccaagttaacagattcgttaaacccattttaaatgccacgtgtcgaaatattattagtgggtgttattattttaatttaataaataaatatataaataatttaaaaaaaatctttttttcgttttctttctttttttcttcgtctgcttcgttttcttcttcttcaacccaaccccaaccagccacaatcggagcaacaccacgaccccaaccaccagccctaaccccactccagccccaatgttgtcaatcgaccaccaaaaaccaacccaaaataatgttttaaaaataaaataaaaacctaaaattaaaacccaagttaactggagcaaggggctaattacgttccctagagcaggttctcagaattgggcggcggaaactcgagttctccggtgagaattctagaatgtcatttccgacggagattgtagagatcttgacccgtggaaataacgggaccaccatcgtgtagagccattggaaggcgttggagcggtctgatcgtagctgggtttggttggtcgagtcggaccgttggagcggtttgcagctattggggccgtggctgggtttggttggtcgagtcggaccgttggagcagtttgcggccattggggttagggctggtggttggggtcgtggtggtgctccggttgtggctggttggggttgggttgaagaagaagaaaacgaagcagatgaagaagaaaagaagaaaaaaaagaaagaaaaaag

SEQ ID NO: 406901 - DNA, 604 bp, Cannabis indica
ccactacaccactttgtatattatatcaactttaattctaatttttatatatgggtgaattgttaatgagtattaatatcaataggtagtattagaaaaacttgagtttttatatttaattagaaaaaactctcgtttttatattacatgagttaggattattctatcggctgaaaaaaaattaaaaaaaaggtaaaaattaagtttgatttaaatattctattatttaaatatttttgtgatgtagtgtaaaaagtaatatattcttttaataaagtagttaaattaaatataaaaatttaaatttatcttttattatttgtcattaaataaatatctaatggtttaatattttaaaattaatattgataattaaatttatttacaaaccatcaataaataatatctaatagaaagtgctcctatatataaattgagattatttcacaaatagacaaaaataataaaaaaaattacaaaatacgatttcacagaattttaaatatttttacgatttttttgtattttatttgtctagaaaataacggtctttttaatgttgtactcttgttaattttttgttgtttaatttgtatgttattta

SEQ ID NO: 406902 - DNA, 746 bp, Cannabis indica
cactaatgcctcagaaatagcagtaagactagctaacaactaaggaattaaatacataagaatagattaagtgggcattttggatgatacttggaatcgatgaatttgtgttttcaattatgtttcactttttaaattaataaggtagtaatgttaattctctgaaacgtatgagtttcatatttcttccaagtttttctttaactttactctctctaagttaaattcacataacaaatactcatttggtgatgtttggttgcaagaagtaaaaatatagctagaataaaaatgacattctaatactttaaaataaaatcaaataaaggaatagaataagacttgtttacttttcattccatttcattccttaccaatcaaatgcgacttaacagaattaaaaattggttttcatttggttggttaatagtttccattaatgaaagttgtttctatttggttggttagttgtttccatttcatgattaaatgttttatttcaatgacattgttttctatttcatatagtttccattttgatattgaatttgtttccatttcacaaactataatttctatttcgtgattaaattgttccttattttcgagattaaatgctagttgtttctatttcacaaactatactttccattccgaagttaattagattctattttttgagattaaatgctagttagtttctatttcacaaactatagtttccatttcgaaattaaatgctagtt

SEQ ID NO: 406903 - DNA, 704 bp, Cannabis indica
gtagtcagagtacctggcaactttttgctggcacacaagcacttaagtggctggtctctcttctcctttaatcaagggattctactagcaagatgtggtttattcttggtcatagtagaccaaaagtatgagagtagactattagtggatcaggctagccatggtatagaccaggtggtcagccacatttagggagctttgcctggccagtttgatgaggctatggccgaccattctgtggaggtagtggtcggctaggttattgattccaaggtcggccagccttttagaggccaggtcgatgctacagttcgatcccatctacactcagttagaatttacccctggcaagattgttgtaaagcctttatgcactcctgtcattagctattcaactttgcactggtaacacatcttagaggtggtattgggatactacgtctatgcgttacactatcttgaattggacacgtagtagctatcccctttatccctgctttctagcaaggttgttgtttggaagaatactattatgggtgtcatccatattggatggttgttcaacatgtctatatttttaaaataggaatgcttagtgctttaaagaacaaagcgggtaacaagttttccttggcagtcaaggcattgctggttagttgcgggagttaatcggctattgtattttctatggggactttcctttt

SEQ ID NO: 406904 - DNA, 639 bp, Cannabis indica
aaattcatatattttaaagctaattatgctgctaattaaattttaaatagattagactaatataattaacctaatacaattatttaaataaggcaagtgggctttcacaattggggtgattcatgtgagggagggttgcgttcagggacggagctacatgctaagtaacaggggccttggcccccctcaattctcaaaaaactatttgttatatatatatatatatatatatatatataattagtttataatattgatgagctaattaatttcatacaaaagaattacaatattaataatatatgatgaactatacaatttgtggtgaaatttcacacttatcatagtagaaaggggatgacgtagtgggtggggttagtttattcgaagattatgtatatatataatacgtataatatttttcaaaataaaatataaaatgattttacagtacactcccttaaaagggttgtactaatgcactctctacttgtttcgacatccaagtaaaaatttttttagttttattttttttttctatattcatgtacgttatggctatttaaaatatcttacaaaatttcgaaaaattcaagaataatttactatatagaaaacaatgttcaaacagtctatttt

SEQ ID NO: 406905 - DNA, 689 bp, Cannabis indica
gccttcatctcccgggctagcttcagaccaacgatcaaagattcatatttggcttcgttattggatgctttaaatccaaactagactgcagcatgcaggtgttgcccccaggtgtgacaagggcgattcctacactggatagttgatcagtagccgacctgtccacatgtagtttgcatgtcagcttatcttcactgttacttggctgaggtatttctactagctcggggtcgcctttcgatatgctttcttccttgcctgtgcattctaccataaagtctgctaaggcctggcctctgattgttgttcggggttggaaagtaatttcatattgacccagttctactgcccacttgagtaaccgtgtagaggcgtctagctttcgcaatatttggcataacagttggtcagtatacacccgaacaggatgagcttgaaaatagggccttaactttcttgttgctagaatcaagcagtaagtgagtttctctatcaatgggtatcggccttcggcctcaatgagtcttttactaatgtaatagactgggtgctgtatgttgtttttctctctgatcagcaaggcacttacaacatgctccgtgttgtgaaaatttatattgatttataattgcgcatgtgtacacaatcacaaacaagtaatacaatgataagtaatcaaagttcgtctc

SEQ ID NO: 406906 - DNA, 547 bp, Cannabis indica
tatcagttcgagaaggacgttaacggtgtctgggtggtagcccacccgtcctaggttgactcccaggatctctcttgttaccacgagggatttcttattccctagtctggggttgccatctgcttacatttctacgtgaagattctggtaaatcacggtttccattcccctgggttgcaaatccccagggtctctgagccacttcttgatgatgtgtctggtcatttggttgctcatttggttgcaacggaatataatgtctccttccactcagatttcaagcccttgtatcctttctgtagcagggtatcaccaagatctgagtccgaatctccttctcttaaaactggattcttcacagccttacacactatgattgagtaccacttgatgtgtgtgggcactcactcttttcactatgaggcttcggttttgaagagaggaagagagagatagggtttcagctagggtagtgaaggaggcttgaaatttttactgaaggaatgagatgcatcatcttttccctttagccatcactacctattta

SEQ ID NO: 406907 - DNA, 921 bp, Cannabis indica
caagcaatagaacaactacccaatctcagaatctaaaatcatcgttaaaggtccaagtttgagttctaaaactcaaaagtttgttaaatctattaacagccatcaaaacaagcttatttcaacatttctaaacataatttatcctctgaaaacaataacaaacaccagcagcaactacagcaaccaaaatctcaaatcatgcaaaattttactttcttaaaaatcaagaaactaaagaggaggttgctagaaactttaccttggcttggattaaactaaaagcttctggaaaacacagcaattgatgaaaaaattaagaaccctagttggttctatagggttttcgaagagagaggaaagaaagagagagaggaagctttttatgtgtttttctaatttttgtaaaaatgaaataaaacttgttttattataaattaatctcagccaacacattaataaaaattagattaattaattaaaaacaagccactaaagacaaaaagctacacactaaaagtcataaaaggtcacttaggggtatttttgtcaactctaaaatctcaactattcccgacattcccaatgtctaactatactgtcccggtatactaaaagtactaggatgtgattttaatagccaaacaccgcgttccaatgttgttgggcataaaacatgcaaattatgaaattctaaatatgacatataaaatgcattatgaattcaaataaatcatcataaataaataattcaaagctaataaacaattttcataattaaatcctaattatctgctaatttctaaattaaagttaagcggtctttacaaataccctcttctatatagtttgcctttgatcattgtgtagcgaggcactaaatacaatagttatcgcccctcactttttttcatttggaagtta

SEQ ID NO: 406908 - DNA, 496 bp, Cannabis indica
atcttaatacactatattaaaaaaacattgatacaattttacatctctcatttatggtgctatgacacttgtgtagtataatatcattattgatacaatttaatatcaagtcttacttattttactttaatcaaaattataaaaaacaattaaccatttataaagtactaccttatagtggtgctggacaccttagtaatatgtagcaatgactttaaaaaataagagcattactatgaggcactcatggtgtctagcaccacaatgaagtatcgtcctataattagttatcgattttctacaatatttattacagtaaaaaaagtaggactcactatcatcaatgacaatattatactttataagagtgttaagcaccatgagtgccataacctttctaaataaaataatagaatattttactgctaaactctctcaactattactccacttgcagttaactctctaagctggaactttagcaataaaaccttcc

SEQ ID NO: 406909 - DNA, 519 bp, Cannabis indica
atacatgaatatttgtcaccaaaagttaactacttgcaacctgtgtgttatattatataactagataacttagtcgcccttcgtgcggcgaattaaataaaaaatgaaactttaatataataaaaaagaaaaaaaagtttcattaatacaaattaacttaaaaataataattttaatttataaaaattttgaaataagattttttttagtacaaaatcaatttatctaattatatattattattgattattgatttaacttttttcaataaaataaaataaaattatataagaaataaaagaactaataaaaacaaaaaataattaattaatatcgtactattccgccaaattattctatttacataaatatatatattcaataaattaatttattgtatataattaaataacatctaacatttatatttgaattttataatatattaattattaatatagatatttcagatattttttgtttaaatttaatttgaaaacctaattataaaacctttat

SEQ ID NO: 406910 - DNA, 593 bp, Cannabis indica
aggggactcgtgtaacgagttcccaagtgtgcaaataatgtatgaaggggctaatatatgaagaagataattataagataattttcatcaagtgaaaaaaatgaagttctccaatcatagtctacaagaatacttgaaaatattctgatagagtgggggtaagtgttacttgttaggctatttttagcctacattttggatcaactttatgttcgctttttgttgttttaggatggaattatgcttgttttctatgttttcaggttcctcagagtgatggaggcctcgggatgcaaaagtgcaataaaaggcaagcaaagccaagaaaaatgccatttttcagtttgacgcacttctggccgcggctagatcagtgtagccgtggctatacagtccacacagaatgcaccatcttcaatgctccagtctccacggcgagatacaccctcgccgcggccataaagcccattacagaagcacgatttttagaagtttatttggccgcggcgagatttcgtacgaccaggggtaaaatcgttcgcgaaccctacaaattagtataaaatgaaaaattgcgattggaaatcagggga

SEQ ID NO: 406911 - DNA, 901 bp, Cannabis indica
aaattgaactagttttcctaatgccccttgcgaaaataataaaaaataaataaaagccatttctttcaatgtgtactaaaaaatacatcttttctcacacttttttattgatagtgaatagagtattactatattataatatgaattaaataacatcaataataatagaataataccatgattatgagtgcttttagcatttctctattgaataatttgattacacatacatacaaaatttgagaaaataaaattaaatcggaaggtaattatgtattgagatatttttatttatttagtgaaaatgttttggcatattttacaagtacccgaaaatatcacaaaatttataaaaatattggtctataattttttagaatattttattaagtaatttttaatttttttttttaaaaatatgaaaaaaaaaatctgtaaaaaaaactcattattattatttttttaaaaaaaaaaaaaaaacggttaatatttggcccaacgaataaaaacaaataatgtgggtcctacccaccaaattattaattaatttattctaataatatattacgtggaatgatttagaccagaaaaaaatatacacatatgattaaataaaacgtcaaccaactgtattaggtcgggtgtccaaagacaaattgaatagacattttgttagagaaaataaaaagtaaacacagaaatttaccaaagctgttcgaagacccacggctttgccagcggcgatatttcgaacattgtcgtcgagaaacagctgcagaataaaacaaaacgcgtgtcgttttataaattcaactccattattcatactataattgtttattttttcattttttttttggaaaaaaaaaaaaaaaaacgtaaaaactaaacgaaaaccgac

SEQ ID NO: 406912 - DNA, 1065 bp, Cannabis indica
atgattttttttcttgaaaaactataattttcgtttcccacagacgacgccaaatgttgtcgagcaaaattcgcaacaccaaatatatataataatattaatgacaagaagagattgtttgaagaacagctgcgagtattcaacctataatggcgagtactcgagttgggaatatgaatgcttaacagaaaactggaaaaaatagtaagacagaggattatagtggctcagtcagatcacggtctgcttagtccactgtagcaagagtttttgtaggtctcatttcacggtggatcactcctttatatacaaagcaagtgtccaattagttatacaaatattacatttattgtcaatccgttcacacattgaattacaataactaaactaattaacgtaaacatcaataaatgaatagcagtttctactcactaaatgcagcaacgtatgtgtcttctaacgtgcgagttgactgttcatattctaatgttaagctcgcgggtccaacacttaactaagtttagaatgtctccattcttatatagtcccctctttggacatcgtatgacgagctgatagaacctagacatgcgagtctatatcgatttatcaaggctgttgggtcatcgggatcgactcgcattatagagaatcgatctctatgcttacgcaggaatatagacaggatactcgcacatatcctgatatatgcgagttagatccattctcatgtccttcataatacgagttatagttatgcgatcagactttggtcatactcgtaatatctctctgactctatcttgggcgaggtttaaacttcgaggagtctcttacggacgtctcagctttcattggaaatttgagtacacgtgtcttctaaataagagtgtggtctcgagtttctaggtgagagaaatctcactataacaggtcatacaggctatcatagacttcacaggttaaccaaagatggtccattggaaaatgtcatcatgggtgaattaccagtttgtgaatcttgcatagaataaaaaatgaccaaacgttctttctctgcaaagg

SEQ ID NO: 406913 - DNA, 508 bp, Cannabis indica
tatccggctaatgattgaaacggaattcctaccctccgatcagtagtggacgaggttgataatatttctagggttagtgaggatactgaagaaagccaaaagaggccgatagagatgagagtaacggaaagagagagtgagaaagcttaggccaatagggtttatgactttggaaggatgaagagaatgaaacccactttagtttttgtaactgggcctgggcttttcatattgggctaactcaatcaattacaacataatgaaactagaataaattaatttaatgtctttaatttttatcctttttttttcaaaatttattatgtttacctatttttcaattattttaccgattttacctattatatttaaaattatgtcttaattatgtgagtgtataaggataatttaggtcaaatacttataaaagagatatatttgaattaaattttatttaaaggtaaatttcatcaatgtataaaaaaagagagtattcttcaacttctcc

SEQ ID NO: 406914 - DNA, 565 bp, Cannabis indica
acctccaactaaatgtcacctaatactataaagaagcttagaaacacactatttgtaataatatattaattctccgcacaaatgtcggagtacatactatatatatgttagaaattattatgctccaatagaaatatcaaatcaataagattacaattctttgacaaataatataaaggacaaaaatatagattaaataataatgcaaaaacaaaaaaaaatatacacataaaatagagaatatagagatgaagagaagaattacaactcaatgcaataagctacacataaacacaatatagaaatagcataaatataaaaagatgtgagagcaatttcaacaccacatacaccacaagtgtataataagagaatcaccaaacttgaacaaggtcttacacctttgtcgaaaaacttatttcccctactacaagcacttagggaaaagaaaagaatgaaaatagctttctggattatcaagcctaaaatgtttctagaaatgtgctctcttgatagaaacttgttattgttaacgtaaaagtgaaccaaacctttatttatacgt

SEQ ID NO: 406915 - DNA, 871 bp, Cannabis indica
agctatcgatcaatcctagagccaatgcttccattagtcctcagtagacttggttagagttaggaaaagcaaaaacacttagcatcatcactaacgcgggcgacttgcatcatcttatcgtattttgcttgatgtgctcgcgaatcagttctaccctcatacaatttgatgtgaggcatcttaaagttttttgggaaaggagtctccatgatttccctaacacagggttccggatcttcatcctcataatctgacaatgctcccactttgctttttttaccaacttagtcaaggcagcaatctgttcttccaacctcttggtatcactttctgggagatcatgtcccctcatcttgtcactaagatgattctttaggtcacccccatgtggcctcgcccttttgctcttgtatctctcgtattttgcatccaactgccgccacaggtctaccgtagaccaactatctctagaatgactgataggaatcctcccatcctgattgacagaatcactaggaggatctactcatcttctaggcttagggactttcgcaggtggtcctctcggtgcaaccctatctcgagggtcagaagggcgtctaagctcgaaagcgctggtggccttctgcgtcctcgagggttgcccgactggaggcgcatcttttcgatgaggtctgggagcaaaggtttgaagttccaacgttagtttgctcacgggctcgcccttcagtcaccgcttctacagatggctcttcatccgtcccagccaaaccatcaaacttgctctgaagttcttccatggttgctttcatctggggagtaagcctttgttgcttttctagggctgccttgatggaaattattttaccag

SEQ ID NO: 406916 - DNA, 676 bp, Cannabis indica
aagtcatgtaatcataggctggaatttataattaaagagagaacagaaagagagaaaataccagatacaaatagatatagcttattaatggtaatcaaaattgataaaagagaatcatgcaatcgtaacaagtgctcctattagtaaagcctcattatttccactaaactaaaccacattttctacataatatcacgaacaaagacaaatatgcaatgaagtaagtaaatgtgaactaaaatgggctcactgtcactgcacaaaaaaagtcacaaacccaaacattctcttctattggtataggattctaacatctagttgaggcaacttccgtggtcttatggatgcgctccaataataataagaaaatataattgaagatgatttaatctcattcctatataaacatctacgtatttaataaaatttttaaaaaatgattgtactttgcgctcagcataataaaatgttatcttaatcttctatgggcttagtagtttgaatgattgtacatctacatacaactggattctccatttaatgactgataatctctctgttgttttttggagtaaacaagcgatgttgctgcaaattattaaatataatttataattttaagatagtttagtagtttgtaattgcagaaaaatattacacatctatatatatataa

SEQ ID NO: 406917 - DNA, 751 bp, Cannabis indica
tttttactttttaaaaaataaataaaaaaattattaatattctcccatgattaggtttgttagagagatatgtggctgggttttttaatttaaaaagagattattaatatttaaaagattgtttatttaaaagattgtttaatttttgggtttaattattgggtttattttttaacggagatcaaacctaatcgttaaagatatatatacataaattttaatcccaccaaagtagcatttattgatgatagagtatattccttctataatttgttttgactttttccttccatttgttctactgtcaatagttgtttaatcataaattttaataaagattattatattaaatgttaataagctgtccatgtaaagcagtcgttacaatataataaactgttttaatttatgactaatcattcaattgttattaacaaataatgattcttaaatattgaacaagtaacaatatccataactatttgattaaagattttccacggcacctatattttttcttcctatattattattcgttgtcttttattattaattttttctaaaagataaattattattatattattattgatacagttatatattagatctatctaacggcatttcttggtttaacagaatataccttaaaaataaaagaatattctgttaaatttaacgatgttaataggtttcatctcccgttaacaaataaacccaatagttaaaccaaaaaaattaaacaatcttt

SEQ ID NO: 406918 - DNA, 427 bp, Cannabis indica
aaacaacttaaacacgttcaaattcgggtccgtttcaagaaccgtatttttgaacgtaaatgatggtgaattcgaacagtttaatttccgacctctaaatcacattctaaaagctttatgagaggatttagaatcaaagaaacgatttagagcagcccacaaactctcaaacgacaaacccgaaatctcactttttcttcacggctcggtttcgttctctctctccgtctctgcctctcaccccgtttctaaaccctccaaaccctaaacaatcatataaacatcttatatataatcctaaccctaatataaccctagattaacaactcaaaaatttaaaaacaaaaaaataatatatatatatatacatacctacctacgtaaataacagtaatatataataataataataataataataataata

SEQ ID NO: 406919 - DNA, 538 bp, Cannabis indica
catcctccgggaagcattgttccttgtctggtttgtgaactttatctttgtttgagaactaagactacttagctatgaagaaaataatcaacaacatattaaagttatggaatctttaatcaagggttgctcatacagttcactaatgcccgttctacggtgtaagtaatcttggttcagattactgatgtactgagacatctaagtgaaggtattgtatataatagagattatatatgacaaggaccaaaatgaataaaactatctttatcaacataccatttatcataaagacctaattcatatcataatgatgatcaatagtagatcaacttaaatcctgagttatcatgaactctttttcatgttattaaatatttgattcacttgttaaagtttctctgagaggataattcttacaacttttgttttgggaatctaataatatagatggttgggagcatgatgtacaattatggaatattaattttcataatgaattgaatgtttgttccttttatgtgttaattctaaaact

SEQ ID NO: 406920 - DNA, 766 bp, Cannabis indica
ttaagtgtatccttgattttgtttgataataattagttattttggctggaggaagtccgtaccataaatttataaaagaaattaatcactatatcaaaaaaaataaaataatatatagagaaagtatatggccaataacaaaattctatatccatcaaactatttttaaatatttttttttaattttttttttgtatagaaaaataaaaattaattttaagtgtttaaaatgtgtagtttttttaaatgttttaaactttctaaaattattttattttaggcttatgaaaatttattaaaaaaatatattttaattttacatttaaaggtgattatatagtatactataaatagtgatatttgtatatgaacaaaattatgtaactctttattatattttttctgtaatgactgtatatttaaacatagaaattagtacattattcgtatttaatgattgtttatgttgtcttgacataaccgataaggataatactattaatgttcctaaatagaaagtcacgataccttgtcgtagtgggaaggtttcaaggaacctaccctgttatgactttgaagacacttgtgataaaaatctgttgttattttaaacgagtaatggatactcagaataaggaactaagaagtaaagcgaaatgaaatatggttaaaaccattcatatgtgttagattaggtgtgactttgtaatatgccacataagcaaccgttttaactaactcaattagttagttaaaaccgttaccc

SEQ ID NO: 406921 - DNA, 490 bp, Cannabis indica
atttcctttttttgtcataattataatttagattcttatttatatatttttaagaaaatatacaaaagcttaaaaaaagtactaaataataaattagactaacactattactatgaatatctaaaccatgggcagacccacattaaggcgagatggggcagtcgcccccctaaaaaaaatcaggaaaaaaatgtataggcattttagttagtaaaaaaaatatatatatatatctaattaaaagtgatatttctaaatatgatactgttggaatatgttttaccaggatctagatttactaccatgcatgttatttaacatcttaaatatgaatttttaaaacaatgtaattaaacacatataaagtttgagaaatcttatattgggtgtagcggaattaaaatgactgattccgctcagatctctagcccttatatcatttctttagcagagtatcaccaagatctgagcccgaatctccttctcttga

SEQ ID NO: 406922 - DNA, 524 bp, Cannabis indica
actaacaaacatctaatcaactgtaactgacaaataacaaactctaacagtcataactaactattctcctttatagtattcactatgttatataactggtttgagttatttcgtgttatttatttttatttattataacactatcataaaacctattctattttaattataactgatttgagttattttatattatttatttttattcattatgttacagaaccggttatatttcaattataaccgatttgagttattagtttttttcatagaaccggttctatttttagttatatttgagacatctacttctggtgacttttctggcgacggtgactttttcggtgatttctgacaataataatttttccgactactttttcggcgccggtgacttttctagaaaactttatttacaaatatgagatttctactttttcttaaaaaaatatgtataaatgtaaaaaaaaaataaataaaaaaaaaaccataatcccatagtattatttaattatgtcataaaa

SEQ ID NO: 406923 - DNA, 653 bp, Cannabis indica
agaagctcttgctatatttgagccagtgtttctattgattataatctacaatccttactgaatttaaagttgaaaagcatgaaattaattgtagttgagcttatgttgtatgttgatgttcttggttgcatgagtgttaatcttaatagagtttgagtgtgattgcttggctctgttgttggattgttagggttttggatgtgatttcagggaatttaagagggtagaattcatgttttattgggtgctatgctgcttgaaaatgtttggggttgaaggatttaaagctcaagtctttgagcttgaagagttgtgtgtcgagcatgattttgattttgtgcaatctgaattttcagagtttttgttaatgtttaatgcatgaaatggtgttttagactctttatttaatgattgaaagcctatgtgatggttctaagttttggtttgggtttggatgtgttttaggcataattttcgtagctgaaaattgagttttctgggtttttaaacccactggtggcgactatcataggtctggtcgcgaccatggtaatggcagtttattaatttttatgagtttttgtttttgccataacttttgactcgggactccgtttgggacgttcttgttggaatttattttaccaggatct

SEQ ID NO: 406924 - DNA, 742 bp, Cannabis indica
accctaaaccgcttagccgaagctctcctccaaactattttccctctaccagtcaccctaaaccgcttagccgaagcctaatacaaaaaaaacaatacaaagatttcaaatttcattcaatatcttcattttcccacgttttctcacgaaccaaacagaacccaattcgctaaccaacccagaaaaaaattatgatcataattactagagaagaaagaaatttaccttgtgggtttttattttgtagcctttggcagcgactgtgagagagcgcggggaattagggctaggagtgactgcggagagtttttgggttagaaccgaattgaagccagaaatggtttgccaggagctgagctttaacgagttggccttgtggaaaggggcgagtcgaacagagggggaatcaagccccagatcctcaaccggatcccgaactccaggccgttcttgaggacgacctctccgtccgattcgccaatggcgagggatcaacccacccccaaatctcggtcgcctgctgcttccatctccggcactggtggcgttcggccacctgcgttgtcaccccgagcgtcaatggcgagggatcaacccacccccaaatctcgttcgaagatcatcatcatcatcatcagagaaaagagagaggagatcgagagagagagagagagagaacgggagcgagagagagagagacaaggaagaaggagatgtgctggggttttcagacggaaagaaa

SEQ ID NO: 406925 - DNA, 553 bp, Cannabis indica
tataaaaaaatgtagtatttgagttttttgctcttctttttggtatttggtatttgtatttagtgagaattcatttttattaaatgttttttgaaaagtactaaaaatatgtttttcaaaaaaatatatatgtaaaaaaaaattgtgcttcataggttagtggactctaggtgcaaggggtaagttgaaatatacccgttttttttcatcatacaactacaaaaaaatagttttattttaaattcaaatgaaatgtatcttcttttataactcgagaaggggcttgatggagtaccaaaaacatagaaaagaagttgatctcgacaagagctcaaaaagggctcaatggggcaccaaaaagaagggaatgaaagttgagctcgacataagctcaccaaagcttgatgtgctcgacaatgaagagtcgccaaaataagttcattgagtagcttattttataagttatgggttggttcgacaaagctggacatggtatgttagagatttataacaatggaagaaaatcaagatttattacaactctattgtaaaa

SEQ ID NO: 406926 - DNA, 553 bp, Cannabis indica
gacccataacccattcctaagtgagactttttacagtgcagctatcataattttttgttacagacaattaaaataatagtatttcacaggtgggacatgtttcgcggtcgtataatgcgcaacaatatcatctatctaaatttaatatatatatatatatatattatagtaaatcacatacttaatttatatataaactagtattagagtctatatatatatatatatgtttatcatttttaatattacttttttgtgtttattgttctttacaactatatctatttgtgactatgtaacggatttcttagtttaatggatttttttttattttttacgttaattttaacagaacatccaaattatttaatagaatatttttttattaattttttttaatattattatatgtatttaaaaataaaaatgatgtaaatatattatataaaaaattaaatttaattatatatatttaaaaataaaaattttcatttatatataatcacatttatatataatatatatattgaaaccttaatttcatgataacctt

SEQ ID NO: 406927 - DNA, 1246 bp, Cannabis indica
cttcatttttatattaatcaataaaagtgtgtcaaattgtatattagtttaaaaaatatattgcaattagtataatttaataattaaaattatatttttagtgtaaccatacataatgtggtactgtgctaaatggaagtggaagtgtaactctttttttttttttgagtgtagcgtagtggtattttacaatcatttaatagcttaatagcttcaaggtcctaagttcgaacccatgacctctccttttttcccatccctccctccctcaccactaactcttacactatattattaattcctacatttttttttaatattttaattgatactaaatttcataaataggtaagttaatactattatattaaaaattaaattaaataagaaatttgatataaatgtattttttaaaataaaaaagaaaataagcactactcataacaaaatgaaaaatagcaagcggagtttgacgaaacgagcccctaccagagaaattgcacgctcttgtataggattccaaacctgtgcacccctaaactacaagctttgaaactcctacttttttatgggatatttaaagattttttacaaacctttctataatataaggttatctgatagtctttgtatgcttttgcgcatcttttccttgacactattcgtaaggttttcaaaaggtagtttacttgcttacttgttaaaggaaggtcttgaagagtatgactaaattaatagtttagggccattcaaaaaaaaaaaaattaatagtttagggtaggggcgctaacgagaaaaaatagccccaacctatagatagactaaggcacctttactaatattttaatagttagctaggcacttctttctcaaagtcaagtttctcgcttgttgcttatttaaaaagaaaggcgataatgcaactttctttcagctggctctgtcttatctatttttctcttgttttttttcaaatggatatgttatgatagaaatcccatcactctctttccttttttacgccccacgtcactgttagacatttatatgtataaactgaaatatatatgtttatgtataaaatgcagaattaaatcaaacatatatatattatgaataaggatcgaaatacctccagctattgattctagagcttcaaacccacataagctttgatctgcaaaggaaactggttggtgtgggtaatcgggcttcctcgctctctcaactctctttagatggattt

SEQ ID NO: 406928 - DNA, 562 bp, Cannabis indica
gttgataaacttcatcatggaactctgggttgtagttctgtcgatgatttaattgtttgtattcagaacatgttatctattcgcccatctctacgggtggctcatgtcaatagggagtttaatactattgctcataaggttgctaattggggtattgggcttgatagtgagttcctctggaatggttctttacctttcagttagtcttgttttgttgtttatacaagactttttcctcaaaaaaaaaaaaaaataatatttagaaatattttgattaagaatcaattttagttcataatttttttttcaagaaaaattgaggtccaaaattaaattttaaaaaattagttatcattatactaaaatataaggtcaaaaatagtattattattttataaataaaagtatattattgattatatttaaaatattttgatattatgatgctaattgtaacatttaaaaaatataatgtctaaaataaaattttaaaaaatacatatccaaactaatttataattcaaaataatatacagcttgttataaatattaataattatgt

SEQ ID NO: 406929 - DNA, 930 bp, Cannabis indica
ccacgtaaaaaaccttgtagttcatatattacttttctatagcttttatttttcttgtgtgaaatcactatcgtgaggctcaattttagttaacgaaaatctgcgtcaacagtttggtgctttcattgagagcctctgtgaaaaaagctcagaaaaaaccctcccttctttggaagaaataccacctccttcatggctagaaacccaaaaaatgttaacaccccacatgaggaaaccaatcatcgttctgggaaagagcccatgggctccaggagatctaccaacccccaatcaagaaggatcacccgttccaggaggtttcaacctgagggtggccccagtgcgcagaccacacgttctcggagaactcgacctgatgttggtccttgtacacagacaacacgctcgagaagaactcaacgtgggattggttagaaccccgggactagagacgaagagctcaatcgtgaaggtgcccaatctgtgggcgaaggaacttatgaaatagaaaaccgctacctgaggcaccgtctggaagaggcaaagcgtgcaaacgttaaggtagagcgcgatgcggcctcggccagggcggtagaggggaagaatgctccaaatctacatgaacttggagtgataagaccacgaggcagacctcgtggctcacgaactaggaaacaggaaaaggcctgggaagaacaacccagggaaaatgagtacaccccctgaaaatcataacgacagccagatgggagacaactaaaaactgatgaacgagaaattcctcattagaatgaggaagattttggactcaaccgggagaacggaggtcacctactagaaatcacaaacattgttcccaaacccatagatcgacgactcgtacaaccatgtgttgggttttatgccctaaataaactccatttcaatgta

SEQ ID NO: 406930 - DNA, 924 bp, Cannabis indica
aggataaacattttactatagtattgatgtaatttttttagaattatatatgagtgggattgtttgagaactctagttcaactttttgagatctgcatttgatgaatataaaaattaaagttaggacattagttttatgcggattaaattagatttctggttcaattttagtttcgtagtagtttttctgtatttttttatgaactcgaaacaacccctattttgattaattctggtcgtcttttaaggtgaagtcgccggaatcaatggtagttctctttctggttagattttcgtttcggttgtattgaattgctgcgtggttgctcgatgattgcccaggaagcatgaatccttggttgaaggtgtgtataagaggtattgtgtaatttttttaatttgggcgtatatttatttatttgcccaattgaaagtaatttttgtaatatgattgctattttttagttaaaattgaaaaaaaaaatcctaaaattattgattctttagaattattaatttattaacaaagtaaatatttaaatttaatcaagaaaacctttttattatatacttatagtttaaaatgaaaataaattttcactaatgactattatatgtatatgtaattaatttattatataaatatttttaataaaatatttaatgtatataatattataattttctcattttttaatctttttttttcataatattttatgttgtgattatttataaaactaccgataaatttttaaaaaaatttgaataatttaccatttttaaaataatgttcacatattttattgcaagtgatattattttttgttatacctatataagtaattatttgaaccttatatttgaaagagtaatttgcggcaaaaccgccttaactatcaatttacttgcaaaaaaccatcc

SEQ ID NO: 406931 - DNA, 479 bp, Cannabis indica
tctcaaatatgctttagtatgcattagaccagacacctactgttgagtgagagtaatgagtagttatcagattaatctaggttaggaacattgaaatataatcaagtaaatcttaagataaaaaatagaaactatattttagttgatcagggtggtattttaatacttttagactacaccaaatcaggtttctagatttgcgttagtgctagaaattttactgatgagatggtgattactctggaggtggagtagtgattttggataagtgtaaaaccctatctaaagtctctaactctaccagtgagactgaatgttaaagttgcaggaaagatacttattcagcctatggaatgttctatgtagtttttggcattgtaccaataattaattaagtactagtgttactttctgactaacacagaagtagttgtcaaaaagtaaagaatctagtaaccctagagaagtagacatataga

SEQ ID NO: 406932 - DNA, 711 bp, Cannabis indica
tccactacaacaatattggatataggtgacattttaattttgtgacatttgctaaaatatgttacaaaaataataatttgatgacatttagacaaaaaaatgtaactaaatgtattctactttctaaacttaatttttaataacatttttaaaatgttactagaaataaattttagtaacattttaaataaatgtgagtataacttgattttaatgacaattagtaacatttcaattagtaacatttttaataaatgtttcaataatagtaatttaatgacatttggtaaaaaaatatcactttagtaagaataaataacattttaatttgttgacattttttttaaaaatgtgactataagtatatttagttccatttgacaaaaaaatgttactatttgtaaatatatttttttttacatataataaatatttataaaaatgatatttataaatatttataaatatttacacataataaatataaatatcattttaaaaatgtcactagaatattttaataataacatttgtaaaaatgacacaaaataatagatttaatggcattttaaaagtattactataacacaacaacacgatttcaaatatattttgtttaataattttttttttagtttataattattattaaaactaggaaacaaaagccgcgcgttgcgcggtcttaaaaaaaatcataagctatatata

SEQ ID NO: 406933 - DNA, 914 bp, Cannabis indica
caactattacacaaaattgtaacaattcgcaaggagtctaatagcaatgtgctaataataatacatcacaccttgccattttcaaagctagttgggacagattttaacaaataatatatcatcccaattattgtacagtacttttagcatatctttgggttctttttttcagtatcaatagaaccatgcatgcattaattgattttattatttatacacataaatgattgaatttcgattacgtgaaattagatttatcaaatatttttttttaattatttcaaatcaaatattaagtatgagaaactaagagaaaaggaaaaagagagaattataatattactacatggtcaaatatgattgggacctacatgatcaattggttttaaatcattgacgatattgggcatgtttggcatggctttagaagagcttttgaagtctcaaagctacttttataattagcaattcttaattagtcttttttaagcgtcgaacctacattattcagtgttttgaatcaatcctttaatctttttaagaaaatttcaatctattacaatcaacccaataacgaagaaagcacctcaatcacgatttttttttacaacaatgctctttgaagtggccacaatgaaatgaatagtgtataaagcatcaaggtttttttttttggtattcgattataatcttatttttagtcacaataaaatttataactaaatgtaaaaaaaaaaaattataagaaatcatcattcttatattattactaaaaaatcattcccaaatggtattgctaacaaaaatcgtaatttgttgtgtgactaaatgtgattttaatcgtaatatttattataattaaaattatattagtgataatttatatttaaatactatattttagttacaaataa

SEQ ID NO: 406934 - DNA, 569 bp, Cannabis indica
tactctcaaaataacttaaacacatgccttaaaatcattaagaacaattccatacctttgcaacacatacttgccaagaacaacaagattttccccttaatccaacacacatgcaaagatgaacaaattcacacatagcacatactttttaatcattttacagcagctgaatattcaaaattaaccaattaaaatgactgtctcaacacaagcacaaagattaccaaaccaagctttgatcaaagcaacaactcacacattcaatcaaagaaagaaatggttaaaaagagaaaagggggttcaggtaagagaggaggaaacccaaaaaatttcagcaacaaatttaacaaatagagaagttaagaactacctcaagcttctcacaatcaaagcacatcaaaatcccccaagctccaacaagctcaacaacacagaagagaggaagatttgaagtggaaagattgaagagagagggagaatagggttcaactaagagttgagaaaacaacccagaattttctttctaaaatgcaaaataattcctttttgttgtaattaatccaaaaggc

SEQ ID NO: 406935 - DNA, 548 bp, Cannabis indica
atattattttgaaaaatattaagtccaatttgttatttaacaaaacagataattcaatcggtagcttttataaaatacaagtccagaatagtatttaccctatatgttattttttatatatctattttttagtgggttgcctaatataccttcactttctatttaagggtaacacatattttatattaacttaaggggtataattgagacattatctataaaagtgagtatatcttaaagaatatgaaaatgaaagtaaaaattaaaataaataaaataaaatgggtatacaatgtaattttctattttttttttagtacccctatatttttatttcacattgtgtttgtaggaaatttagctatgatacataggaactaccctctgtaattccagattcaagatcacacttaaacaaacaaaagttaaatcaaaacaaacaaatcaagaacaaaaatcagcaaacacattaagccagaaaaatataacacagattgtaacgtccccgcttcaagcctccattgggtccttacacccacggactaatg

SEQ ID NO: 406936 - DNA, 700 bp, Cannabis indica
atgtaaaatagagaattgagatttcggtgatgtggaatttctataaaattggcatttaaagacggttatttcaactgaatagtaaaaatagagtagctaaaatgtattttattagttttgagttcccgctcgctgaaaattgacatttaaaagcgattattttataaaaactgtaactatagagtcccccaatatttgagctaatagttttttatttttcgatgtgagctttagatgggatgcgacccaataactaaaacaggcaattaataagcataacaaaagaacatattccttttcatttttttaaaaaattcggaagcataacagctgtattttggataaacccaaaaatcataacttgcataaatatttgtacaaaaatatatttggaactcagagccccagaacaatccagaaaaatatgcagattaagttttcaatttttcaaacaatttgcaaatcataaaaattaagaatatgtctaatgttatacaacacttataaaagtcaagtccaataatcaagttgagtccctacctctcccaagtcgttaaactttgtccaaaagatgatcttaagctctcaagtcccgagctccaattactgtatttagtcaaatcttagatattactctcacctataccatgaaatggttaaataattatcatcatcatattctacatccaaaaccgagtcc

SEQ ID NO: 406937 - DNA, 665 bp, Cannabis indica
ttattatttttttgaaaaaaaaagtgcttgatttttctaaaacaatcaaaagtgttataaaattaaaattattacagtaagtaaactaaaactattattaaattttgaatattagtatattttttttaataaataacttttaaattacaatttgtaatatttcttttatttgttgaatagcattatactaattatacaattaaaaatatacataataagaataaaaattaacaatataattaaatatatgtgttatgcgcacctaatattaacctaatatatatataaatataaatatcaatattatttataccaataaattagtaataatatttactaattaaagttaatatattactctaattaaatttataattaattatgcatatattatttatgtactatacttgtatttgttaaatatgtataccattttttatttttaaaatcataaagagtacttgttgtatattaaaatttaatttaataattattagtatcatatttttatttgaaatttttacatagaaaaattcctttttacactactttattacataattaccattacacgcctattactacatttctacttacaaactttatttttattacacatttaccacttagtcatcattacatccatcatcaatcaaatcctactc

SEQ ID NO: 406938 - DNA, 641 bp, Cannabis indica
aatacacatttttatatatacaattgtgacattaataatttctaacaaaaagatacttaaaattataattttttttctttaacatttttaccaaccatgtcttacttttatgaatttgtctaattacatttttatgcaatctcatgaaagcaatatgtaatcaatataatacaaatataaagtagcatgaaaatgaaaatagtataatatattattgtgaaagcaattcgtaaaaactacaaaaatagttaaaatctgtacaaaaattgaaaaaaattataaaaatgtatttttgtaattttctatacaactaattaatgtatgaatttttcactctaatatatgtatatttatatcaatttataatataatgataaattaaacaattttttttttttcaattattatcgcacgaggcgtggttatgttatcttattatataattaaataaataaattttatttattcagcaataaaataataataataataaatttttattctatcatatgtttaaacaaacagattagggtaggattttcggcagaattagattttaacttattatgtatttattgggtttatttatttatttttatattgtatcaattttcaaaggtttgttgaaacttcttagtttt

SEQ ID NO: 406939 - DNA, 797 bp, Cannabis indica
tatgcttaggagcccttgaatctcgaaaatgaggctaaggaagagcaggtgactccactgaagaggaagaagaaactttcggccccgcccaggcctgctgaacatgccattcgcataagggagcccatttcacctgttcggccatcccctccagtgctcagtaaagggaaagctgttatgttggaaataagatcgatgtcaggtgatgatggacttttgagtcttgtttgggtagtcaccttgcatacttctttgtcttgtttttgagcttcttgacttttatgccttatgtttctgatgtctgttttttcaaacaatgttgtttttcgttctgtacagacatgtctcggcagattcttgatgctctgaagaagagaatgggcggaagctctagcgcctctcctccaaccaagaagtctaaaggcggtgaggggtcctcttctaaggaaaagaggcatgttagggaggtcattgatctttccgaggagctaactgctgcaaacccctccaccccaaaagctgctaagtccaaggagtctcgaggagaaagcttggacaggtctggaccatcgaaggttgggtctgagctggtcaggagtgaacctgaacgggtgcaggcacctactcaacctttgtcagtgcttccagaggccaagaagggcaaggagatgctggcccactacatgaaccagctggttcctgaggttagtgagcaactggctagtgctgacaatgaatcttctttggaattgctggtgggcagagtcttgatggagttcatgttgagttttgtgccc

SEQ ID NO: 406940 - DNA, 544 bp, Cannabis indica
aaaaaatagtataaggtaacgagttacccccttatggttagtacctagttacccttatctaatttttccattattttttattttgttttcaattttccaataaaataattattttgcaaaaagaaaaaaaattataattttacactatttataaaaacctataaaatttatatttttttaagtggactcattgtcagctcttatccaattaaaatttttttattttagaaaaaaaaaaaaaggacagaacaccgtatcaactcagtaaaatgtaacaattaattgcaaaatattttcatttttgtaagattcagtattaatgtatttttgaaaatttcccaattattatggttaactatcaatacttagtaggaactaattaaggtgagataccgtgtaccatgcacagggttggctagctgcatgaataaaatagagatttttacacctcatgtcaaaattgacactttttttacatttttatccttacacagttttttaaacatttttaacttttacatttttcaattttacttttcaaaaa

SEQ ID NO: 406941 - DNA, 860 bp, Cannabis indica
ctaaatatatatctctaatcataattcgaaatctaatgtatttaaaatacattttgaattacacattaaaataaaataaaacctaaaaaatatattctaatttacgttgacctaaaaattaataaataaattaattttcatcataaatataattttcctatttaatgaaatctcttaagaaaaatatcaaatatttaagtgtctcgaacaaatcaacttaaatattatttttctatttagttaaatgcatctagaaaaatatcaaaaatctacttagaaaataactatctaaatatttcataaattaattatttattttctaattaaaatataatatattttagtctatctattttaattaattattaataaaaaaatttacttgatttaagtttatctaaaattaattaaaaaattaattttcaactttaatctaattttcaaaattggaaatttttaaagtatctacattaaaataaatatatttcgaaatttatatggaaaattgattattaaaataaaataaatatactctaaaaattttctaacttaaagataattttccatttaattaaatttattaaaatagaaacaaataattaagtatcttgaataaaattatttaattattaattctaatttaatatatctaagaaaaatattttaatttaagttggtctaacattaattaataaattatttttcaacttaaatgaattttctaattaattaaattttttgaaaataaataattaagtatcttgaataaaactagcttaattattaattctaatataagttttaagaaaaatatttaatttacgttggtctaaaattaattaataaaattaaattttcaa

SEQ ID NO: 406942 - DNA, 1087 bp, Cannabis indica
gtttttttttttttttggattatttttttcttcaggtattttaatagtttatatagtaaggattataaggaagattaatttgtaatttgtaaaaaaaaaaaaaactttaattttgaaacattattaataatctttttctttcttagattattaattaattgaactaatatcaatagttagacactaaaactacttagttgacttttttttaaaatatttttggaaattagtttatttaaaaaaaaaaatcctagaaaattttgaaataatattttcttacaatttattaaaaacctaaaaggaaaacaaaacttaaggaaaaaaataattgtttctaacaatttatttgtttagattaagattgaaatttgattttaaaacataaattagatgtgttatgtaattaaaataaaataatgatagtttcaaattaacttagattatattatttgtaaggatatcaactaaactaggacatggtaaagtggtatttaaacaaataaaaatgataccaaagtggtataatctctttatttatttatttattattatttaataccatgaaaacatgacccatggttttaaaatgcagttaaaaactaaaagataccacaaggcaaccttaatggtaaaaattatatttagtgttaaattaacactaaaattatattattttaacactaattaagggcacatttgaaaaactattgtgtaattagaattaagtgtaattttagtaattacgaggttaggcgcatttgttcaaccagataattatatagtaatcatgtaattgaaggtaattaaaggattttaattacacttttcaattcttatgaccccatgaaaatttggtgtaatacacaatactgtattactatttttagataattaataatgttaaactgggtaactactaacttatttgtcaaatatgaaaataaaaatttatatgcaattactacctgacatccaaacatacattgtattttaaaaaaatataattactactttagtaattatataatttcttccaaactaggggtgttcacaaattatccgatccaatccaatccgcacgatccaa

SEQ ID NO: 406943 - DNA, 899 bp, Cannabis indica
aagtttttagtttttttttaatttaattaatttctttagtttttatttttagtgttctgacgaagggacaaagtgagtttcaagataagacatagctctcttagacactaaagtttttggaaaggttattatttttatttatttaatatgttatatgattttatatattatgtaatgtatacaatattgaattaaaatgaataataatattataatgtactgtgtagataatagttgaataaattaatttctattaaatctatgaaagagtaacatatattacaaatagtatatatatatatatatatatatatatttttgtaaataattattttagtcaatattgtatataaattaacattgtaaaattttttgttaatacagattagaacgagaagaactgaaaatatctattttggactgaaagagtgaaagtaactcaaatctaagacaaaaaaagagtcaagacattatggtaaacttatactctcattttttatttttaaattaagactaaatatttatgatgtgattcagcataaaaatatatattatatatcgttataatttggtctttgtattaggtactaaatgatggtaatggtcttaatgaggaacaacctattcttgatgaaaatcctacagataatggtacggataagggtaagggtaaggataagggtgctaaaaaaaggggtagacctcctactgtgcctattcctaatcctaagaagaagggaaagtctgatgtttggcttcatttcactaacgaagacaatcctccccgagctacagaggatgatgatgaagaacctcaacaaccttgtgttcctaagtgtatgtgcaactagtgtggcagtgattttcactgtgacactaaaaaacatgggactagtcat

SEQ ID NO: 406944 - DNA, 507 bp, Cannabis indica
aaaccaataaactctcttaaagggcgaatggctccacacatatgttatttagtaattgtatgcagctactaaataacattaattgttagaattttatcaatgtcttatggattattaatgattagttatggattctcaataaccattaaacttaaggattgttgtgaatcgcaattaatctaatacttgtagtagaattttgagaaaatattaatgatatttctcaaaaattatgttcttggattgattactcccactgatcatgtaattcttcattccacaattctagtgttgtgagatggaaagtaaaaaatatgtaacccatagaccttatatcatttttgatgaaatgctcatttaaggtaatttgagcctatatctttacctttgtacaattgtactctaactataatacgggtacttctaaaatagtggtacttgtcataagtagttctaacgttatcacaactcaaaatatgtttgagaaataactttggttagaacacg

SEQ ID NO: 406945 - DNA, 1133 bp, Cannabis indica
taagttgcaacttcatttttttttattatacatgacaatatatgatatagttacatgaaattctaaaaaaaattcaaacaacaattattaattaatgctttgaaggttctagacatgtttggaaagataaaggagttactattaattttttttttaactttttatagtctcagacaaaaaaaagtagaaatagttgagactaattataaatcatcattcttatactgtaactaaaaaattcgtggctaaaagtattagcaattagcattatcggtaatgctaaacttttggagccgatctttagttttgatcctcttaagcacagataaccacaagataaaactatgtttaagaatgttaattaagatgactccaaataatagtactccatgtgactctagttgttgaagggcaaaggagttgatatccttgggaaattttaaacctgctagcagagaaatgatttgtatcaatcaaattcttcactttttctttaattgttactagcttttgccaatatcacttgcctaaggctgagactttataattccaccattcttctttcctcacatactcattatgtactaatttcacccacaaaatatcctccttcttgactatagtccaaacatatttgcacacaactgctacatttcaatctaaaatgcttctaaatcccattccacccgaagatttaggttggcatagagtattccaggcaacaactactgtccctgttaacatgtgactaccattcacaagaaaccacgacgtatggcttctatttcgctttacattttttttttgtcagcattatcacttgacactagtaggaatggatagctattaatattgagttgatgagcacaactcgcccatcaaatgacaagttttcaacactccatgttctaatcctagccaccatcttgttaacaagaatactgcattcctttgctgaaattctcttaggacagattggtacatccaagtaccgaaatggtagctcatgtcttttgaaacccgaggcatctagctagcactcattgaacatctttcttactcatattactacaatataaagcagtttttgtgggtttaggcatgaaacttgatgtttgtgaaaacaatttaat

SEQ ID NO: 406946 - DNA, 515 bp, Cannabis indica
gaaaattgtaatttgttaaggggctttaatagcaacagacatgctccttctatatcacacctactctttgctgaggactcttgtagtggccaaaaattgctctaagcccaacgaaaaggcccaacgatcgaagtacttacgaagcccacttataagtcagaaacaaggaacccgtaagcccaatggctcacatgggccacgcccaatccatgctttttgggtcatacccatattcgaatgtccaacccacaataaagcttgattttaaagtgtaatgttagggttgacgcgtggaggaagaagaacgttaagtttcccaactaacccacaaaaatagcgatcttccctagcatagcggagcaagaatatcaaccctctgagtgatacgctaatgggaggacgctcatctaggaacgaacctaaaagatgacgctcatccctggagaagtgggggaagaccgtttctctagggacggaccacgtttcaagaggtagccgttttcctaagataataa

SEQ ID NO: 406947 - DNA, 621 bp, Cannabis indica
gcttacagcatagcactggtctactacggttctgtttcctgttaaaaaaaacacacccatcagatgaaactaatcattgagtttttagtgaaacttacagagaggttgcgtcacacaattggtcgatgatgatgagattggctttgagtcctctcacatataggacgtttgttaactgagccactctattcacgttcacatcacctctcccaacaatctgccctttgttaccatccccaaaagtcacggatccccctttttcatctttgtagttaactagcaatttcttatttccagtcatgtgatgagaacatccactgtcgaagtaccactgcccttcaacaaaggcagacagggatagctttgcaaccaaaccaacaccaggatttggtttggactttattttccattctcgacgaggtttgcgtccatgcgacttattcggttgagggaaactatttggacaattgatcattgctttcaagtagttttgcaatttgtagcacttgggacgaatgtggcctctcctattacagaaatgacatgtaggaatgaaattgtcattctgtagcagattttctgcatcagttctccttccttcaaactgttgggttttatgcc

SEQ ID NO: 406948 - DNA, 1285 bp, Cannabis indica
  modified_base (24)..(24): a, c, t, g, unknown or other
atgattcgtatggagcttcatagngtcataagagatggtagctgtgaagataactattgaatgtattgtaggagagttggagagtataatcaggcgtttgatccagacaagagtttcacttctaaacatactcactattaagtatcgagttataattacttaatgtaatatttttagagaacattactaactaatcgcgatgacatgtgctaaacactactgtccaataaactaccccgttatatttatgaggggtgcaattaattatattaatggctttgttgaaattaataaactgcatttagacatttagcataatttatatgtactttccaatattaatatataattagttattcatttttagtttaaccttctttgtataataaattgtagtttttttttttgtttttatttttattaaatggatatagtgtatcattaatatttctaattcattcattcatttgtttttattttctttattgaacaatgttatacatcttcataaactatcatgaataatatcacatgtggcaatatttatattttaaaaaaaaatataaggagaagttgaagaatttaatttaaatatataactttttataagtattgtatacaattagcttcacactcttacataactaagatatattttttttttgaatgggaatggataatttattagcaaaccaaatccgcaattacaaaagatttaagagtactaggaagagtagtctccgaaaaattacgaccaaaccaataacaagagtcacgagccaaacagtgggcgaccttgttagcagatcgcttgacatgacaaataaaaacattagacaaaagagaaagaataactctgcagtcttgaacaataactccaaataaagaaggcatatcaagctgacaatgcaaagcttggacagccgtgagacaatcagtctcaatggtgatacactccgacaaattagacgcctttattcagcttaaggcctctttgacactacaagaaaaatgagtattaatgaggacaaatttcgttggtaaaaacccctgttttcgtcagtattcctcatcaatgaggacatttcgttggtaaaaagtcgttgggaatagttcgtcggtaaaaacgattatcaacaacgacttttgaagtcgttgggaataaaaattatcaacaacgacaatgtcgttgggaataatattttatttatttaatttttttaaaattactgagtacatcaacaacgacattgtcgtcattgatattattatcaatgacgacaat

SEQ ID NO: 406949 - DNA, 477 bp, Cannabis indica
cctatttcataactatcatgtggtctatccaaattttactaaaaaatttctggccgccacataagaatgagtggcccccacgagtcaaacaacatagagaaatagagttgttgaccgagagttgacctgctaccactgaagggcttgcttctgcatcagcctgagttatcgcgaacaccctagctatagtgggtttcgctgcattcttcagtgcttcaattctgagttggggacaatctctcttgtaatgccctggcatgccacactggaagcacccctgccctttacactcccccagatggtgcttcttatagttggggcactctgggtaagtgtgtcgggtttcagtgccactctgacaattgcctcgaccctagttcccccagaatctcttgttctgacccgagccactcgttgcagtggatgcctttcttttctgatctatggccaaaccactacctgttggaaatattttac

SEQ ID NO: 406950 - DNA, 763 bp, Cannabis indica
cattttcaccattacatctcaattttcgtaaatgactataccccctgtacaatgctcccttacttacttacaaagctacaacctaattcatatcttcaatagaaattttacaaggtaaaaaacaaacctaatctcatcttacaatcattttgaatcattagaactgtgtggttataatctgccaaagcttttgttcccataaacatcattccttaccttccaaagattatataccccgctgcctatataaatatatttaggttatttaaatatatattttattatttataaattttaataagtgaaatgatattatatatttctataaatattatttttcaacttataattttaaaataataaattatataatgaaataactaatttatgaaattgaaatattataattaagatatctatactcaaagttaatttcaaatttattattatttaattcatcatataagataatttataatataatatttaaattaaaaggataaatatatcttttaatttcaaaatatatctaacattaaattttttaatcttataattaaataatctgtaaaattaagaaattaaaattttttcaaaatcttaaataaaaaaaaaacaattttttgaaatctaaccatatttaaatataaaatagctattttttatttcaaaattcaaaatatcaaaaattaatgatgaaccattaaaagaattaaatattattaatttttaaaattgatatttaggttcaaatattaaaaat

SEQ ID NO: 406951 - DNA, 1004 bp, Cannabis indica
aaagcgtaaaggcaaagaaggatatatggcgctcaaactagatcttagtaaagcttatgatcgtgtggagtggggctttcttcgagctatgatgagtaagatgggatttgacttgcgtttcattgatcttgttattgctacggttagctctgtgaggtataaaataattcatggcggacatgagctgggtccaattgttcctgagaggggtattagacaaggtgatcctatatcaccttatttatttcttatttgtgctgagggcttctcatctttgatacggaagtttgagcgggatggtaggcttaaaggttgcaaggttgctaatggtgctccggttatatctcatatgctttttgtggatgatagttatgtctattgtcgtgcaaatgatagagaggcttcgaatatattacatctgcttcagctatttgagatcgcttctggtcaacaagttaatttcagtaagtcctctgtcttcttcagtactaatgtgcctaatgctactcgggaccgattgtgtgggatccttagaatgagacttgcagatgaacatagtacttatcttggcctcccttgtgtcatgggaagaaataaagatgccattttggggtttttgaaagacaagatgcagaagcgcattcaaagctgggagggtcgtttcttgtctactgctgggcgtgaagtcctattaaaaactgtagcacaagctttgccaagttttgctatgtctgtgttcttattgcctttgaaaacttgttcacatctggagagccttatgtctaagtattggtggagttcgagtagtaggaaaggtgtgagctggtttagttggaggaaactatgcaagactaagaactctggtgggatgggttttcggagtttgcgtgagtataatctatctttgttgggtaagcaaggttggcggttacttctgtaccaggattccccttgtgggtaggatatataaggctcgatatttcctaaatgttcattcttggagg

SEQ ID NO: 406952 - DNA, 702 bp, Cannabis indica
tatctccaattttcgtcctccttgattgcttattgaaaactattgaagtccacttcttttatagccaaaaaaatgataaaaaacgctgaaaaaaacttattctgcttaggattagaaggggcgagccacgacatttgatttcaatgcctaggcatgacccccctttatttggaaaatgagttttttgctatattgactgatcgaattttggccataactctctcgattttgctcacaattatatgatttaagatgttccggaaagataaagagagatctagaacttttatgttttgactttttccaaaatctaatatgaacatagtcgaattcaggcttgaagttttagttttattttttgtacaattttctctattttataaattaaatttttctaaaatttgatcaatttatacatttaagtgttgaaatctgaaatcaaagaaaacaagtataattctattaaaaaatgataataaataagaaaattaactctaaaaataacctaaataatagtctaaaaatatcctaacagatattctctcaaagtggttaagatattccctcttagtggtttagatatttttaaaagtaattaagatatttcattgagatattctctcaaagtagttaaaatattttctcaaagtaattgagatattccctcttttagtggttaagatattttctcaaagtggttaa

SEQ ID NO: 406953 - DNA, 598 bp, Cannabis indica
tttttaaaatttacgatttgggttgctccagaatctggtggcttctatataggttgttatacgaattttggttgagatttaagttgttctgttaattgctataaatttttttatgtgaaattccgtaaaaatgtaaaaataaaaactattttaaaatgttaaaatgaaaaaactactttcttttatttatttatttattctttttttttttggtcagaacactttattcgattagagaaaaaaaaaacaagcaccaatataaagagaaagagaaaacatctctttcatttattaaaattcattacctatcctaaaggcacaacaataaagttaggactaacaagtgagatgttttaggaaagctagctagaaaataaaattttaataatttaaaaaaaaaaaacactttgagccatatctttttttttgaataaagataaacttcattaactcaagagcaatcgctcaaaagtacaacttcaagttccgaagggataacatccttcgtgaacacacgatcagcaaacaatcgagactgacgtgcaaccacatgtgcagctcgattagcagaacgtttaacaaaccttaacgaaacatt

SEQ ID NO: 406954 - DNA, 731 bp, Cannabis indica
ttattttttttttttgttggcaaaacccctttatgtttatttttctttgcaaatttgacacgccagttaaatattaccgttaaatatcaactggatgaccactgtatacacttatgtatatgtaacagtaaaaccttgaagtcgatatagtagtaatccaattagtatttaacggtaatatttaactaaaactttaaatttgcaaagaaaagtaaacttcagggagttttgccacaaaaaaaaaaaaggaataaaggagttaagtgtataaaaactaaaaatataagggagttttgccacaaaaaaaaaaaaaaaaggggggttaaagtgtataaaaaattaaaaacataaagagatttcaccacaaattactcttatttatatatataatataaaaaaaattatttagtttgattatatatattttatttaatttgtattatatatattctttatagtatttatattaaaagttaattattatttatgttccttactttcgtcctatctcctcctaagaagccccatatgggccatacctacccttaagtcatgtttgcttggcaatcgtaatggaatcattactactattacattgtttagtttaacttttaaaattcggtaaatgctttgcattgtaatgaccgttacattagatcatctctaatgggagatataataaaaattgtgctatatttggcacaaaaagtagttttgtggtaaatttacac

SEQ ID NO: 406955 - DNA, 556 bp, Cannabis indica
agtgtgttttgttattttgtaatgaatattataattaaattttttttattttgtttggtatgagaatggaataaaataatgagtacatttgacaaaaatatccttactttatatatattttttttgtttatctaaatttgtaaaatattaaaaatattattataatcttcattcaaacaaaaaatatatttatataaccttaaaaataatgctttaacacatgactttaaattagttttttattattaataaaaataattatttaatttataatggaatgaaaatacactataaaaatataataaaaggtaattcttacctaagtaaagataaatattaatataaataataatataataataattatttttgggcaattatttcatatattatttatttttattttcttaatagtttgagttacttcggtggttgctccagtagtttacatgtagattgctatgtgaatctgaattgtgatttaaattgttccgttgattgctacgtggatttttgtaaatataacaaaaaaaaaaaaaactgctttaaaatgtaa

SEQ ID NO: 406956 - DNA, 730 bp, Cannabis indica
ctgatgttccccatcgcattcataaaagaaaagaaaagtaaataaacgtgtcagtatccatttaggcattttgctaaaacaagcagcatgatcatcataaagagaagaagattttatacataagtatatagatatactgatacatgttaaactgtataagagtttcagcatctgttttggtataatctaacaagagtaattagattttaaatataatttttacaatatttgagttctattgtcacaacaattatgtttccaacagaccaaataatcatatggatattactgatattgaatgactaatttaaattttagatggcaagctttcttcagatttaggttcctacctacatcaacatatattcttgcgcagccaataaaagaaagttgagtttgcatcagcattcccctatctctaacagtctaatttatttagagaaggcaatatttttaacacatacccataaaattgaacaagcgaaatggtgacaactcaaatttgattttcggtagttgaacaaaagcccatgaaacagctcctacgaatggttcagttggtatcaatcgcaatttgacccaaagctctccatcaatgtcaaagtctcgaacaccaaccggtactttaattggtagaatcccaaattttaatgagagcatcagcaacatacgtgcaccgcctgtataacggaggcctatttgatacctggagtactacaacatttatcat

SEQ ID NO: 406957 - DNA, 454 bp, Cannabis indica
acaaaagttattgtgtaaaactaactaattttataattaagtcgacttgattgaaagagtattggaggaccaagaaccataggagatattagcaaataagacacaatgaagtggtaaaagaatcaagagactacaataggaatcaaagtctatgctatctgggaaataaagataagtgcaacgagcatactactaaatgagttatatccaataccgattggtggcttaatggatcattaaaattgtataaaaggaattttaaagggcacaagtgattattttcctgcgtcatggaactagtatttatcattgctagagtaataaccataaaactataataacagaattgtaactttatggaggaaattaagtaaaaaaattaagttttatgtgcataataacattcaatgaaagtatatgaacaattaaagagaagtttgcataaaatcttcta

SEQ ID NO: 406958 - DNA, 1130 bp, Cannabis indica
tagtgaaaatgtataattttgaattattatacataagtttttaaaatttagaatattattaattaaataatagttacttaaattgattctaagaaaaaaaaatatgacaataaaattatatattatttttaaattactaaaaaatttatataaatattttaaaaaattaatatttatattaaattagtgattaaattagtgtttaagataaacaattttatattattcaagtatttttattttactattttaattatttattaaataaaaaatatgacaaaatattttattatatatttatgatatattcttaattatatatgatatattattttttttttgctacgaattatttatttatatttatttattattatatattttaattttaatttattattatatatttttatttaatttaagttttttttttctaaaaggaaataaataaaatagtccagtccattcttaaaccaaacacaggattactttcagcataatccaatcttgtccagtccagtccaatccttttcagtccaatccagtccaatcctgcgtaccaaacgggccctaagggatcattagtaaattttattttttcacaagagttaaagtgtgatatttgaccacctaaattatggatattacataattgttatggtttagggctcggctcgtgacataatttgttttagagcccaagaactttttcttcatctgaattctaaaattagactatgactccgtttggcacagcttttgaaaaagctaaaagctgctttttaaaaaaactgtgataaaaatgtgtttggtaaatagtcaaaaaacagcttcttgaagaatttttggagaagctacagctaaaagctgaagctgctccaacccaacttttagaaaaagttgttttaattaaaagactataataattttttttgtactaaaaccatatttacttatttattatatattaaaaaaattaaaataaactaattataataaaataaataattattaaatctctaattttttttaaaaaacaaattaatttatattttattttaatattaacaaacaacatcaacctagaacttttcttatatacttgagtttctattttttttttactattt

SEQ ID NO: 406959 - DNA, 644 bp, Cannabis indica
gcagaaggtggccttcggcaagcttgagcctatgaggaatttgagaagcaaaagagatcctaaaaaatattataaattccataaggatattgggcatacgaccgatgaatgtcgccaattgaaagatgagatagaaagtctcatcgctcgaggctattttaaacagtacgtgaaaagacaaggccagggctacaaccaacccactctgcccaataacccaaacaaccaggggtaacaacctattcctgtggaaggagaggacatcctagttatttcgagagggccacatatcgcaggggaaagcaataacgcccaaaaaagatatgtgaaagagataaagaacgagcaatcggcctttgccccagaaccttccaagaaggtgaaaaccggtgaacctcccattgtattcacagaggaagatgagaaaaacgtgatgtatcctcatgttgatccactggtgataactattcaacttgccaataaaagatcaagagagtgttaatagacaatcagagctcgatgaatatcctttataaggagactttaaaaaaaagggaactcaaaaaagccaaattaaggccttgtatggtaaacctttgcagattaaccagagacaacattgctagccttggcataatcgagct

SEQ ID NO: 406960 - DNA, 770 bp, Cannabis indica
tattattgactttaaaaaatagacctttgttcctgtttaatcaacaaagttctatcgaaattaatttttatataaatcaaaatgtcaatacggtatttttgtgtgttaagtatattaaaaatttgttttattattttaacaaaactgtattattaagatttactattaattttttaattcgcatgatagaatatggtttaaagtttagcgtgattggccctgacaaaaaaaaaaaaaataggttaagcttgattcttgatagttgataccattttgattttctaaatgaagttcggttcaaataccgatcactcacaacaaatcttttgaaatagaaaaacttttaaaaccttattatacgcagatgttctaaactcttttatcattttaaagtttctttaaaatttactattcatgctctacatttatagaatattattcattcatctaaacatattttattatttttgtatgaagatatgtgtatatattaatattatatatttgaaatgaataaagtgtattaatatttagaaagaaaaaaaagattttaatgatgtattttatagaaactgatgtatggtgtaattaaaaatgtgctataaataaataaaataaaaagtagaattttgatgatatattttaaagatagaataaagaaactgtttggagtgctcttaaaatttcattaattgtataatcaattatgatcacagtagtttataatattttgtcgtttattctcaactttttttatccttacatacggg

SEQ ID NO: 406961 - DNA, 691 bp, Cannabis indica
ggaacctcggatggtctgatcgaagtacctaggaggaagtattaatttttatttttagattatgaattcaaaagttttttgcgtttttcgtagaagtaaaaattttatgaatataaatcatatataaatgtaccatattaccattgaggaatcataaacataaaataatcataatatgaataattagtctattaacaattttattgatttgagtgacaatatgattaaaatacattaatctattagagaaatcaaaaacataaaccacacatacataataaatagaaataaaagtgattccaatatgcataggaacaaaaagcataaaataataagggatatatatttgcatctggtaaaattatctaacattttttttttttgtaaaagtatattaatttagattttataaatgtgataactggaattatggatgaagatgagtcagcagcaagttagttatacgcttgtaattattggtcagttgatcgttgtaactaactaatcagtgttgagtcttgacaactcaattttatagatactttactaagttgtaattaatcatcttctataaatatacaaactatctcaaaactcataaaatatttggagcatgtttggtattattttttgttttttgttttcaaaaaattatttttagaaatgagaacaaaaaatagtttttaaagtt

SEQ ID NO: 406962 - DNA, 512 bp, Cannabis indica
agccatcatagactctaattggtgacaaaacttcttcggaagactgaagcaactcatagcataagtcggaattgattgaacaaccacttttagaagcacttccctgccacctatagaaaaaagcttggcatgccattgattcatgagtttccagatacgatctttaataccactaaaaagttccttcttatccttacccgcataagagggaaggcctaaatatttctcatgaagggaacaaataggcatacgaagaacactatggaaacgctgttgaataccgtgagaagcatttggggagaagatattataaaataatattacaaatattaaatatattaatctatttatggtaattagtttaatcattaatgatttatattatttaatgattaaaatgtatggttttatgtaataagttttcaaaaagtataaatttttcaaataatttttttttttttgtcacattttttataattatttttattttttgttgtatatttatgaaaaaa

SEQ ID NO: 406963 - DNA, 731 bp, Cannabis indica
atttaatgagccttagtccacgagttcttttttattatgagagtatttattacagagaatgttcgtggtggatttctctccttatttctctcttcgattccttaaacaaattgttcgacccttttcaatctgtttgtggggtatttatagtgttttttctaggggaatccctagaaatagatcgcttgtcattctgtgttagcttcataggggcacatattcctagcagatacaaaataggaaatacatgacctataccgtaggtatcttaggagttaggtggatataatcttttatttcctcttgactgatgtgattcctcataatgtagtcgtcactagactcatcgattgtagtgcaatcaccgtaaaaggggggttaagccatctgtcatattgtttatggaggcttcaatacatcttcacccatgtaatctctttacctcccgaaactgccttagcaatgctctagcctccctgagcataaagatgggccttatgctcttttccgggaggcaccttccctgaggtgtccttttttctgtcaaagacttagttgactttcatgagtgatggctcttcctgatccacgtgtcacccttatctgcgtccacgtattttgggaaaaatcaagggcaacatttaccccccaagcctcatttagtgaagggtaaacgaggcttgcttgatgcctccggttagcttgttggtataatgacacgtgccttaagc

SEQ ID NO: 406964 - DNA, 509 bp, Cannabis indica
ccaactgatcatgatgaggaaaacgctcacttttggtgtctttttcggtgaaggtgatgggttggtccatgagcctaggcctttgtgtggacaactgagttacttcccatacttcatcatgatggtctagtgcctatgcataggatttttactcattgggagtcattcctccaacatgggatcttagggcccgtttggttgatggtaaggaatggaatgaaatactaatggacctgattctttttgtttggttggaaaatacaattttggaaaagaacatagtaatgctattccccaaaccaatggaattgcttttccattttttatttggtggaattataattccattccactactttcgcagatatctctcttctactctagccatgggccaagccaaacaaaccctaaccctagcaaactgaagatcctgccgttgataccattgtgacagtcttcttcgatcgatcagactcacgctacaagtcctgggttccttgattggtggt

SEQ ID NO: 406965 - DNA, 555 bp, Cannabis indica
tcctctccctctctctccctctctggaccttggatgtgtgtgggtttctgcgtattggcgggaaaacggtagcttttggattgggaaatttggattttggagtcactatttctctgggacggcgggaaattggggaggagaaataaaagggctcatttcattttacttttatgctctctccaatttattggtttaccttttgtccctcattttttctagtctcaactatgaccccaaccttcattttatatctcaactttaacatttcatgaaccacccaactattcaaatcaaactgcatacaaatagatttaccaaaaataaaactcgaataactcactgcaaattaaaatatcagtgaggttcgacggtcacaattagtcgacgttggtgcgggtacagttagttttttgaaatctcctatgattgtggaagataacatgggtcaacgtgatatccctattaatgtagagactgattttatggaggttgctactgattaggaatttagtgaaaatattgctaaagataatgattgtttgttggtggtggaca

SEQ ID NO: 406966 - DNA, 533 bp, Cannabis indica
aagatcctggtaaaataatttcggacaagaatttctatgattttcctttgcaatggtttatgcgacttcaccattcatgatgcttgctttttgatgcacaatgtctgtctttcatctttcttattcaaagcttcttgaaatttttgccccaaccctcaaaaatttcagacatatgagttttgacttttcaacgaatatatctattctttaatctgttgagtactcctggtcggcatattttcttgtttaatgttcgatacaccgaccaaacactcatctcgcgtgttttcttttgtagatgaagccaggtgagttttggggaaccgaacaccgaatcgaccaggatttgcttcaactcttgtacgaggatcaccctcgtctttgttctagttattggaatttattttaccagtttcttagatttactaacaagtatgttgtttaacaccctaaatatgaacttctaaaacgataataaacacgtataaagtttaggaaaccttacattggtcgcagcggaataatatgtctcc

SEQ ID NO: 406967 - DNA, 933 bp, Cannabis indica
gtttacgcacaagggatggaatctgatccgtgcaaagagtgttgaaaagggtatggggattttgaagttggggaggaattggctaggatttggaagggaggttgcattattcgggccattttcttggtacagaattaagcaagccatgacagaaatgctgatctcgcaaacctaccttgtggaccccgagtttgcaaaggagatcattgagaggcaatctgcctggagaagagttgtatgtcttgccatcaactctggtattagcacccctggtatgtcctctagtcttgcttactttgattcttacagaagggactaggttgccagctaacttggtccaagcccaacgagattatttcggtgcccatacatatgaaagaactgacattgaaggatctttccatacggaatggttcaagatcgctagacagtcaaagtactaaaaatcctttcttggtggaggcactctactactgaatgtgatctttcctttccctctcaataatttctgctgactttcatgccctgtgcagaaaatttattttgtgaactttctgaattctattttattgttagctcaatttctaagttttccttgtgtgatcttttaatttttaatgttatatattttcaaaaattgtcatttgttttaaggttcttgttaatcagttcattgccccacttttgactccaaaagatctttatatatatttatatattgggacatgcttatgtgcaatgctatgtttggagatgaaaataacaagaagtttctatgctgctttctggtgatgatattatatgctctcatcacattctagtttgtatattatgcgatgatatgacatcacatcatcattggtaagcttttaaaatgggagaattagcttattttcttggtatttctactcaactgataacactaaggtggcg

SEQ ID NO: 406968 - DNA, 1180 bp, Cannabis indica
agatgccttgctagagtgaacttcagcttatgttgtttccctaaaagacaagcttcacaaaatggtaaagtacaagaatttgaattttcaattataccttatttgtgcagttctttgaggccttgtttactcatatgcccaagtctgtgatgccacatttgcatatctgattctagccctttcacctaacttgcctctctggctagaacagtttctccttggggaatatacaaaccattgatcttttcacatttcatcattatcagtaaacctttggtgatcctcgagtttttgtgcatggacttgtatctataaccctcatcttcaagcgcacctagggatatgagatttcatcttaacttctagagtgtgccttacgttcgtcaacaccttgattctgccatcatactatttgatggcaacctttccggttccaatgaccctacatgaatgattattttccattagaattttatctccgttaattgataatcaaaaaatgattctcaactcagacgcatgtgatacgttcatccatagtctagaatccactccttactcattgatgattccaagatggagaactattctccatttgttgagcaattgtcactatcttttgcgattgtagttgaatccttcctgtggtgatgatgccgatttttttttctatatccactataagatttgttatagccttgttgctccttgtactttttgcaaaatctttccaaaagcccagaccttctacaaaagtaacactttcgagtttccttctctttgaacttcgatcttgaataagagtgatggtgtttactcttcgaacatacttttttgggtgatctccctcttgccaagtatacctcttccttcttggattccttttccaattgtaattcaaaatccttaaatttaagtgcgggaagaacgtcttcgtgccatatttaatagcagccttgacttcttcatatgctattgggagagatctcaacaaaatgatggcctgaatttcttcatcaaccttatgatttatattagtcaatcctacaataatcttattaacattattatctaaagaaagagaagaaatcattctaaaaccatataaccttttagaaagttaatcttgctagtaattgtggcttcatatagaattcttcaagcttgttccaaattcctt

SEQ ID NO: 406969 - DNA, 563 bp, Cannabis indica
aaccccatataaattattgtatatgtgctctctgtttttgtgtattgattgaattcatatatttattgccattgtcggtgttctttacatttgtagatttcagtattagtaggttaattttgattgatgtctttatttatttattttattattactatctttcgcagttagttactagaagaataattatggacaaaatacattgagtagatatggagaaatactaggactatctccaaccaggcatggttgagggaaccgcaatattatgatcgtatgatacaatttcaaagatgggcattttcatgagagatctattttgttttgtaccaagaatatcaagtgccaatgagttccatatattaattcaatattaatgcgaagttgaaagcatataggaggcgtttggttgggatgaatgaaaatatatgaataggaatgggaatgggaatgggaatatgaataagataggaatggaataaaatttaaaatgcataaaagaaattgataaaaaaatcattaattttttttcttgttacattggaatggtcattcctttcttt

SEQ ID NO: 406970 - DNA, 804 bp, Cannabis indica
catcttactttatttatttttctatttacttattattaagttctgttaattttatgtataattttgtcacattaaagataattttatggagaaaattaggcgagaggttcgatccaaatttatataagaaagatggcgattcatttgttatgatagtacttctactaccattaaaaaatttaaagacaattatttatttagattctaccatttcatatttgaatattcaataatatatgttgtgtatattaatttatattttctctaaatagatgaaattaacttcttttctataagtgcaaccaaattctctattaatattgaaatagattatgtagaatcattaatctgaaaaaattccaccaagtccaagactgtgtaagttattgagaggtataatgttaagaagacaattcttgaagaagatatatttcttaacagaatctctgtacaaaaattgttagaggttaattgagagtgatattcaattgaaggattcttttttttttttttaaaaaaaaaagtatatcatttagtattattattattactattatttaaaattttcaatacctataattttactttatgataattattttactccaggaatatatagttacgatgagagcaaaaataataagcatagataatacatttggatgatattatatctcatgcaaatcttgcttgagaaaagatgtacataaatatgatatttattggtatggcccttgcaaaaaataaatttgaatatcctattgtgaagtaagaaatttgtattcggttttctcaaaataataa

SEQ ID NO: 406971 - DNA, 1009 bp, Cannabis indica
atgtttttgtgaaataatcctaattttaaatgcttgtatctattttaaaagtgaaaaacggtagttgttcaaaaaaaaaaaagtaaaaacgaaagaattgtaattaaaatgagagtattatttttggaattaaaatgctaaaatcagggtcgattttaaaaatttgtggattttaggacaaaaaaatattattaggccctcacgaaaaaaatatgtgatatttttgaaaaacatcaaaaactatttaaatttttacatgaaaaatacaaattgataccgtatttataaaaatacttttataaggtgtggacaatatttatacattttatgtgattttaattaccaaagggaaatttgaaaaaatatgcataaaataccttaaatttttttcctaatctaatacattttaaaatttaaaaaatatgaccactttacaataaactcaaaaaaaacccctctcattttcaatcctcaactctctcttttcctctatctctctcggttgttctctcaccctcaccaaatcaccaaaccatcaccaccgagcacaaaatcaccacctacccagaccactgaccaccgaccaccgaccaccgaccaccgaccaccgtgagacgcaactccaaccctctttttttgtcagatgtgatttgggcaaaatctgagtttggggtttgatttcttcgggtccgatgcagcccgatgccggtccgatggtaacacaaaaaaattgaggaagaaaaaggcccgataaagggcccgatggtgggcccgatgcatgtgtaaaaaaatagaatttgatatggcccgatgggcccgataaatagaatttgatatggctcgatgggcccgatagtgggcccgatggtcgacagtgtagtgaaataaagagaggggggtaatgtaaatggggggggcattttagggatattataaaatgtgtcatatcccacaaatatcaaatattatgagtttaggggaaaaaatttaagaatatgtaagcataaaa

SEQ ID NO: 406972 - DNA, 1140 bp, Cannabis indica
tagtttccaaagatggagtcgaggtggatcctacaaagatcgaagcggtcaagagctggccaacacctaagactgcaagtgaagtaagaagcttcttgggtctagctggttactatagacgcttcgttgaaggattttccaagatcgcaactcctctaaccaacttgactcgaaagacgcagaagtttgtctggtcagaaaagtgtgagggtagcttccaaacacttaaggacaaactaataacagcccctgtattatgtgttcccaataacaaggataagtttgtggtgtactgcgatgcatcaaaacaagggctgggatgcgtgctgatgcaaaatgacaaagtagtagcgtatgcctcaagacaacttaaggagtatgaacagaggtacccaacacacgatctggagttggcagcagtagtttttgcgctaaaaatatggaggcactatctctacggggagaaatgtgaaatttataccgaccacaagagcctgaagtacttctttacgcaaaaggaactcaacatgaggcagaggcgatggctagagcttgttaaggactatgattgtgaaatccactaccatccggggaaggccaacgtagtagcagacgcgctaagtagacgcagttatgccagcttggcaatactggcacaaatggaaaggccactacaacaagaactccaaagaagtggtatagagatcattacacaaaaactagctaacctaaccattgtctcaacgctgctacaagaacttaaagatgcacagattgttgatgagttcttacagaagaaaagagcaggcttgccagagaaggaggcagaggatttctccgaaggtacagacagcatgctgaggtataagggaagagtgtgtgtagccaacgacatagagcttaaaagaaagatcatgatggaagcacacactacaccctactcaatgcatccagggtcaaccaaaatgtacaatgacttaaaaaccttgtattggtggccagggatgaagaaggatgtagctgaatttgtagctagatgcctcacatgtcaacaagttaaggctgaacatcagagaccagcagggatgttgcaacccctggaaatcccagaatggaagtgggaagatatagccatggatt

SEQ ID NO: 406973 - DNA, 527 bp, Cannabis indica
tatggacactttgagtttttggtgatgacgtttggttaacgaatgcacctgctacatttatggatctcattgaattagaatatttagacctttcttggataagtttgtggtggtattcattgatgatagtcttggtgtatttttaggacacgtgaggatcatgctgaacacttgacaatatagtattacagacattgagagatcatcgattatatgctaagaacgagaagtgtgacttctggatgacagaagtcaagttcttgagccatgtaatttctaaagttgtgttataggcataaatctaccctccccgcgagaaagacttgtctatagagaactcgctgtattgaaggtggctcgcaatattatagtactcgcagtaccgaaagaaaggatctcgcaatattaacttaaagagatctcgctatattaagaaaggcacacctcgcatatttgatgaagtcgcagtatcaatagggaaagacgcaaatacatataccaatcaacgaaagtcaacagtcaaacat

SEQ ID NO: 406974 - DNA, 604 bp, Cannabis indica
aactcagggaggaaaccacaaacgcgagcccctaaaaatagggcccagcgcccaggttgacttggtgctgggcctagcacctaggttgataatgaacctggaatgctgccttcaattgctcaaatgccaaatctgatgcgaccattgaatatagaatggtcaaaaataggagaggggacctcatcctcaagtttaaaagcattggaagtatcaaaaacaagatcctaggagcttggaagtaagtacccagcgcccaagttaacaaaaggcctggtgcgctgcgttctgcttatccaattctgatgctatttcaactgtctatctagtttttcacaataacaaagatctatgaagtcaaggaagtcaaattcataactttgcatttctcatttccagctcactcagaaatgaagagttttgagtctctaatttttgcaaaatagtaacatctatgagaactggtgaccaacttttccaataaactgactaagtgatgtcaaaatatcacttaggcatcttaaagtacattccttggatgtttttactgtagcgccctaatctatagggacgccacgtgagtgattttataaactagtttaatact

SEQ ID NO: 406975 - DNA, 622 bp, Cannabis indica
atgatgatttttaaatttttttaattattttttataataatactaaattaaaactaactaattaatagaaattaattatcaatggcttatagtattctaaaacatggcttatggtattctaaaataaaaactatttatatatgataattacaatattttaatatatgtattaactatttgaattctaccattaaaaataaaaactatttgtattctttgtatttatttatgagacttttcatctcttcaccattcttgccatactatatatatgtatatcctactattgttcaataacatgaaaaaaaaaaaaaaaaaaaaaaaaaaaaaaaacctaaaaaactatcacatgtataccataacaatatatattttagagtttgtaatttttttttttttaaaaaaaaaaaattatcctatggaattaggaacagcgtcaaattattggtatgcttatgattaataaggtatgtattttttattttctattagtatttttaaatatgtcatatttttaattattaatattttttattaataaggtatggatttttaattttcttactaactataatctatacctatgtacatctattacaatatatttatatttttatatata

SEQ ID NO: 406976 - DNA, 797 bp, Cannabis indica
gaaagagaagatgatgagatagatgattttaaactaaaaacttttcaagaaatacatagaaaaaagataaagtgaacaaaaagtaactttttaccaaaattctaccaaaaggtaattaccttttttaaaaaccttcaaatgaactaacaaatcgaaaagagtaatcaatccaagaaatgtgaaggttttagacatatagaatctgaatgtgcaaatacattagaaaaataataaaaaaaaaaaagtttcaatgtcacatggagtgacgataaaactgatagtgatgaagatatttctaataatgttgcaccaacctcaatttcttctaagtttgtttgtgactcacgagtgaaagaaagatcattgtgcttgaataattccattaaggaggaatatgattccgataaatctgaaatctgtaaggagtccttgattgagtcttatgtatgaaaagtggataaatagaacattataaacaattgtctcatcaaactgaatctcttgaattgaaaattaaataatatgagactgatttttgtttaaaaagtgaaaaaattattttattaaagaaagaacttgaaaatttcaagaaaaatgctcaaatatgcttaaccctgaatcttctatttttgaggaaattcacaatgcatgtcaaagaggcttcgctatttttggatcaaatggtactaaaagttctgaaaaaataaaatttgtaaaatgtagtgttccagcaatttatctctgctagtctcatattttcatatctttttttgtgagaagagtgtttcatttgtaaa

SEQ ID NO: 406977 - DNA, 857 bp, Cannabis indica
tattttaataatttttattttatttaaaattaatatctttaattatactaagtttttataacttttttctttaaattcatattcttaaaaaatatacctatcaaacaaaatgaaattatattttaaatattatggcacaaaattaaaataaaaaattatatgaaattttcttagaaaaaaaaaataaaaaatatacatgagttagaaaaaattataaaaatgaaatcaaaataagtattgaaattaacataaaataatgtgaagaaaaagttttcaaaaaatattaagagtactttttaaaaattatttaagtttatatttttttttaaatcatgggtgtacttataagtttatggggtgtaaatagaactctccttcttggaaaggacgcctcctttgattctggtagttgtatggttttgaagatcattatgaatcgcctattcatattctgcacgattcccagcccgttagatttctcaatctttggctttcctgtcactgaactttatgtataaaagggcggcgaggagcattgtcatttttcacaaatcttctagctctttagtgaaatccattttcagaaatggattacttccttcctgccaaaatatttcttctgagtttagaagtttatcctttcagactaataatacccatatgcaccaaccattttccatttgttccaacagacttcaagcctcaaccggagccggaaacgatggattccagggttgtggagcttctgaccaatccaaaccaggggaaccccgtagcctgccacggccgatcatcacaagtgatcccagagggtatagatcttgtgagcaatctcaaagatcctcctcaggctgatg

SEQ ID NO: 406978 - DNA, 942 bp, Cannabis indica
aaaaatcgaaactgtaatttttcagaactcaagctatccatgatggacatatatattacgaactcgagattctaaattttttctaaacttttttttatttttttatttttttaattttacaaaatggtaattgtgcttacaaactttgtaagataactaaagtacactaacaaataataataaattaaaaaaagaagtaatttatgtatagttagtatttttttttttgctttctattctcatattttcttaataaattaatgaattatttaatttatcaatatattcttctagaacacgaaatatattagaaattacataaaacattcccatttaatctcaacaaattcgttaattaaaaaaatcaataatatataataaataaataaggaaattaatattgtatctaaaacaataataatgaagaaaagaaaaataaaacaagctgaagtacgtaacacaatataattgcccaagttaattcgtatttgttatttaaaaaattaaaattaaaaaaaaagtatctaataacaaataataaaaaatttcgtatgatatttaaatttaaaataaagtatttattatatccttataatatttattttgaaataatattataaaaataaaaatctaaaaatgcatctataaatagaaaaagatagaattattttttcatttaatctgcagctaataaactctctaattaatacacattttcccctttgctcatcaaattacgtatttcaatatctcttggagttcatatatataaatatactagcaaaaactacgtgtgaggcacgtatactaaattttatacttttttttatgttatttgaaagtgatataattaaaaattgaagaaaaaatattattagttattaagtgagattattattatgtgtgtaggaagaaatcacaaattaattaatcttataatct

SEQ ID NO: 406979 - DNA, 889 bp, Cannabis indica
ccaagggctctttaaaaaaaacttcttaataggcaaaatttgcttctattttctcctttcctttcacaaatgcttgataaaggtcaacaaggtattttttcatatgataggtacgtgccaagtgttcttttattccacatctgaaacataagttttcagaaattttataattattattttgagtaccttttcctttgttcttagtagttgtgcttttcattagagaatacaaatttttattctggccattacgatgccaaacattgcttcaactacgaccgcgatcgtgaccacaattttgattatgatcacaaccacgtctattactttgattgtgatcacaaccacgactatgattatgattataaaaaattatagtattcacttcatggaatggggcaaatacagttgggcgagattcataatttttttatatcaaaagttcattattctatttagctactagaagacatgataacaaaatatttttaaaaaaatttcttctctatattgctgttgcaggagcacattagtggcatgataagtagtatatgttttttctaacatttcatagtcagtaattttttctccacacaacattaatttagaagtgattttaaacattgcagagttataattacttactgacttaaaatcttgcaaactcaggtgcaactaattattcttagccattggcaatatgaccgttttctgatggtcatatctttctttcaaagtttttcaaagtacaagatgatcttttacggttaaatatttagattttaacccctcatggagatgacggcgaaggaaaatcatagccttggccttattttgttttgtttcagtattttgatctttgatggtttctccaagatccattgcatct

SEQ ID NO: 406980 - DNA, 582 bp, Cannabis indica
aggagttattttgtgttatttgttattattcattatgttacaaaactggttatatttcaattataaccggtttgagttattttgcgttatttattattattcattatgttatagaactaattctatttttatttatatctcagacatctatttctggtgactttttcggtgataattttttcgctgacaataacttttccaacgacttttccaataccagcgacttttctgataactttttcgacgctagtgacttacccgacgaaacttattattacaacttttatcaaatttatttatttttttccacaaattttaaactttaattatttttttatcccatattttttttttacattatttatttatgcaatataaaagtaaacactattatatttttccatatttatgaaaaatcccctaaaagaattagtaactagattactttagtaggaaaatagcgaattggagactaggggtgtccaaaaaaattaacaaaccgcccaacccgaataaatcgcccaaaccaaaccgaataaatcgacaaaaaatacaacttgaataattttacgaaaaactcaa

SEQ ID NO: 406981 - DNA, 542 bp, Cannabis indica
accaagtgtaaaaggagagagtgagatacacatatgaataggataggagagtgagactcacacgcgagtggggagagtaaagttttttactgacgcgcgtcagaactacaacatcagaatgtggcagtgactctgcggctgccacatggcagtttggacgaagtgagcttgggcgtgtagggttttcttttctcaatgcaacagttatgcgaaaacaactaattaacaacacaaaaacaacttaacaacaatcaaacttcaaaagaaatttattaaatattaacatattacattaacacaattaaaatttataaataagacaacaacacctacaagaactactaattgaacatataaaaaatatttacaaatttaatgcaataaatataaaaaaaaaattgaaaacacataaactaaaaaaatataaaaattacactaaaataataattttttttaaaaataaaagtggttaataaaaaaataatagctcaattagaaatcaagtagacaacaatattaaatatttatatatataatttaaa

SEQ ID NO: 406982 - DNA, 666 bp, Cannabis indica
ctctttgtatcagtacggtggccagtcttgttcagtcgtcgatggctgcttgttgagccttcaacatttccatctctctatccctccattcagtgaactgacgcctttgctcttcgaacgcaaggttcactgcagcacggagcttttcttgatcatgatgcaaggtattagtatgaccttgcatgagcccaagagcattacagaggttctatatctcagtgtcatctccaatggttttctggacatttgttgctgaagggatcccaatgctgggagtacccagttcggctgctaaactggtgtttccagtctcttgcacaccgagtgtgattctagctaaaggagatgtcacaacttgacccacggtaggtggttgttcaggattggtggctggtgggacccttgcattccctggagtctgcagtgcgggatctgtcgccagtggatccacctaatcgaccatgcttctgcgagtttgtaccaccatagtgtttctaatcaatcttaaagcaaagagcaaacttggattgttgctctcaatgaaggcaccaaaatgttgacctcgcttttagccaacgacaatgagtcaaataataagcgataagaaaatataatcaaagtgaagtatgaacgaataaataagaaagaacacaaggttttaaagag

SEQ ID NO: 406983 - DNA, 512 bp, Cannabis indica
tatatttttttaattattttttagagtttattaaaaagatattaaatatatataataatattataaaattaataaataatattctaattgggatattgttaacgtagaaaccaaaatattctgttaaactaagaattaattatatagctacattttatatagaatagatattgtattattgtattaattattttatttttaacaagaatatttcttttttatatgtataattaatgtattaatattattaagatgatataactgtaataacatgtaataacataataatactatgtttaactattagatacaaatgaatcattttaaaaatatgacatttgttagagataatacacaagaaagtttccttcttttattaattcctaataggaaacgaattacatattatatttaacactgctagggctcgtttggaacgccgtattaagtcgtattgtattgtattgtattatattgaattgaattatatatcatatttttatataatacta

SEQ ID NO: 406984 - DNA, 503 bp, Cannabis indica
aagttgtaattagtttagtaatcgaatataatataagttaataaatacatgcatgttatataaatgatataattaattaaaatttatttgaaataatatattcattttaatttgcaaatataattatcattgatttgttttgccgcatagtagataaataaatatattttattttgttggaaaatttggacattttctccgtaaggttgttggtagaatatgttagagattttataacaatggaagaaaattaagatttattacaactctattgtaaaataatacaaggatcaacaaagagattaaataaatgttacaatacataatatacaatatatatacactacatatattatatataagaaatgtagaagaagatatatagattacacaatattatataacatatatataatatgaagaagaaaagatcactcactcacaaccttgagtgtagaatagtggagatcaccaagacttgaacaaggtattacacctttgtc

SEQ ID NO: 406985 - DNA, 774 bp, Cannabis indica
gtatactaaaaatccaatacatccaacataccaattaaactaattagtattttcagttttagttaggacaagtaattagtatttataatgttatacgtaaatatatatagtatacacaaaaatttaacattaaatttactcttttttcttagattgcatggatccaatctaatccagtacatattggacctaaatattggatagatccgatccgatccaaaaaatactagtctaaaatattgaataatttctaacatccaataaatatatgaaataatatatatgaaatatatccaatggatagaaccgatccaatccaacatccaatggatgttggatcgattggatgactgaaatcaattggatctagattggatggtaaaatctaacatccaatatataattggatcggatctggatggacctaaaacattggatgtgatccaatgaacacccctatatatgtaatacaaataccaataagaaaagattatttggtagtagttaattcaaacttttagatattaattaataagtttttttgttctggataacaattagtagttaaactataaatataaggtttaagatttttgccccctgaactttgacatataccaaatcatgccccttgaacttttaagatcgttaaaaatgctccctgaactattgagattgttggatttaaggtactttttttccaattttagtaaaaaagtttaacatggatgaaagtttagaggaaaaaatttaatacatgtcaaagttcgaggg

SEQ ID NO: 406986 - DNA, 575 bp, Cannabis indica
gccttgattgctgaggagactgacaacatgtagcaaaagagcaggtcgcaaaggatgtcgtcacgacatcaaatccgcttgctagtggtaatgtcagtaagcggaccgacagtggcaaccctgatcacaaacgaaaggctgaggcttccggagcatcagggggtaatagaaagttctgggaagacaaaggtggccatcatggccgcgggtcttcattccgatcatatcccgagtgtcccaaatgcaagaaacaccatccgggtgagtgtcgggccaagacatgttttcagtgtggtatggtgggccacttttatcagagattgtcctcaggccaagaaagaggaacccaagaagaatactactcagaacccggggcaactttttactatgactcaggctgacgctgatgctagtccgtcagtagtgacaggtcagttgtctattaatggttgttcttatactgtgttatttgattcgggagctatccactcttatgtgtcgagtagagttatagaaagtttccataagccatgtgatatttatgctttggggttggtaccctgttaccctcgaga

SEQ ID NO: 406987 - DNA, 584 bp, Cannabis indica
tcacaatgccaaatagataaagatgttagttcctcaagagatttcccatttgacactgagatagcttcaaagtagtggctggattgaatataaagagttttgagattaggaataaatccatatcgagagatctaaacgatgatccacagtcttctaacctaagagactgaagaggaggataatggtagagtggagtgagagtggtaggaaaatttctaccactagaagttgaagaaggttttgatggatttattgcttcatacaatgactccggatgctccaagtgacaaattctcatttttgtgacacatggtaatattgggagacttaataatccacactcattgcctctaataatttcaatacttattaacgaagaaagaaagcgaggcaaatctccaacgagcttaggacaacaattaatctcaagtgttttcagcttaccatatattgctgcctgttcagtttgcattgaatgccattgctcccatgatgacatctccctgaagcttaatgtttccaatgatgaaaatggctctctccagaacattcccgtaaaactcagcacccaccatcactaccga

SEQ ID NO: 406988 - DNA, 789 bp, Cannabis indica
aatatggtttagaaagtaataaaaatgttgactacgaataaaaaaagtaacataaacttattttaaataagacaaatatatattgtacttaaaacagagttttagtaatgtaattaattttgcatggttaagatactatttagtttctttaaataatgaaatgtatatgagataatattatcgcaaagtaacacttagttaaagaaaaactaattagtatcttagcgttttactttttaattacatatagtaacttttaaatataaaataaataaaaagattattatgaaatatttaattttgtttgagtttaaaattgagttaattgttttactttaaaaaaataatctaaaataaagtaaaagaaattaaaaaataactttttattccaagtatcttatattgtaagagtagaaaaaatatatgtttattacgtattaaaataattaaataggttgagtaggtaccaatcttgagtcaaattagttaatgatgaagctaaaattcttctattaaaattataagagagaaagttagacatagatgtaaacaaaaattaataataaaaaataaaaaaaaaaaaaaacaaacaaaagctgccatgcaaatgcagtaaagaaagagaaggggaaaaaagtgataaactaggacttaagaaaatgacaagaaaagaggtgatattaatttgtacagtacggtataagattgattaaaatagctgacaacaattgtgtaattatttttacaatttacgtatattattgaaaaactccctaaattatatgatgt

SEQ ID NO: 406989 - DNA, 659 bp, Cannabis indica
gttaatttttttttaaaagaataattgttaattaattaactcaaattttataatattatattacttttatgtgtaataggcaaaaaggagagatgaaatattatgtttcagttcaaaattgatggagacaaattttgtattaaatttcattgatggtgatttcctaacgtttttataaataattaatgatatatataaatattctcacctcaaacaaagtgaataagataataattaaattttgtatttacatctttaagaattgtctacttacgtaagtttcacgaaatcacaaagtgtcttcatgagcttatttaattgttaatagttattattatttgtcctttttaatggtataaattaataatactattattttttaaaaaataataattgattaaattattacattcgatgatatatttactgcaaaaacattaatcacaacttcacaaccatttatgtacttttttttaacaggggaaaaccatttatatatgtacttgaacaattaaatttaataaaataatttcctactaataaaaaaacataattatcatggtgataataataagtgtaaatacgaacagattggacctgtgttttgttaaatgataaaatggaccctgtattttctaaaatagtaaaaataggaccct

SEQ ID NO: 406990 - DNA, 803 bp, Cannabis indica
aacactgatgcttgccacgtgtttcacaattagaactaataagtaaaagaacacaacaatttttatagaggtttgacctctttagttagtgggtaatgacctattgcccccgtttagttttattgataccgagagataatactattcaaatcactataggtgggatctgatatacctttctttgaggttacaaagtatgaatcagtaggtagatctctaaagatagagagatgaatccttggatgcgtgtgagagagaaaggtggagaaccctttgggcgtgcataagagatacagagatagagagagaacgagggttttaaacttagaactttatggcctaaatgaatcctagagtgacttagcctttctagaattgagtaaaggctctttatataggagagcataaaccctaagtagcagataaaagaattgatatttacatattaaattaataaatacaaatgatcaaatttccccttaaaagtagatatttcgtagcatcttagcgggctgtcaacgcccaactcatagcttggcttactgtccacagatgaaggttgtgcatcaatgtactaccagggagaagctggtcgtccatacacctacaggatgatgtctagccggcacatggtcctaccaggatccggcaggtcgtgttcctgctagggtctggtaggtcatgttcctgcctgggtttgggaggttatgttcttgtcagctttactaaaaggaggccagccttaggatgtggaggccagctttgtaaatctttctttgcagaggtcaggttcccttagtcga

SEQ ID NO: 406991 - DNA, 971 bp, Cannabis indica
cttacttatttacttttcttaccaattagttagtttttgtttttttttttttttttttttggtgttttgttgtatagcccttgaaaatgaagaaatgaacattaagagatctgactttcccaatgattttgcatttggagttgctacttctgctggacaggtatttgagacaataaatatttacataaaataagtggataatgaaaatataatccaaaattgttttctttgaaaatgattaaacaaagttaatatttacattttatttttattgtgataattgcagatagaaggatcagcaaataaaggtggaagaacaccaagtgtttgggacacctatgctgcaatcccaggtaacacaaccttttaaattctaaatttaaaatgatatatctattatttttttttgatttaagcgtttatatattacatcagcataacttgggactcgaacccaggacctccaatacacacgcaccccctatggccacttgagctagcctcaagtggttaaatgatatatctattattgagtcataattttaatttctcttaaatgtgtaggtaacattgaagatagaagtaacccttctacagctatagattcttataatagatacaaggtttgaacaaaaattgaaataataaatcaggccattttattttattttattttagtagtattaatgttatttttttcttttttacaggaagatatagagtacattaaagagcttggaactaattactatcggttttccatctcatggacccggattttgcctagtaagttgcacaaattaaatacaaaaatacaatattaaaaattgtagggtaaataccattttggatcttattttacagaagttaccaattgacattttgttgttaaataacaaaatcaaccctatattttccaaaatgataaaaataggactctaagcttaatttttaataattctattttttaa

SEQ ID NO: 406992 - DNA, 676 bp, Cannabis indica
tttatataataaaaaaataatacataaataaaacaaaaataaactatatgtaccaattaacctttaattaattgctatatatagctactattccacaagtgcggacccaaaatatatgtatcattacattagaaatttaatgtataggaacatcacctttcctccaatatagtaggatttttttgtttttactgataatataacttaaatttttccatatatatgatgtattttataatggtaaaactttaaataatttatgatctggtttccttttttgaacaatctggtttgaatatattgtacatgggaatattttaatacggagatgattggtgatggatgtaaaccaatctaattctgacacatgcaattgattgagtattttaatttataagaaaaaaaaaagtggcatagatggttaatagtctaaaagaattagatttttaataatataaatttagttatttgagtttttggatagaacaccattattaaccaagaattttaatggcgtttggttggaggtaatgaaatggaatagaaaggaaaggaaaaaatcttaattccattcttctatttagttctatattaaaatgttggaatgtcatttgatcaatggaatgacctttgatcattttggtggaatgactattccattttaaaatgaaaagaa

SEQ ID NO: 406993 - DNA, 769 bp, Cannabis indica
gattagaatgggaacaaagggttagattgcgatgacgagaagaacagagagaaaaagagagattcgagatttcggaatgaagaaggaggagggtctcgggccttgggctttgactctttagttttgctgatgatgacgacgacgacgatggctctgttctttctagtgtggaatgtgtattaagttagcgttattgggctacaatttgggtaccttttcttcttcccaacatctaattttcttcactccaactattttttaatttttcttataaaaaaaaactatttttattaattttttattttatattttaacatataataattgatcatttatactattagatctgatttaagatttatatactaatgttttgaattttattgtcctaattatatcaatgtatttcatctcaaaaaaaaaaaaatctataaagtattaaaatattttgagttttaataggtagaattaaagtatgaagagttaaaaataatttaaaaataaatattttgaagcttttggtatgaagagctaaaaataatttaattaattaaagtattaaaatagaaaatataattatttataaagttataactatgttttcttatacgtcaaaatatttaattagattattattaattgaattacgacagatttagaaatttttgttagttggtgcaaaattttaaatacaattatataatttctattaatatattgaacatttaatgcagtgaaagagttctatttatctcttcttaaggttaat

SEQ ID NO: 406994 - DNA, 561 bp, Cannabis indica
gtacaaacttgagcatacattagactcccaacagccgaagcgtaggaaatcttttacatttcttgaatttcaagcttcccttaaggcaatggttaaaaaaaaatttgtctcctttaacgacaggggtatcacctggtctacaatcttgcatgccaaaccgtttgagtactttatcgatatagctcttttgtgataatccaagaataccccgagaacggtctcgatgtatttgaattcctaaaacaaaagaggcgtcaccaagatctttcatctcaaaatgcttcgatagaaatctcttggtttcgtgcaataagcctatatcattagtggcaagcaatatgtcatcgacatatagaaccagaaatatacacttactcccactaaacttatgatacacacaatcatcaacaacattcatctcaaaaccaaataagagaaccacttgatgaaatttgtggtaccattgacgggaagcttgcttgagtccatagatggattttttttaatttgcaaaccatattctttgggtcaccacacacaaagttttctggttgctccata

SEQ ID NO: 406995 - DNA, 616 bp, Cannabis indica
  modified_base (72)..(72): a, c, t, g, unknown or other
gattaaaaatatattttaaattgatattagtgtatgaaaatggaaaaaaatcgaaaattgggtgaaaaaacncccaaaaaatcgattttgggttgaaaaaccatggtgtcgagaacagccattccgcgcgcgaagggagcttactctagggtgatgcaccgacaaatctcggtaggtgcaacctccgtgtgcgtgccatcgtgtctgaacacgggtgtgatcgagggattcagacaaaatttgtttgatgcatgcgcgcgcatcctcgtcttgcccaagggtctgtgcgtgcgacgtgcagccctcgacacaccttggacccaattttttaaatggccataactctctcattttttatcagaatcgagttctgtaaaaaacaaaattgctcaatttttcacaaggaatccaaataaattatttttatagaaaaaatttcgtagatcacatacattcattaaataacacataaaccaacatgaacacatccaaatcaacatatttaacatattcatcgttttaaatccatattacatgaaagtaaactgttaccatggcttcgaggccagttgttgggaatattttacaaggatctacatttactaacaagtatgtt

SEQ ID NO: 406996 - DNA, 622 bp, Cannabis indica
gttgaaccgtcttattagatccctggcctctcaattacgatgatctaactttacttggtgagatcgaaggatgtactcccggtcatccatccatcttaggaattcgcatctctgctgagcaaaaacatcacaatcagtagtgcatggttcttcagtaggtctgcacggcctatagcttccctaagtctagacaacttaaggtcttctcctaagtctaggcgaggctcgccaatcacaggctcaccaactcctaagcttgtctctccaacgtagaatcggagtcgagatccagttgttgttccaatgggctatcgcccctgggtccttccttcaataagaggcgccaatcatgggtctactcttggtgggatgggcctgccacttggatccattagggtgctcgtatcagtttagccagctgttgtggccaggcttatggctcctgttatggtgataggattcaccacatctgtagtgttcatggggattttgttagcccaagatatgtttccaagaggggggtgaattggaaatttatactaatttcggtaaatcaaaacttttaacacaaaattaagcaattagccacttaatcaaataaaagcaagtaatatggcaagca

SEQ ID NO: 406997 - DNA, 505 bp, Cannabis indica
aatgttgtttaaactttaaattaagtttttgtttcttcaattcaagatgtttatttgttttttgttttggtttatttatttatttttgaataattggttttgggttaattaagtaatgctatgtggtaactatgaatggtatcattaattaggtgaggatgatataatttgtggtactattaattagttgatgatgatgtagtttgatatatatatcgaagtgatgtagttttaatatcaaaatactacacatctatttagtagtaccattttgaactctgtattttataaaagttattaattgaatcttctgttttgttaaatgacaaaatggacactgtattttctaaaatgatacaaataggatcctgaattgattttttgtcaaaataaaatttaatcataatccgatctaaaagtgttatgacaaaattgtttacattttctatatttgttcgtattaggaattgttttcaagttgattatattaaaaaaaaagttgtca

SEQ ID NO: 406998 - DNA, 711 bp, Cannabis indica
aaactatttacattttttatattattttagatgattataagataataataaaattagtgataaatggttttttttttttttggtatttcaatagaagtattaattgaacataaattttcatgaatcgaattttataattgtgtatttgagtacaatactaaaaattaatataaatatatcacaaactaaatatttgtataaaatataatacaatttttatatttctcattggagacgatctgagcattttgttaaccatatgcgataaaatctgacataatttatttatatttaacaataggaatagttcaaagataatctttaaaaaaaaaaaaaaacgatacaatttaatagtggtcctaaaaaaatctttaataaacacttattttctcttcttaaaagaaaataccgcaaataaataaaaaaatggaaagaatgtatattacaaagagtagaaaattgaaaaatattaaattattttttttaatgtgaaattataaaaattaattataatatataatttttagtaaattatataggtaataaagttacggttaagtttgactaaaaaaacactaaatatttatttttgtatactattattcttacaagggaaatttgcggcaaaagtcccaaaaaagttcacgttgatgcaaattagtccccaacttccaaaaactaagcagcaatagtcctcaaggtcacactttt

SEQ ID NO: 406999 - DNA, 507 bp, Cannabis indica
ctatgttgcattttctgtcgccaatcagggggagctccttgataaacttctaattttcttagggagagcatttggtttaggacaatgaaggattatactcaatggagggggagaaatacttattatttgggtaaagtggtgcgtttgttgtttggttatttaaagtgtttgtttttctgttggtttaaactctgttatattttgatggttgcactttgttttgcactggtattattgtcattgaccatattttgtcaagggggagattgtaagaacgattattttctgtagtgacaaattatgtccagttgcattccagttgcgtttgggactcgtagtgttttgtctggagttcgtactctgttagtgttagtccacgtcagcaaatatattttggattttaattgtttagatggtaatagctaggggtgtacatcaaaccgctcaaaccgcctgcatcgcaaaaaaaaatgcggtttgaaattcttcgcggtgcggttgcggttt

SEQ ID NO: 407000 - DNA, 835 bp, Cannabis indica
ctgaagtctctgggagagctgcatcaagctgatttgcaaacgatagccaacttaactgttgaagtaaaggggcttcgtgacttaagggagcaggctcagaaggatgcggctaaggcgaagagagatgccctcctggccccaatcacttgccaacactgcaagaagcgttttgacgatggagtcttcttggcttggtagaccagtggccaaaatcttaacctcaaattttaccccaaacctgaagaggtccttgttcgcttttggaagaagaagaaaaggctagatgcagtgctggaggagcacaggggccctcgtcttccacctcgggctgattgaaccattcgtctaccaccactattatcattatcctctctctttttttttgttacatattcaatccttcccctctttaagacaatttatttttttctttaagaagggacatttatggccttatgtttcaatatatatagattttcactttgttaaatttggtctatttatatttttccgtgtgatatgccttactaccccctgagtgacatgaaaatcaatttttaagtcacttaggcttacaaaataaattagaggttgcatatattcgtccggtacaaatttactttacagaacataaactttatttttcgactattggtaatacttttggaggtgatcggtattccaggccctaggcaccaaggttccgtccattctttttagcttgtaggtcccggagccgatttcatcctcaattttatatggtccttcccaattttgcccaagtacccccactccgggttcctgactggctgggaagacccttcttaagactaga

SEQ ID NO: 407001 - DNA, 1221 bp, Cannabis indica
caaattttgtaactttgttgctcataatgtagctaaatgggctttcagctataatgtgactggtatggtagttagtttaatttataatgaccacgagttctaacttctttgacacttaatataattaacgcaagtaattacaaaaaaaaaaaaaagaagtgggagttgtatgtaaccaaaccaccatattaataaaaaacaataaaaaaaaaataaaaatattacttattagagataacaataacattagcatctacaaaaatatgtatatatatttaaggaatcgatctgtaaatatatttatatatatagtaggtattaataatgtgcaattgtgtataataaaaattaaatcagatacaattcaattatatttttaaatatattaaatttaatctaattcttttataaaaaaatatatctaactaattttattaaacaataaatatatatttttttgaatcaaataaatttattataaaatgtgattaattaattaaaatttaaattaaggtttatatataaaaaaactgttattttttatacttttaaataattatttatgttatattttaatacataaattaaatttaaatatttaaaattattttttaaaaaatttaattaattaattaatttaaccgtgttagttttaacggttaatttaataaaaaaatattgttaaattaataatttttttatatagctctatttaacaaaagatatatatatatataattgttatgtattttaaaactttatgaattttaaaagtcaaaaacctaattaaaattttaaaaaatatttatggtaagaataactaatttaataaaatttaattatgattctaaatataaattatccaataataaatgaaaattttaaaatcttttaaatatatttatttatagaaataataaataatttaataaaatttaattgtgattctagaaaattaatttttaaatctaacatttattaagataaaatattttttaatcgtattttttattcttgaacaaagtttcaaaacactttgtactatataagtttcttgtgggttatagatacccacccaaatggcatggatctgattcatgtgcaacaaaagaagttatcatcataacataattatatatatatatatatatatatatatatgatataacttgggtggaataataagttatcttaaaatactaatgtaattttgcaattatc

SEQ ID NO: 407002 - DNA, 517 bp, Cannabis indica
attttattttcatgattgtgtaccgttttaattatgaaaaatcacttataaattttaaaaaaatttcaaatcacaatgccaaaagtaaagtttaaatttgttttacttataactatattttcttatgtgtcttattttttacattatatattatttagaatttttcaaaaatttacttgtggtcttaaataaattaacacgacatacatgattgtgaaataaaataaattaaaaaaaaatatctttgtaattatagtagaaattattgaataaaaattctaatttctattaaaagaatatttaattgattaatttttaatttaataaattacaaatatttaattatatatctcaatataagaaaacaatactattcatcacaattatattttcatcattatatatttatttaatcaagcattaaatgataatattaattggtaaataagtatagtacatataatatgtataaatatatatatatatactaggtgattgttacgtgccaagccacgta

SEQ ID NO: 407003 - DNA, 597 bp, Cannabis indica
cctgatgtatgaaagttgttgacaatacaatcaaggacattttgtattcaaaagatcagtcttcttgtggaaaaaataataatatgaaaatagtttgtttgatgattctatcaaacaccaaaaacccaaagtgtattcggaaggagagttctattgtattgtctccttttataactgattttggatcatctgattcaggcaaagacagcttgatgaatattttgattggagataaattgatagttgatgggcttaatccttttaaaaatgagattggagataataacactagtgagcagtgtttgaagttcattcaatggttagagcataatataaatatgaaaagataatctaagttttttattttgtgttttgtgtatatatgtgtttttgttagctttttaattttttctttatttttttatatgtagcactaagaagaaatactcagacattgataataagattgattcccctatggacttcaattttattcaaattgatgagaaaatgtgattttacacgctccatacttgtgggaagttccttttagattctgtaagtttttttttttaattgttgtcttatacattatat

SEQ ID NO: 407004 - DNA, 832 bp, Cannabis indica
tctagttttttattttcggtagtttacaataataaaaagaaaaaaaaaagtcccaaggtagtataaaagttatatttaccatgtggcagcatttttgtaaagattgggtcaaaatccagtattttataagttctccaattagatggataatttgccaaaaatatggagaagataaaagttccttttatatcgatgggtaacagaaaatatgatagctataaaaaaaatgaaaatcccacaaataactataaatggcgtaaatacttaaatttatcatctagttacagataaatacctaattaatttttttagcggtaaaaataccttctgtcaataatttgttgcaaatgggatatttcacgttaaagttttctgttagagtacctccaaattttggaggatgcttgcttatgtggaatgcttatttaataaaatacaaagatgctatacaattggagataaattggtgctatcatagaaaagtatgttgatgccactatatgaaattgatgctatctactttttttaaaaaaataaaaaattaaaagtaaataaatagtgtgacaatatttataagtaaaacaaataatatattagataataatttgtgacatcataattatagcattcttgaaaggtgttataccattagagtgtttttagaagtaagagtataaaaaataatattggtaaatggcggcaaaacccccccaatagttttattttacttgcaattaaccccaaaatccaaatttgggcagtaaaacccccaaaactacaatattgttagcaaattacaacttccagctaaatttagttgttaactgtcagg

SEQ ID NO: 407005 - DNA, 504 bp, Cannabis indica
ctctctctctctctctttcgattctcttggggagcagctaggattgtgctgttcactcttgattcaaggatagtgattgaaatcctcaagttttgatccaaggtaattcttccttctttattctcttagcttaagttaggttttatttgtgagtttaggttttaggttgctgtatgacttaagatgatttagttgggtattctgaaaatggtttgatgttgtttaaggttatttgaactgaaattataggttggtttgaggtttgggcaaagttagagtttatgaactcaaaactaactctctaatggtgaattgagaatttgtgtgaattgttgagttctattgcttgaaactggtttattatagtgcatacaggtattctggaagttattgcaaagtttgggattgaattgtgatgtggggatcggttttgaggtttccagctatgaaccggtcgaccggttctgggaagcctctagcaaccgatcgaccggttggtaccca

SEQ ID NO: 407006 - DNA, 715 bp, Cannabis indica
aaattttaattttaataataaataatttataaaaatgctaactaattattgggtactgttacgaaaattctgtttattacgcaagtgtacgtatcaagtagtatctcacgcaagtgaggtcgaaccacagggaattggattaagtactactaaactatacttatgattctatttggtaaaataataagtttgcaatttaaaagtaaataactcagaaaattaaagagaaaataaacgacgattaatcaagatgagagattagggaggtgaatcctgttgataagctacctatgttaatacctaattgctatccttatctcaatgtgaatgacagattataaattaacctaactcttttcagatcttttaggttctaaataatatgttctctaattaacttcttaattaaatcaacacaaaatcagcattaagcaataatctattagtcactgaggctatgtaaatactttcgttttacatcaaaacctagactatccaaattttagcattctcaattctcacttttcagatttcgaattgagatcattaaacatgtaaaaggtgatcaagcttgcacatggaattaaacacaaataaagatagtattcacacataagatgaaggaatggcaattatttattaactaggcataaacttaaacaacaatcatcatcctcccttattgggaaatttagttcataataactctaaaaac

SEQ ID NO: 407007 - DNA, 969 bp, Cannabis indica
cagcattgccatctccaaaagtagttccatattcagacttgatagcgaaccttcaaaacgggtctgttacaaaggttctgattgaagaggggtctcgccgtatatattacaatacaaacttgcagagtgaagaagcaggtactcaaaagtccaatggagaagcaatgccaataagtttgccaaatgaagatgaggccagtaaggttgagagtgatgttggtacaagatctgtcacaccacaaagtttcaatatattgaagaaatcctcaaaggctcgggcttcaatccctgagtggcagtatggcacaagaaaagtagaccatgatgaaaagtttcttcttagcttgatgcgagacaagggaactagttatagctcagcccctcaatcattattgatgtcaatgaggagtattttgataactgttctaactctatggattcctttgattcctttgatgtggctcctttatcggcaactttctgctgctaacagccctgccaaaaagaggcaacgtgataccgaggtagttggttttgatgatgttgaaggtgttgattctgctaaagtggagctcatggaggtaagcactaaacattttgtcatttgagcttacatccagtgttaaaatattttttcttgtcagtcatttcttatcatggtagttagatgattgattaactagataatgatatacctttttttcctataagaatgtggttccggataaataattatttttgacatataagcagttgatatggttaaagtcccttctataattatgggaaacgtgtcctggttcagccacaatgagtgttgtgtacccataactgtatgttgagtgcataccactgttgggtgctaattgttataagccttgtttgtctggggctattttgtaaccatgttttcctccgccacaagtgaggattctcaatacataacagggagggtcctgtctaagacaa

SEQ ID NO: 407008 - DNA, 995 bp, Cannabis indica
gtagtttttgtcccctataaatttaattttttattttagtttttttcattcccatattataattttgcccatataaatttataatttatatttttatcttcacatattttcatatttagtctcatatatctactctaatctctataaaatttatatttttctttatgataaaaaaaaatatttttataagtctaatttttatccttttttttttttttttttgccatcgtgtagttggctttgccactagatttaaactttgagatttcctctttaagaggagtatggaaccactagactatgcttatgagcactttaattaattatgtatagattattacttttattattattctcactatttttctaattttatactaatttaagggagcacgtcacgtgtccaaaaactagtatatatatataaaactgataagttttttttgtatatatatataatataataataataaaatattaataataatataatataataataataatattaataaaaattttattattagtagttatcttattatttcttagctactaataaatctttatttctagggtatttagccaacttcgagtatcctaaaatatcttagtatttctaaaatcaacttatcccaataatcccatcaatatttctaactaaaactgttgtcatatttttggcctctaatcgggtctctagggttgccgaagatgaaaatatttgtatttcacaaataactcatattatatccatgtatttcaaataaatctccgtaattaacaaattactcttatttatccacttatcagattttcagggtcaccggacctgaaaatatttttattccacatatagctcatattacattcatacatgctatataaatctccgtaatttataaagggaaatttgattttctatacttaaaaatgttcaaaaaatttttttgaaccaatacattttacactatgaaaaatatgactcttttttc

SEQ ID NO: 407009 - DNA, 553 bp, Cannabis indica
gtgtaaagattcttaataaattattactttgtttactaactacataagtgtatattaaatggatcattttataaatactcaaaaaatgatttttagcaaaagaaaaaaatgactaaaaattatatttttaccgatttataattttttgctatatttttacaatttttttaatgaaatacatcgtttagtttttgttatttttttaaataaaaaaaaaagagcaataatagtgtttatcgagtgagcaatgtttatttggagttcatttctataacgatgaacttatgaatgtttattggaccacattcaatgtttttaagtctatccagattcgatctaattatatattggatgttagatattaccatccaatctgatctaattaatttcagtcattcaatcgatccaacatcaattggatattagattggattggttctatccgttggatgtattttatatctacatttattagtttaatttgagtttattctatattttagacctaataatttttgaattagattggatccatccaatattttaggttcca

SEQ ID NO: 407010 - DNA, 567 bp, Cannabis indica
aatatgattcatgatatcataacacaaatcatagatagctactcatatttcttacaaatgactcaatacattttaatacctattcgtgaaatattatactccaatatatagaaaataataaatagtaatagttgagagagacttcgaagtttaatcgcaaattaaagcttcttgatagaaagagttaaattgtgaatttggacaaaagttaaaaaagaacttgttaataattaatttgttagagatcatgtgtccttcctctactgtagttttgtctcatttatattttcgaaaaggaaaatgctaaaaagtaatattattggtgtttagtatccaatttagtgtgatattcttattggtgtaattaaatattgactctcatataacttaagaaaattatttttaaagaatattactaagcaattgtaggacgccacctataaaaggtattagcaccaataatgtccaataacaatattatttccaaaaatagctaaggataagttgttacaactagcctggtagtggtaagtagtgagagtcaaaagatatattgagatttttttt

SEQ ID NO: 407011 - DNA, 896 bp, Cannabis indica
ttttatcctaattctatcgaaatttcggcagcataacgactgtaattggacattcccaaaaattttaaagaatgtcaaaattaataaagcaaaactaaaaaaaaaaataatacaaaacaaataaaataatattaacaatacaaaaattattcacccatccggtcccagtacatgtattcgcagaacctacttcactacggttgaatatttaagatattaaaactcaactaacatgcatattattatacccatctgactgcagtacaatatatcgcagaacctacttcactacaaatgaataattaagatatttaaactccacaaaacattgataattaattaataacaaaagttagtgaatgtatatacttgtagctagctaaaatatgatcaacactaaattctttagaaccttgaaaattagctcacaacctacaatataataaaatacaacaaaattaaaattttaattatttaactacttacgagttatatcatttatgagtaactaactagttactaatgagtaactagttagtaataaaaataaatgaatatgaatgaaaaaaaaaaaaacaactagttactagttagtaaaaaaatataaaaacacataaataaaaataaaattcaataagtaaattaaaaataataaaagaactattatttctcatctattcttaaaaaattacatatacatttataataaattatatctcacactaaaaaatttaaaaacttaatttctaaactaattaaaactctcatatctcattcacaatacatatacaatacttagaatatatacaatatacttacaatatttttataaatacaacacacaatatatattcaataaaatacaaaatacatacatatatactatatattaaggt

SEQ ID NO: 407012 - DNA, 833 bp, Cannabis indica
cacaaacaataagcaaaactaccaaaaaaaaaaaaaaatagacatacccttattgtgcatatgctgtaatctagatttgcctcactcttatagttctttcttgagtaataaaattcaattttgaaaaaaaaaatcaaaatttgaccaagaattttatttctaaattagttgaacttctcatgtagttctatgtactatcttaaagattaattacagttcataatcaaaagtttcaatacactacaacaatatttgtcaatagcaacaaatttagcagagagcaaaatccactgctaatagggggtagtattagcggcggaaaacccagatcttgcctcaaatactatgtatttttttttttaaagtattaggggcgacactattaaaaaaacccggaattcccaatagttttacatcgtcggataaaaaattcctgacggtctataaaactgacacctatacaagtgtcgcgtatattgggtagaataggcattggtagaaaaatatcggtataaaagaatttttgacaatttaaaactgctggctatactcaagactaggccacggtttaaaaccatcaccaataagtttaaaaccgttgcctatactatatgcgacagttttaaaccgtggcctataatataggtgacggttttaaacaaccgctatagtagatttcccaaaaaaaaaattaatcgccttcatcctcctcaaaactaagatgggacttttgttttggccttaagatccccgaatagttaagatatcaacaagctatgaaatacaaaaatctcaaaaatacataaattctaaaataaaaaaaaataataaaa

SEQ ID NO: 407013 - DNA, 629 bp, Cannabis indica
attaaataactaaagcaaaagaataaagaggaagaagaagaaaagaactctaatgatgatagttgatgatgattgcttgaagtctcttctctcttgctcttcaatgtgttttctaatctcaaagttgcttgtttctatctctctagtcgcctctcaatatgatttacatgcttctttatataggccaacaaagatagatcaatcctcttagaattaggaattttttaaaaaaaatgataagcgttgcgctatagcccctataccctgagctatagcgcctacgagaaaaaatctcgaacccgtgctgaaattatatttttttttcgtataaaatcatttttttttccagcggggtgttgtagcgcacaacactaatttttttttgtttcgatcttgctcagaaaatcatgcataacttttgcgtccaaactccaaatgagatgatttaacatgttttggaaagctgagaacgagctctatcatttcgaatttcataagctctttgagaaaatgatgaaatcattatcaaaaataggctcaaagatcttagtccatcactaaaatactttttcagcactaacctacacacttggagaaaacacatcaaatctatacaaaaataaatacta

SEQ ID NO: 407014 - DNA, 498 bp, Cannabis indica
tattccctataatctaaattattttgaacacctcgtaccaaacgcccccctaagaacagattggtttggttcgtaattacagtttaaacgaaatttataattaatcattttataagtatttctactatttttataaaaaatttctttttttaagtatatatttaacatgataaaaaataggtctatataaataaaaatataaagtcaaaacataatataaaaattcaaaattcatgcaataaaaaatttgacacacaaaaagttcaatctttagtcttcttagttatttattatgaatcactatcgaaccattaagtgatgagcagtctagattaaccatatcacaaaaaacaatctcgacgattatagtgtacagcagttcagattgtcgcggtccaaatttaaattacggtttgacgatttttatgaacagagtaaaataaatattaaaattactattttattattttaaatataattatatattttattttgaag

SEQ ID NO: 407015 - DNA, 533 bp, Cannabis indica
aatgtgattaatttaattgaatttgaaaattgtgttagtttttgaaaaagagtgtgtaatattaaattttaataaaaaaataataaaaaatatttaattggtgaagaaaaatttataaactattaatataacaaaaacaaaatatgttatttatgcatcacatagttttagtaggttaaattaaatttataatatattggttgaatttaattttagttaaatatatgtaaagttagatcacaaacataattatagtatggtggaatgacaatttgcttagaagaatttatcatgcaggaagaatggttctgatcaattaatctatttttctatccatcaactacaaattataattctgccgaaatctgtgattcaaaatattgttcagatttgttgtgcctatatatctttagaaattaaggtgcagatacgagtaatggttcagaaaatgtagttatggaactagtgtgctaccgaaaatcatgtttgggctatttctttaaagaaattaagacaatctttgggtgacatgg

SEQ ID NO: 407016 - DNA, 567 bp, Cannabis indica
accttgagaagtggtaagacctatgatgtgccaaacaaagccaagccaaaggaggaagatgagaatattcatatcatcttgggaagaccattcctagcaacgggaagagcattaattgatgacagaagggggagttaaagttgtgtgttcaaaaagaagaagaaactttcaaggtatttggcgcaactgaaatttctacttattttcgactggaagttgtaaaggatggttgagaagtcactactaataagaagaaagggaagtctaaagaataattttgaatgttttaatgctgtatgaagagattattgtgtgggaattctgaaggtgactctcaatctaagaaaagctttaaaaattgcaacgttgcggggccgtttttgtaataccctagaattatgaaatggattagcaaaaccctaattagataattaaggataattgaggaattatattactatatagttcaatatttgagaattgatttgattaattatatggtaaaaccccgttggtgagccaggggcattttagtaattatggcccgagaagggtaaattgatgaaa

SEQ ID NO: 407017 - DNA, 621 bp, Cannabis indica
tatcatagtattttaaaatattataaataagatatagcaacaccttaattaaaagtgatgctatttaagaaattctaaatacaaatacaacaacactttttatacaaacgttgctatatgtcatactattattctaattattttttataaatattttctctttttatttttaaatatacttataatgcaataataataaaaaaaaaaaccaaattaaccaaaatcatatttatgtaatattataatgatatgtagctacattataatgatattgcacaatctgctttacaaagtaatgaaataaaatttttaataaattaacgtattggaattataacaacaatattctttcaaaaaaattatacaacaatattgctaactataatcacatgttcacaaatacattatttgtatgtggtcaaatatttgtaacagtgggattctcttgaagattgcgataattagtcaactatgttctccactcacttcaaagttcaaaccatgagaatttgatccatgaagtctatgttgaatgtatactgcaagaaataataaaagaatgataaataaaatttagaagatagttgtttttgaagtgcaagtagttcatttatcgaattc

SEQ ID NO: 407018 - DNA, 764 bp, Cannabis indica
acttttgaataatgaatagtatttcttaataagaatggtttcttatagtttaccagtgggaggtaaagtgttcttcacaaagacaaatatagccttctcagcgcttagtttgatcctttttcggacaacatagacaaactgtcctactgttaaatctgctggaacaagatatctgcaattgaaaaaacaaaaagcattacaaccttgattgaatccctttgatatggcccaaaaaaaacaattgaacaccggtatttgaagactaccaagaaccactttacagaaaaaagtttaaggacccaactctcataatcactcctagaacttcatttaatttttccaatccttttaagcatttgcttgccccagaactccaatccagaaagatgaagcaatttaaactttgcaaaacatatgtacaaggcaagcaactacaacaatcaatttagacttttttcttttttttttacctttaaagtaaacttcacctcagaaaccaattatatcgtgtccatattggcaagctcaagattaaacttagaacaatatcaatatcatatataacatttctaaggaaatgactaagcccaaaaaccaagaccaatgcagacagttaggtggatatagaataatttatatgattcacaaggcaagtatgcatcaaattaccctgtctcactggcaccttttagagacttaattaaatgtaagttaagaaactatggcaagcttaacatgcataaaaaaaaaacaatttgctagat

SEQ ID NO: 407019 - DNA, 605 bp, Cannabis indica
tttatgccgcaaattactttattctatatatttaattattccgtatttcatatactatcatatccttcatattatttatataaagctctaacaaaaagtacctataacatttagattattttagtgttaaaatttatgtgacaaaacaaatacatttttttgagcaaaatacattattattttataatttatcatcatctaattcaaccatctcttcccaatgatcccataatgaataaataataatatttgttttatttcaagaaaaacatttctgcaataaatattaaattaccatctggttgagtgatataaatatttttgtatttatatatatatatataaatatataaatgttagtcaaagcttcaattcaaaatccaatgtcttctgtttggtgattgtgatagcatgccatattcacacattattacatcatatgcacgagctaataattaatctttactaatttcactttctcaaaattacattaacaattctttttctcctaaaataaaacttataattaccaaattttaaaaatttacattaaattcattaatttatagaataaatatctcatagttatttatgatcatttgtaa

SEQ ID NO: 407020 - DNA, 538 bp, Cannabis indica
tatcactacacggctatatcaacgtttttactcttcttccttattttattactattttaccacatgaacactcattccatgcatcggtacacgtgctgacctatgacccctatcaatcaaccatctatcatttctctctctttttttctttttttttttccaatttcttttcatttttttttaaaatagtaacctccatagctgaatacttccctctccatgatcccaactctattttccctcttgtttttgttcttcaatttttttttcaactcccattaacagaatctcataatcgtttttccttttttaatttttctcttaatctatatataaatatggctgtaactcgttcttcatcaactccttctcctattcaaacaaaaaattttaaaatggagttgaaatctttagctaataggaacaagggtaaatgacctattgttgaggaggatgactctgattttgctcctccattgtcgaaacgtgggcgagctcctccaaagaagaaatcaaaggtggctgcccatgaaaaaat

SEQ ID NO: 407021 - DNA, 528 bp, Cannabis indica
aacagagcagaaaaagaaaataatgctaaaatacaaaagaattcaactaaatcataaagaacacttgggttgcctcccaattagcgctgcttttatcgtcgtacagctagacgttgatcgagttcttcatagtggcgccagaatcatggcggacttggcttgatcaaattgacctcccaagtagagctttaaccgctgcccgttaactttgaaagtattatggccttcacctttcagttccaccgctccgtaaggaaacaccttgaccactgtaaatggccccgaccaccttgactttaatttaccaggaaacaactttagtcttgagttgaaaagtagaacttgttgcccaggttgaaactccttcctgactaagtttcggtcatgccaccttttagttcctttcttgtaaatcttagcgttctcataagcttcgttccgaaattcctccaactcatccagctgtagtaatcttttctgtccagcagcctttaaatccatgttcagagttttcattgcccaataagc

SEQ ID NO: 407022 - DNA, 598 bp, Cannabis indica
tttagtaaaaaagtctaacatagaagaaagttcaggaggcataattaagtacatgtcaaagttcgaagggcatgatttggtagatatcaaagtctggggaacatggtttagtacataaacaattattgaaatagtaaaatttaataaaattagacaaaagtcattaaattcaacaatctcaatagttcagagacattttcaatgaccttaaaagttcaggggaatgaatgtcaaagttcagggaacaaaatcttaacctaaaataaatatttataaacagcaaagaaccgttaaaaaatattattaatgtctaatactattaataataattaattattgatctcatatagttttgaaaaatatattttaaaaatataattaaccaatcgaatatagcatcacctataaaaaaaaaaagtattgcacgaaccaataaattttatagatataaattaacaaaatatataacaaacttgatacaattaattagagaaaacgacaaccttagtccacttggaagaaagaaatagataagatgacgtaagcatccatgcatgacgttatcactaaataattactagtcatgcctacatactat

SEQ ID NO: 407023 - DNA, 710 bp, Cannabis indica
agaccaatttgcgaggtatcctagccaggcaacacaagttgacgaagaccctgagcgacgtaatcctcgcagacgaccatcaagagacaatgacgcagaatccgcctcttcatcctcgcatggtcgtacacctagcagatacacaaggtccagttctgtagagacgcaacagggaggacgttatcaagtacataggggcgatctgcgtgatcacctcaacgcagttttcagagcgcgctcccgcgccccccgcaacgaggaaacaccccgtgatctccccgtgggcgatcaaggtgtaaacactcacactaacccgcctagcgcaccggcagcgactactggagtcaatatcccagcaaacctcgccgcagtagtcacgactcctgcagtcgcagcagtcccgactcctgtagctggaggaattgaccaaagcatgcttttgcaagctttgaaaatgctcgagcagcagagaaagcccatatacaagctgcatgggacctctcctttcactacggaagtgcgacaagctcaacttcccaagggattttgactatccgaatccctaaaatataaaggtacctctaatcccatagattatctagaaaaattcaatactataatggaagtggatcaggtaccgcagctcgcgaaatgtcgcattctcgcggaaacgcttgaggaaaatgcccatgatggttcacccaattgcc

SEQ ID NO: 407024 - DNA, 706 bp, Cannabis indica
attatttaataattttacttaaaatataaaactaaacttctttttaattaagatacttagttttaaaattatatgcattgaattgaattttaatacgtttacaataatacttatatattcaattttaaaaaattattaaatttaaaaatctaattatttactcttttttttttttttaggttaagttacttagttttaaaaataaattctttaatttttaatatcttataataatatttaaatattaaatttttaaagaaatattaaatgaaaaatctaattatttaatattttttaaaaaaataataaaaaatagagttttaataaattacttagttttaattattaaattattaaataatttaaatttaaatttaatttcatgcaattttttaaataattaattatttaaataatattttatttaaaaattttatttttcaataatttcttataaatttactaacttattataaattataaaattaatataattttttaatcatctcaaaattctactaacatttcggcggcacaacaactacattttaaccccattctattttttataaaatttatcctaaacactccaaaaaatcttcaaatacatcacaaataaacactatttctacatacacaaaatttacatatacaaaaaaaaaaataaacaattagtaacacttataaaaaaaaatacataaaatct

SEQ ID NO: 407025 - DNA, 688 bp, Cannabis indica
atatttttatatagttgtattattaataataatttttattttattttaagcgagtcatctcatatttaaactatttttattttatgtcaattacgtcaattcgtacgtaatttttttaactttaattcgtaaaatttgtatcgtacatgtgctcgtattgaaattcattttgtcacccctacaaatattcctttattttacacgtttatgaaaaataattggtgtaaagaaagttattaatcttatcgattgatcttttgaaaaaaaaaaaataaagaaaaaaaagttgatatagtgaaatatattttggatattcatatatgtacgattgctcaattattcggctcttttactttatgaaaagcaatagacaaaacttagtggtatgttaattggtcaaaagtatattattggcaaaaagttttttttttttgaacaaatataatagtaaagttttaatttctaatatttccatttaaatagtattgtataagttgttaggaatttataaaacacttaagaaatatataaatcacagatctaaacatattcataaagtgctttaatatagaaaatcctaaatcataaatctataaagcctttgctaaattaaagaagaagatgatgataaaagatcagcggaagcactaacctgaagccattgttggagattgcagagaaggttttg

SEQ ID NO: 407026 - DNA, 709 bp, Cannabis indica
atatagagatcaaaaactttattaaagtgtttcattcaaaggtacaagatcttaaaagtaaggtttccaaagaaaaattgaaaagaatccataataagataaatgagcattggagtaattgtattgatcaatatttggaccaagaaagtaatgatggtgatagctctgattatgtttttgatcagtggattttcttttctcaagtgttgagtgatgggatttaagaaatatggagtgaacatgatccaaaattatggtaactttgttcttctttagttaattaataaatttctttatcattgtaatgtttctgtgaagatttatcaataatagaaagaaagattgaagaatttattattattattattattattcaattatttaattattttaggtttcaaataaaattgaaatgaagataagtataatttttattaaacaacctttggtcaattatttaaacataagatattaaaaaaaatctattaacacacaataaaggttgtttaattttatatttaaattaaatcaaaattactaatttagaaattcaaacagttcaaaattttaagcaaataaaaatcatatcacttagttgagtattattaggatactcataaatatcttaacatcaaatattaaaataaagatatatttataaatttatttaaattttaaaaaaataaaataaaaaatgtaaatccacacc

SEQ ID NO: 407027 - DNA, 619 bp, Cannabis indica
aattatatggattaaaaaagataagataatagcaaaataatacttaagtggtcggccatagtagtgggcctcacttgtaacaattttgtcattttattcaacaatttatcttttctttcactaataccatattttccaatttcaaccctataaatgtcaaaactatttatttaataattataattaattatcaaataaaatttccatttaacttatttatcaattagaccttacaaagtctctcaattaacaaataaacctcaaacctcttttcttcactattaagcccttctttagtgaaaattcataaataagacatagtctaattttagaattataattgattaattaaaaataattaaatgagtctacaacagtattatctcaactatttggagaccatgggcctatataatcaagctttcaataagtagttctagaatttaccaagttctctaacttattaattcctcctgactccattatagatttggaattgcactcttaattatatagaacgctctactgttccaagatatagttacactattaataatccattgttataatccaaatagtcaaagatccttataaaggatctacatcgagtagggataaa

SEQ ID NO: 407028 - DNA, 694 bp, Cannabis indica
actgacacatgtgcacctatggcgtcggttatttccctaataaccgatgtcataggtgtaagtaaagtaggctgaaatattttcaactcccaatcgacgacataggtattataaattgtatacctacggttttatcaaaaaactgcttttaaatgttaatttcgaactaggcgagtattttcacaccttttagcttccctttttataattttggttgaaaaaacagcctctaaaaatccacattgcagtagtgaatagttataaaaaaatttacaacatcgcaaaaattaggttatatgtatcaaaaaacgatatgatattttaatttatttgtttttataaatatttttaagattgatatctttattcatgtatttttttcttcactattttataaatattgtatacaattatatatatatatatatatttttttgtttagtttttactttataattttttttatgtatatttaggtttaattgttattcaaagaaaaataggtattttttttagtggttagaaaaacaataagtaatggtacgaagtgatatgagaactttttaagtaaatattaataagtaaaaataaaaaaacaaatctaaatcaaaggtgaaattatttttcttttttaaaaaaataacggtgaaaaagttgtgcaaactaatattaatttttttttttgctaaaagat

SEQ ID NO: 407029 - DNA, 544 bp, Cannabis indica
atgatagaattgaaaaaaccagcactaacgttcaatccttatggtgggaaaatgagtgaaatatctgagcttgaaactccatttcctcacagagcaggaaacaagtacaaaatccaatactcagtccaatggaaagaggaagatagtgagactttagatcaaaatattgatcggattagaaagctttatgaccatatgacaccttatgtgtcaaaatcaccaaggtgttcttatctgaattacagagatgttgatttaggaaccaatggagttggatataatgcaaattattcacaagctagtagatggggaaccaagtattttaaagggaatttcgataggttagtacaagttaagactgaggtagatcccggctaactttttcaagtatgaacaaagtattccaccgttagctgcttggacggggaaaatagctcagtgattagtacttgtaaaaatcacacttgaacttcctggttgaattttttatgtatttataaaaatggaaattagtaccctaaaacaattaaaaatattaaaaaaa

SEQ ID NO: 407030 - DNA, 669 bp, Cannabis indica
gggaaacagaggtggacatcagggccgcaaatcttcattctgatcttatcctgagtgtcctaaatgcaagaaacaccatcagggtgaatgtcgggccaagacatgtttccagtgtggcatggtgggcaactttatcaaagattgtcctcaggccaagaaagaagaacctaagaagaatactactcagatcccgggacgagtttttaccatgactcaggctgacactgatgctagtccgtcagtggtgacaggtcagttgtctataaatgactgttcttatactgtattgtttgactcaggagctactcactcttatgtgtcgagtagagtaattgaaagtttccataaaccatgtgatatttatgcttcggggtttggtaccctgctaccttcgggagaccttatagtatcaactaggtggattcggtccttgtccttctggattcaaagttgtgaattaactgccaatctcatagaattgcaactatctaattttgatataatcttgggaatggataatctgtctaagtatggggcaacgattaactggaagcggaagatggtggtgtttgagcccattagtgctaacccaactgtgtttgttggtaaagttcagggggtgcgcataccaagaataacacttttaaaagctaaggacctaatgagcag

SEQ ID NO: 407031 - DNA, 499 bp, Cannabis indica
ccattgattctttgagcttcaatcccacacaagctttgatctgcaaaagaaattgatttatgtgggtaatcgggcttccaagctctttctactctttttatatggatttactgtatttcaacaaaaatgagtagtgagctcgatgaccgagactctatatttatataagtgagaccttctatcaaggtctctgccataattaatgtctgaatattttgacaattaattttaaaaattaaatcggataactgaaatattaagtaattaaatatgaccataattaaaatgtttcaattaattatattttataaattaaatcaaatattttatttgatttattaccatataaaaaatattctaacattctcccacttggtcagtttttaaattattttaccacttaaaacccaacgttcctcattacataataaacatataaatcatagcgataggtcctcattatatgtctagtattatcttccatgtattacgatatatt

SEQ ID NO: 407032 - DNA, 527 bp, Cannabis indica
acccgagattgggatcagcatctggaccaattgcttggacaaaacccgtagttggtgtctggatttgggacacagccttggacccgaaccctcacaaggaccaagacctgaacccaatcccaaaccgaaaagtggacctgaacccgtaccttgtgacccaaaattggaaccaaaacgggaagttgaccggtattggaactaggatttggacttggattcataactgaaaattaacctagatccagaaccgtaaccggacaaggacccggacttcaaataagacctagacccaaattgggagtcggacccggatcccaacccaaacacagactcgggacccaaacccaaacctgaattcagaccaaaacatggaagcagactagtgacacacaaccagggtcgggacctagaactgcacccaagtctcgatcccgaacccaaactttgaaatgggacctgggacctaaaccagaaacagaccgagacccgtgactatgatccagatcttgactcgggattcgggtaac

SEQ ID NO: 407033 - DNA, 800 bp, Cannabis indica
cccttctaaaaacctcaagaagaagagaagaagagagagaatgaaaatgaaaatgaaaagagagcgaaagggttgagaatcatttgagagggaccaatgatgatcataaaatctcttatgattagtcatttgttttctttgtttctacgtggatgtcggattactttatgatgatcataaaatctcttatgattagtcattatccttctcttcctttattttccttccaacgacatcgttttgtatatgtgattttgtttaaggttttttttttgttttgactaaacccttttaactatcattccacatgagcttaactttttaacttcaaattttaatagtaaaatcttccaaactactaaattgttcgtaaattttaaggtgtcatttatttttttacagttaaatgctaacataaacatgaattgcttatgtgtacatacacttttatattaatacacctaatattattatttaaaaaattataaaaaacttatttaaaatttaaaatatttttatttttaaatattttatctaattttaaaataataatattaggtgtaccattatacacctgtcacaacaagagtgtacacataagcacttcatgtggcagttaattagatgacattgtagtttggaaagctttaccaccaaaatttgaacttagagggttaaatgcaagtgaaaccatagttgagagggtttagcagccaaaaactcttatgtaaaataaaataaaaagaagtttttgtacggctaaaactttcgaaattactcatttctacttacacttaatc

SEQ ID NO: 407034 - DNA, 518 bp, Cannabis indica
gacttggacccaaaccgggacctttgacttgggtcctaaaccaagaccatgacttggacccaaacccaaaaattggggccggacccaggaactaagaaccagactcgaacctgggacccaaaactcagagcaacactaggactgggaactaaactcggagctgaacccaaattgggacttagacttagaccgggactcgagacctgaaccaaaacatgaacttggatctagaccgggaactaggatctgaacatgaatgggggacccagacccgagaattgggcccctaaactgggaaaagaacttggcctcgcaacttttatcgggattcggtacccgaccccagacccaaacttgggcctacgacccaccacgggacctgggatctgggactctatgcttggacccgactcgtagtcggtgtctagatctagaacttagactagaacgcgaacccaaactcaaactcaaatcaggacccagatactgttcggttttatatcctaaataaaactcat

SEQ ID NO: 407035 - DNA, 822 bp, Cannabis indica
ctctctctctctctctctcctgacccaaccaatgcccacgaccacagaaccagactcggaccaaatccacgaccaccgcaccacctccggcaaaacttactttgaagatgaaacgtagaacaaaactgaggaggatatcgcaaaactacgaagagaaattctgaaacccaaagccccaaaatctataagttctcaactcgcttcttttatgatttttttttttcagttttttgacgatgtcgcgaatcatcgcaaaattatgaaacatgctaaatgtctccaattcacaacattgcaaaacacattgctaaatatcacaaatcattgctaaacattgcaaatatcgctaaatttcatccctaatcttaaatttgttctatcattgcaaatacatcgcaaaatattgcaaaaaactggtaaaccagaaggcagatatgcaaaaaacgagagaggtcgtgagagaagatgatgtcgaggccttgcgatttgggttttgggtctgtgtgttcgtcggtagggattctaggttggcgttaacgccagagagagagagaagtttttttaaaattgtaagggtatttttgagaggaaaaaaatattaaaagtatatatatactatttctaatttggtgatatattaaaacaatatattttacatttaagcatactaaatcaaatttcccttatcagtttcttcacattaggtgtttgttccttcacattagtatgaaagaggtcacgataaatttgtgacaactagccaatttttttatatgcaaggtccattgcaaaatttaaataaataaaaaaggtgatgacatt

SEQ ID NO: 407036 - DNA, 586 bp, Cannabis indica
ctaaaaaatacagaagacttattaagatttaccttctgacccgaagcctcctcaaacttatgcaacaactccaagacacgatgagcctcatccatagtggccgagcaataaagaaaactatcatcagcaaacaacatgtgagtgacataaggggctcaacgagccacacgacaaccatggatccacttcttctcttcataaagccgaataagagctgagagaccctccacacagatgatgaagagatatggtgaaataggatcaccctgacgaatccctctagttgggacaaccggcccaagaacctctcccccatggacaatgttgtaagagatagtatgcagacactccattatcatcgaaacccagccaaccgagaaacccatgcgaagcaagatagcatgcaaaaaagaccactccattctatcataagccttgctcatatccaacttaagagccataaaaccttgcttaccttgctatttacgtctcaagtattggaggatctcaaacgagacaagaacattgtccgtaatgaggtgacccagaatggatgcactctgaaactcagaaatcaccttagaca

SEQ ID NO: 407037 - DNA, 660 bp, Cannabis indica
gacaatgttcttcttgcctttgagctggttcactgtttaaaaaaataaaaaaaggggtaaacttagctatgtcgcattaaagcttgacatgagtaaggcttttgacagggtcgaatggaattttttgcgtgcggttatgctaaaaatgggttttcatgagaattgggtgaatctgatatgcaatgtgtttcttcctcaactctctcattcaatatcaatggagctatcaaaggatcagttgtccctcaaagaggattgagacagggggactctctttccccctatctttttttaatatgctctgaaggactttcggctttgttacaaatggaagagagaatttttcataaaccaaaaattctgttatataggactttatatagaatagatatatatatatataaatatattaattggttattcaattggattcaatattctgttatctttttttttttttttgccaaaatcaaccgttgcacctttcttccagtcctcttcttgatcaaccactagcctattagtcaaattgaccaagtcctcaatgccattggagttacccattccagccatcaatcccagcaaaacaaaaatctcaatctcggtcttcaaaacagaattctaaagacaagcaaactgcagggtccttcagaccatttt

SEQ ID NO: 407038 - DNA, 502 bp, Cannabis indica
tttattttttaaaaattttattagaataatatcatttaaaatacatctattaattttaactttaattttttatttatttattcactcttaattctgtatttttttttttaattttattaagtttataaatatttttttgattaattaattaaaaaaatctatatatctatttatcaaactaagctacgtatcataataaaaaatagttaatattcaaattcaaatcgcctcacgaaaaatgactacattacctattatatatagatagatagattaatattatttttattttctatactattaaaataattattgttatattcgaaattcgattagaggacacgtgtcaagataaagggaatgtgaattgatgcgataactttttatggaataactcattaattacttaagtatcagagtatatttgtaacccgctgactgtaaggtcttaggcgaggaatcaatgtacaaattggcacttagtgtattagcgagaaaccat

SEQ ID NO: 407039 - DNA, 634 bp, Cannabis indica
cagaaggcccaggagcatgcttacaataaggcccaggcggctgccgaaaggccccttcgtatcgggagctcggtggagagaaggacccccaaaccaaggccagcagtccaggttccgaatatgggggctcccaatgccaacacttctggttgtggtaagtcccctttaatgatacattacgtccctcctgtccgtgagtacgctagccttaggcctataggttcgatgaacgtctccataggtttaggatgccctccactcagtggggggatcatgcaaaggagtatcacttctctcacttaggcgattatttaggtcggtcccggatgggttctgaacctccagtgcccattcccttggactcttcagcctatctgtcttctagctggttccttccctcggacagctatctcggggatgatgcagccagtgttaagattcgggactttgctagggtggaattagagagtcagggtagggctagcttgattgctttttaagtgtacactgctttcacagatattctaacacttgactcttttctcttgctgcagcaaccgatcccatggatgcgatcttaacttggtacccatagccttctgaagctcacccaaaacttcgatgtgaactttgg

SEQ ID NO: 407040 - DNA, 565 bp, Cannabis indica
aattgcaaaatgagcaaaactcaaccattggcaaagtgtttcgtatcaggagtgaccatgggaaggaattcgagaactcaatctttgctcaattttgtgataaactgggcattagtcatgagttttctgctcctaaaacccctcagcagaatggtgtagtagaaaggaaaatcgtactcttcaagaaatggctcgtgtcatgttatgtgctaagaatgttgctatccgattttgggcagaggcagtcaacactgcatgttacatatgcaaccgtgttcatctgcggtcaggaactactcaaacgccatatgaactgtggaaaggcaaaacaccaaggttaagtcacctacgtacatttggatgtacctgctatgtcttaaatgatcgagatcacctcggaaaatttgacaacaggagtgatgaaggaatactcctaggatactcgaccaatagcagagcctaccgtgtgtttaacaagagaactaggacggttatggaatctatcaatgttcgcttcgatgatttagaagtatctgagggaactgctaccgaggaagagcttctt

SEQ ID NO: 407041 - DNA, 915 bp, Cannabis indica
aatagttgtagattatagattatagataaagattttattgttcaatgtaatattttctattaaatttgcctaactctaatttattacctgtctgtctcatatattattacttctgttaattaatgtatgtttgagagggagagagagagcctggaggtgctccatttttattatcattggatgaaatcagatagttaatgtgtaagcgcaaagtacgtatacgttaacacaaatattaatggcgttagatcacaacaatttattataaatttctttaatattatatgtcatgtttcttttggtttagatgattatcgaattaaatgcgtttagtaaaattaaaaaaaaaaaacacgttcatcaaaatccctctaccaataaatattaattattattcaatttattcctcacatattgtccatgtcggcacgagtgttgggacattatacttgaacttgtatattagaacttattatatgtatctgaatatctgatgataataaccgtttcaaaaaaaaaaaataaaaaaatctgatgacaatgtaaaagtcatgcaaacatcaacacgtatgcactttaattattcgtaaagttctcgagtaataagggtcagtttgacacaatatgtactatgtcaaattgtaaaaaagaactaagataaaaatttgataaattataaattttattatttttttataatataataataatattataatttagtttattataattacgaatatatatataaaaaatatgttatataaagtatttattttttatataattatttttttatagtataaatttatatgtatttaataaaaataatttataatatttttaaattatatttaaattctttttagattaatgaggtttgttaataataaaaacaaaaatataaaaaaaaaa

SEQ ID NO: 407042 - DNA, 666 bp, Cannabis indica
tttttttttaaaaaaaatacttcattaatactttgagacaccgatatgaacaagacttgacccaggacccggacccaggcccccggcctccatactctgaacccagctccagccccaaccttagacctacaccccagaccccgcaccttagccccagccctaaccctgaccccaaccccagccctggacctgaaccagaatccagttctgatcaggcctaaaggacaggagtcagtgagacttgcccaacctgtgtcaataaacaaaggcaaaggcaaggctattgcaactgaggacagctctgatgagtcttcttccgaagacgaagggcctttagatggttctctttgagtaaatcatcatgaggaaattgatggtagtaattcccttaccttacttgctctttgtgtttattacttgtatgctaaccttgttatttttcttttgcatacatggcctccaggatgaaagatatgatgaagcgatcatcgagtagcccctctggcgggtgtactcaatccaaagctgtttggacaagaggctgcctcggatgtgactcaagccactctgcctccacttccttcaagtccacctccgatcaaccagcccgtgattgttgactccttctttgagatctacttctaccaaaggaacccagtaaaggct

SEQ ID NO: 407043 - DNA, 607 bp, Cannabis indica
ttggtgtgatactgaagcagaaaacggcagaccgtttctaaggaaatgatctatcagttttactggcagggacctagaaaaatagtatgttgtatttacaaaaataacctgtcgtatttacaaaaatagcatgcatttttcagacagcttttctaaagtctcattttttcgtgttttctcgatattaagagtatttctatgctatttattgttgggctttgtgctataaataaaactctatttcaatataatcttttcagctcatttatcaataaagaaacagagtcattttcattacttatttaatgtgttatttagttcatgtgatcattatttatttatttgatttataaattcatccaaatccttatcacattgatattcttgtttattgtgttgtcaacacattagaaagtaatcaagattgtgtgattaaatgtattcctataatttatcagtacatagggtttaactgataggataatctacaatgtagtttacttgcaccttatgtaagtgctacttccttttgttgggattttatgccctaaataaaacccattacaatctaatctaatttgttatcaataaaagattagaagtcatt

SEQ ID NO: 407044 - DNA, 740 bp, Cannabis indica
taaaacgaaaaatagtagcagcacaaaaatctgaaatgaagatatacctgtgtttaaggtgtgaatgacctaaaggtaaaagtaactgccacttgatttttttacgaagatagggttcacctcaaagaggcacaataagctacctctataaatacattcacccaaactattagtcaggaacggacagagagaaggaaagagaaaaagaaggcatctaatcccatcaagcttgttttatcaatcttgaaagaaattatccttgctttctctttctctacataggatgcttgtaagcgtcaaagcataacaacatgcttgtataaaaactccattgaatccttcacctcaaattcttcagaaagataaacttcaaacaagcgtgtttatatgcacgctctttgtttattttatctttttctttcttcttcatcttatttttctctacacaagcaaagtttgcatcaatactgcttctatttactaaaatatctatttacacacagctgagactattgtttaagaataatttcttgaaacctgtagaactctattttattgataaaacctaatcataacttaaatgctaccgtaacgtagacaaatgatattaggtcgaactgcataaatttgtttgttacatattctatatatatatatatttaatttatatgggtatctagcaatgtatacacattgttttgttaataattcatatatatattatgctataattacgttta

SEQ ID NO: 407045 - DNA, 714 bp, Cannabis indica
aggatgttaatcaaacatactgttagtaaatctagatcttggtaaaataatttccaacagtatggagtacctctaaggaataatgatgaagataggagccaaacctgatttcaaatttcatgatagatgtgctgattaaaattgaaccacttgatgttggtgatgatgtcatactcttttgtcatggtgattacaagagtatttactatatacttcaagggttagagctcttctcagtctcttcaggtttgaatccgaaccctaataaatcagctttatactgttgtggcatggatgagtatgatgtgcagcgtattattgattgctcagggtttagcaagaaggaggtacctttcaaatatttaggtattcctatccgtgctaaacgaatatcaaggaaagaatgtatggtattagcagacaaaatgacagcccgaatcaaagtatggagctccaggaatctgtccttagttggaagggctattcttgtaaactctttactaatgtcaatccattcttattggagtcagatcatggcgttgccaaagaggtcaattagagatattgaagctatatgcagagcttacttatggaaaggtcatcatgtgacacagggctctagaccaattgcctgggattatgtatgtcaaccaaaagcagcgaacattgcagcaatgacaaagtatgtatgggcaattgcgaacaaagaagaca

SEQ ID NO: 407046 - DNA, 677 bp, Cannabis indica
gtaaggcatgttcctgagttaaagagaaattaatttctgtggctatgttagatcaagaagggtataatgttcgaatagaaagtggaacaatgaaagtgattatgggttcaagaatggtgatgaaaggagtcaaagaccatgggatctacatattacaaggagataccatgattagtcaagtcaatgttgcagcctgtgatgccaagaaaagcacagaaatctggcataggaaattggggcatatcaacaatggaggtttgaagatccctgaaaagaagggtgtctttgggaaggacaaattacaagacttagatttctgtgatcagtgtgtgttgggaaaatcaaccaaagtcaagtttggtacagggaagcacacatccaagggcatcttagactacttacattcagacttgtgggggccatccagaaccatttccagaggtggtgcaaggtatttctttaccattatagatgatttttcaagatatgtttgggtacacattttgaaaaataaaaatgatgttctaactaagtttaaagaatggaaaatcctacttgagactcaaactggaagaaaggttaagaatttgagaactgacaatggaatggagttctgctaagatgtgttttcagatttttgcaggaaagttggcataaggagacacaaaacagttccc

SEQ ID NO: 407047 - DNA, 627 bp, Cannabis indica
aaactttacacgaaaaatgtggctctttagtgtgtcgaacttgggccactaatgggccttaaaggccggataaattcaagaggtgtgatactagattttgagtgctgattttatttattttatccagcacacattgaactatcatcgagggaagcagcaaatgaggacaatttcgtaaactatcaagtacttagtttgttttaaagcaataaaaaataatgagtgataattaggacatcttggtcaaccttcacttttgaaattacactatattggaaattttttgaatagtttataaagttcttaacatttcaatttactttaaaaacttcaaacataattttaacaatgtaaactatttgaatttttttaaagcagataatattgtaagtataatgaacatttgatttttctttttttttttggaaaaaaatatttttgaattttttttttggaaaaaaaatatttttgcttgtgttttaaggtagagggttgattaagagattgtaataagaggttaacagtatcactctttataaacaaaaaagagataattacacaagacaacgcgaaaacaacaataaaattacatgaaagtaacttctaaataacattcaaataacaaaa

SEQ ID NO: 407048 - DNA, 534 bp, Cannabis indica
cccatttgtagcctcgtgtgcgcaggaggagtatgcaatctgcaatcttttttttgtgatatttttgattcaaaatcatttttcattgaaacaaaatttaaattttggtagaattttgtgtagaatccaaattttcaaataaaaatctaattaatagaataaaattaatttttaattaataaaaattagttttagatattagtagcctttgaatttaaaattttgatttttccacaaactagccttatggttaatttagaaattttttgattatttttttattttatttattttaattctaagatcagatattacttattttattattaaatttgaaatgatctttttttgatattaaaatattaataaaatttagaaataatctagttaaaatttcaaatttgctaaccatattagatttttaaaatttgttatttttgaaatatattttattaaattaaattataagattagaaaaatgttagttttgacattttatcttattagatctttattttaattaaaattttattt

SEQ ID NO: 407049 - DNA, 435 bp, Cannabis indica
aaagctaaaatccatcgaagaatgggtttttgcaattccgtccactttaactaagctctcttagctaaataaacatgaaggctccttgaaagtcctaatttcatactaagcaaaaggcttagaaacaaatattatttgaatgggaattttcttgatgctggtattagaaattctccatctttgacttggagttctattgtttgggggaaataattataaaagggtttgcgatgaagattaggatcaagtttgaatgtcatgtgcaagaacgatacttggatcccaagtcatactttctttaagcatctgggctttaatggaaatcatccgaaatttgggggttgctaatctcatagatgagtcaagacaatgaaatttgagtgcacttcaaactatatttttgcatcctgatattgactgaatactttcattcaa

SEQ ID NO: 407050 - DNA, 668 bp, Cannabis indica
ctaaattattttcctcttctctccttaattctctcaatttttaatattttattaaacataaatctacaaattaatattttactattattttaataatttttcatcgttaacgaatctgcaaatactttgaatggattcatattcaagctgagtttctggtgttgtggctaagaatgaagagcaagaggtatttttgtaattaattatgtttgggttgtaattaatttatttttagagaatattgttaactaattgtgagacgctacctataaaaaatactgggcactactgatatccaataacaatactcaattattataaaaacttacttttcttttgcatggtacaattattattattattattattattattattattattattattattattattattattattattatttatcgattcttttttggtctttattggcttaagagttttacatagctttgttggtttgtttttttttttttaagttgcatattaataatttataattgatgaatttaaaatttgttgaagatactatgagacctcaagttaatatttttcactcggacgaatatatgtgtatatgtacctatgaatagggtgtgcataaatcatccaatctaatgacaatagaccgatccaattacaaccaaccgccaaatatt

SEQ ID NO: 407051 - DNA, 507 bp, Cannabis indica
aaaaataaatgatcacaagccattccaacttgattaatcaactaaaacataagatatatagaaacatataatagtacatgccaaaatttctttagtttcataggaataattttttacataaacaaacttgatcgagttagttacaattggtgatgaaagagacgacatctagtagaggcaagaggtggaaaacagagttgagaaacatatcatgccttgagagtataaacttcttcaataataaaatatatgtctacatggttggccaaaaatatttgttgatgctcaaataatatggcaatagctagtatatataacatagatagttgttacatattaaatatgagaatatgaggagaatgtgataataataataataataataataataataataataataataataataataataataataatagatattaattaatataggagttataaatgaaaagacatattatcattttatttcaattaatataaaataaatttattata

SEQ ID NO: 407052 - DNA, 800 bp, Cannabis indica
ctctctctctctctctgtatatataaatatacatatatatatataataagtgtacatttttatatttttttttctaatactttttcactctctgacaacaatttcttttattattttttttttttaaaaaaagaaatcaaacacttattatatttctttttctctcttttatattttcttactattcatactaaaactatttcatattatttttctttaattaatcatattttataaaaaaaaaaaacttaattaatttcttttaactttaactaaaatatgatttttttttttgctttcacactttttctcatactctttctagtgaaaattacatgaaatatgtgatttgatactaaggttataaaatatggcatttataactttgtcactcttctatagtatttgatatgccacatttttgtaaatctaatatctaaacccatatttcattgtttttatttctagcccaattattattattttttttttggttttattttgtatttgcattttaagagttttatttctctatcttttccttccactctaatatttttagtgagttttatatttgtttggagtattatttgattattagagtatataatattaacccacctctatttttattattttttatatatatgatatctctcactcttctattcttttgttattcttttatggtttttattgtatttttgtctcttaaatttccttagtttcttttttctctctgtttctagtttctgattctctttattattttttttccatattgtaagttcgagaatgaa

SEQ ID NO: 407053 - DNA, 514 bp, Cannabis indica
acattcagtctcactggtagagtcagagactccagataagtttgtacacttctccaaaaatcactactctaccccagagtaatcaccatctcataagtagactttctagcatttatgcaagtctagaaatctaatttggtgtagtctaagagtattaaaaataccacccttataacctaacatatagttcatcttttgatcttaagattcatttgattatcttccaatgttcctttcctgaattaaactaatacctactcaatagtagatgtctggtctaatgcataccaaaacatacatgagacctctcactgttgattcttaaggaatttctttcatgacttttatcttttttggaatagctaaaactgttccttagataaataaaatctatgaataggagtcaaaagacttcctatagagttagccattaaaaaatactccatcatcttactaaagtatgttgcttacactagagtaagtaaactaccaggtataccataagccataggtt

SEQ ID NO: 407054 - DNA, 120 bp, Cannabis indica
tatatatatatatatatcctcaactctatctctctcataccctttttttcttccttctttttctttattctcatacgtttcaattttatgaggattatatcaatacttatactatccatt

SEQ ID NO: 407055 - DNA, 710 bp, Cannabis indica
gtaaaattaaaaaaaaaattaaaaaataatatttaaagtaataattttccatatatctatatgtgtacataaatattaagacaggtaaccccttttattcaatttgtaatgatatatatatatatatatatataatatataatatatacttggttaatattattatttatacttttagatatagttttaatttttattttaattatgtatatttttagttgtataataattatttaatttttttatgttataaattttaattttagttacaataaaatttctgacaaaaaaatataaaaattgtgactaattacaaattatcattcttatgttgtgattaaaaggtctgtagctaaatgtattagtcgcaaaaattacaatttgttgtgactaaatgtatttttagtcacaatacttgttatgagttaaaactaaattagtaataatagcttctaaatactatgttttagtcacaagtaactttttattgtgactaaaagtcgcatttagtcaaaaaaaaaattatgctgtaactaagaaattatcactaaaggtaattttttttttttgtagtgtttatatatattaggttaatattactctaatgcttgtatactattaattatatttttagtatttactttaattatgtatatttttaattatataattaattattttataatttttcatgttatttaataaataat

SEQ ID NO: 407056 - DNA, 1085 bp, Cannabis indica
tttttttttttttgaaattaggaagatattttacagatagagaaagagagatgagggtatacaactgtgatgctagggttttggtatttttatattctcaatgtgttaaaaaaatatattttactttactttatcaattaattattttattacaaatgattttttttttacatattttattaaactgaaaaaaattaaattagttattaaattttcttgagtaacgtgctcttttttattgttttaaatttaaatataaatttaagatatagtgacacactagatatgtgggtatatgtttatccaattgcgtgtcatgactatatgcaaatatatatttttttaaaaaaatatatgtataaaatatggaatttattttttagtgacacttcatatgttttagtgattgagatcgaaagacactaacattgaaattttatagtctttttttgagtgtcactaaaacttaaccctaactctttactgacccgcacatttgtgcgtgtcactaaaagctaaatttgtagtagtgtcagttatgaatatcttgcctttattgcgccgagatgagcacataattaaagatatatggtaagccgtatctcatagggatgcctcgctgaggagggagccaagatcaatttgacagcgagcatctgcttgtcattttagcttctcgagactaatattgtcttaaccctgatggttatactctctggggtcgagaagaccttcctcgcatgcaaaatatcttttagcgagataaacgcctcgttgtctgttatcttggctcgccatactatctatactcagtttgtatatcgtataatatacgctaagtatttttagtgttgtcgctttctctttcacacagcgaggttgaggcctcgtcatgagcgtatgcactcacatggtttcttatcaatacataaattaaccgttcgtatgtttctatctcgcagaaggctattcagccagccgagttataaacctaccctgtgaattatatttccaacaagttgttgttaggttttatgccctaaataaaacttcatctcaatgtaatctattttattcaacatcaa

SEQ ID NO: 407057 - DNA, 696 bp, Cannabis indica
acttgttcttatgtttacgtgtttcaaattgttacaagttaaaaaaataaaaattgacaataaattttacagttgaggaagtacggacctacaaaacttgaataattaaaataaataaaataaaataaaataaaataaaaaagaaaaaaaaaaacttaagtagttgttgggaagagatgatgatgatgataaatattgcttaatgagggagctaactttaaatgattagtgctcaggctttgtgtgctttgtttattcattaaccatttctagtctctagaacaaactatagatccctaccccaactatgtcaaagtaagttagggtttatatacatgttaacaaattatggtatatataattttggatgatgtgtcttgcaaaatttattgattatttttttgttattaaatgaaaaattaaatcttgtattttttaaaaagttaaataatattttgaattttatgttctataaaaattatccgttttgttaaatggtaatatagattcagtatttttaaaatgatacaaataagattttaaattaattttttattaaaataaaatttaataataaattgatctagaggtgttatgacagattagttacatcttctgcttctgttcgtgctaaaatttatcttcaagttggttatattaaaaaaaattatcaaaaattaagctcaaaatcctatt

SEQ ID NO: 407058 - DNA, 586 bp, Cannabis indica
tgtataataatccactcgtattatcaaataaaaagaaattaaaaaaattatttaataaataaaaataatataaaacaaaaacaaaagcacttctcttcctatttcttatttcttctcttagaatgtaattgtccaattataattttattattatttagttatttttttaattttagaaatatttaatagttaataggtttttattgaaaatataagtggatcgctaatatgtggacacttgttaatttagtctattttaataaaatttaatgaattaatgtaaatgtaattttaagtatttaattcgccaaaaaaaaatatatgtgctatataagtgtatgaaatcaaaaacattaatggtatgtttggtttagtgtaatagaaattgtaatggaatcattattaccattacattgtttgcttttatttttaaacctttgtaatgactttacattataatggtcattacactatgtattgtaatctccattatattataaaaataatgtaatggtgattacattgtacgaaatatctcttttgcccttttttatttactttttttttaatttttaaattattaaaa

SEQ ID NO: 407059 - DNA, 668 bp, Cannabis indica
gacttgataaatattggatatcaccccccacacttttctcacatttcactatcaagataatatcttgatttttaaaaatatagaagacctctttgtctctataatttctcttttcactaaatttgacaccaaaatatgtcaaaattttcgcatatgcacatagccaaaattgatttagaatttgagctcaaaatcaaataactaattaacaatatctcatcacattttgattaagtttgtaggcacacccccacatttccactataaaatgtatataaaatatcacttttgtgtgttttcctcttgaaatgactttttaaggtcactttaaaaataccatttgatatcaaactcacatcaccaattaaaaagtaatgtgattatttgttcccataattttaaagttatctcttcattgagattaacacaaatattacaccaaagttatcaaaattcacatcaattttgttcaccactttaattatttaagattcaaaattacttctccaattttgttatctgttcacaatttttgaatccaccatgattcactttgatttgagtctaagattgctcttccaattatgactcattttaaatgtttagatccactttgatctatttactctttggccatataaacccaaaaaagagtaactctcatagtt

SEQ ID NO: 407060 - DNA, 611 bp, Cannabis indica
agtattttattttatatttttagtaatattttatattttataatatgtttataatttttagtatgttactatagtattttttttaagttgtgttttgaataataattactttattaaataataattactttataatattttaatttttatgtagtttaatattttttatatatttaaatttttattctaaattttatttttattgggagatttcctgtcctgtccccccctctcattaagggaatccttaccccatccccaatggagaataagttgggaaagagattaaaattcttaattggggatgggggatggggaaaacacttcttgctaattttctgtccccgtgtgtatccctatacatatgagataatttctgtaaaaataaaaataacttatttatttttaaaacacatgatgtagtgaatcattaataaatttaaaagtttcattgtaatataaatgattatattaatatagtctatatagtatgttatatataggctgtaatttgttattttgtttgaggtttataatttgttgttgaaaatgaagtgttctacttaattagtataagattaggtataataataaaagagaaaaatgttaaa

SEQ ID NO: 407061 - DNA, 945 bp, Cannabis indica
gctatttaatttcaaatagacatcgctaaaattgacttatgcactattataattttaataataatactatatatagaattattacaggcgttcaagatgagtaagttctgacacttgttctgatagattgcccgtcaagcctttgccgctcaatacactgcacatgccatgtgaaatatcaaaaattacttattaatattcaaaaacaaattattttaaaaacataattttaataataataaattaaaaattacttataactaaagtatataatatttagatacaagttatcattaattttattttattcacaataagtattatcattaaaaatttatttaatcacaacaaattgtaattttataactaaacttttagtcacgaaccttttaatcataataagaataataatttataattaattacatttttttttaattttagtttacacattttattgtaactaagtaaaaagtattgtagtaaaagtaatattttattgtgattaaaaatagtatttgaccaaaaaaaaattcataaaaataaaaatgatatctaatatcaaaaatcttaaacgttatactgaatatttatactttttgcgatttatgctaatttttctcaactttataaattctaaatatttgctaaatttgtcataactaataacaaaagtgacgatacttaatatatagtaattaattagtcacattaatctataagatgatcactatgacttggaatatagggatgtagatgtggggcgggtataagtgagagtgctcccatcattcccaattcccatttcctttaacgggtataagtgagagtgctcccatcattccctttaactagcaattctgacccagacttggacccgccctcggtcctacttaaataaaattaaaaaataaaaataaaaaataaaatttacagaacacattt

SEQ ID NO: 407062 - DNA, 1062 bp, Cannabis indica
taatagtataaaaaatttagtttacctatcattatattttagtagttctcaagagaatgtttttgtaacatttttacacaatttcttatgtacaaaaaatgaggaaattataaattttatggattttttatattttttttttataaaaatatggcttttttccaaaaaagttattttataggaaaaattgaaaaaacaaattaaaaaatgtaggaaaatcatgtaaaagtaactaaagggatatccaattaccataaagaggtaactagatacctgttttgcccccatatttttaagattcttctaaaattttcctataaaatattttttttaacaaaaaagtcatgtttttacaaacttatactttaaaaatcataaaaatgaaaattccccaacaaaataattcgctctgatatgaaatatgcttaggcttgggccttaaagatatcacacattaccacttaagcccaatgttgcttgtgttgttgatctttaactaaatagtgactaaaatgcacaatatttttaaaatgttatatttttataattaatctcagtaaatttaataaaaaaatttaaatgtattttttttttaaattatttatacttttatactagttatattataataacttggtgtggtcattacaaaaaaagtttgtaaaaatagtatcgacatccaaccaatcatacatattgtgagtgaaagtctattttaccacattatgagttaaaaagttacaaaaccgaacaatattgaagaatatacatgccacaaaaaaaaaaattacgatctcgtatagctatcaatctcccatctcgattcaactccattgagagagatgatcactaccttagaattactcttgacaataatagaattgcacccccaattattctatttaaattactattacatttacagaattttagtcattttgttaggttctgtccaattattctatttaaatgatgacatgtctttgtcaattagcaactttgtcccataaactttgacaactatcaaatcgtaccccctttaaaataaaaatgagaaaaatt

SEQ ID NO: 407063 - DNA, 503 bp, Cannabis indica
tccatccatctcggcctgcagggtgcgtagctggtcttagattgcagtgtactgatcggtggtcagttggataataccttcggacaccgccggagtaaagggtggaaagtgtcccgttgtggctactggtgtagacgtttccccggcctgagggccagtagtttcagggactaggttgagaggtcttacattaccccgacctactccgccgttgatgacatctacgggaggcactctgcttcctgacaacgaaacgttcatcattccgatgttgatggattcgttgttaagacccccgtttgcctagtttccagccattatgattctctctctaaattagctagaaagtacttcttcgttcccacagacggcgccaaatgttgtcgatggaatttcgcaacaccaaaaataaataataacaataataattataataataatatgatgaacaagtgcgagtattcaacctagaacggcgagtactcgaactgggaacacaaata

SEQ ID NO: 407064 - DNA, 827 bp, Cannabis indica
agggttatatatcagacccttggcatcgtcttcctcatttcacaccttgctgaacacgaagaacagccacccacagcagccccaaacccacgaaaaaaccctcgccaaccaccactaaaacaacctcattctccctcatttcttaaccattttaccccatttttgtcttaaaatcttctattttctatacctaaacctatactgtaaaaaagtttagtttttttcccctctatataccaaaccgaacctattataaaagaaaggtggtgggtataactccggccaccgattttagcggagaaaacgttgagtctcaacgtccattaaggtataaatatgctttctattcattttatttatgtacattggtattatttcgtttttgtaaatttttttagaatttttttattttattaatattatattgtgtgtgttctagaggtggtcggatttttgtagcattttatcgccggattgcgtttataaggtaaatatttattaacttgatatataatatatatgtatatattttgtgttttattattgaatatgtgtttatatatatcttgtgtgtatatactatttgtgtattttgtgtatttgtattgtatatatatttgttgtgaatgagaatgagaggtagtaggaatttaattagtttagagataaagtttttaaaataatggtagtgtgaatatataattgattatatatgtatatatatttatatgttatttttaaaaaaattaactatggaaattagtaactagtaacttgctactttgtttaataactagtaagtaatttaataattaaaattttaattt

SEQ ID NO: 407065 - DNA, 993 bp, Cannabis indica
acgcgactgactttctccactcacacacacattggaggtcccgacactggacccttcggagggacccaactctcgactctgttcttcttcatatcatcatcattcatcaacatcatcactctcaataatctctctcggaagcttggaggccccatatataatatatatatatatatatatatatttatataacacaacacagaacagacatagattctctcttccaaagtcacagttaaacttcttctgttctcctaccctttctcctaatgaatgactaagacactcgtccattcgtctatttttcagatgagttgttctcatcagcaaaaaatatgtgaccatttttatacattccccaaggccaattaccaccaagaattttcaacagatgtttggtagagatgaaggagagttagaaggatgaagagtaccatggttccatggataagatttgctgtatgattttttggtatcggagagggagatggtagacataaattttaaatataaaattactatattatcaattatgaaatatatttttcatttgtttaaactttaaaggataattataaattaatttataaatttttttggtcttatcttcaatctttacccttctaaagaaattgaaaataagaaattcggtaaatactattttggaatttgtgttttgcaaatgttatcaattagactttctattttgttaaatgattaaagggaaacttacaaaaatactgttttttaccaaatattttcaaaaatattgggacactgcaaactttacatttttactgtccaagcccatttttatttcttttatactgtccacgtccaatatatttacttttatactgtaaacagtaacaaaacacaaacggcacctctccttcgtggttggggacggacaaatcaataccagaatcatagaaacaccaggaaaaaactataaaatctggcaaagagaaaaaattactaaatcaacaacaa

SEQ ID NO: 407066 - DNA, 907 bp, Cannabis indica
atctcctcgcttcacttttattggctgccaaactttacacatcattgctagcggacttgttagccagctttgatgatttaggcctgctcaagaccacttggctcaccatcctcagccgaactgcatagcatggtctcgcccccatgtcgagcaaggggatgtacttcctctgcactcatacttcatggacatagctaacttcttcaagttatgtccgacttagattacaccaaaggggataaagtacctttcagtgctcttcgtcatgtacgatgcgcttagttggccgcagtctacacctttcatggtgaattatttttttgagctgaaatctagtccaggaaagtataggtttggttacttctactttagccagcagggctataagtagttgggtggcactattgacacgcccatgtcaaagattggaggctataccaatagttactttatggcgtacggtgtaaaaggtgtctgctagttttctcactgggtcccaacctacagtcgatcgacccctaaattaaaattaagggatagggccaatcatatcttatcactcccaactgctcggcataacatttatgatttgccctgtgaggagaacttcagaaagtatggcatgtacctttctggtgagggtgttgttgccccggctaatcctcttgaggatccaggcaatgctcttgtagggaaggagaagagaaagagaaagagccctgatgttgagaaggagaagagcaagtcttctaaaaagtcctcattggctgtggtggcttagacagagactaggagggaccgcgctcttcagtagtgtcttgcccgcgggagaactgtggtgatgccccaattttcatcaggcttgagagactggagcctgcatgacctatccaacctatagccaact

SEQ ID NO: 407067 - DNA, 531 bp, Cannabis indica
agaggttattccagaagtgcctcgtatatggagatcttgaagacaaaagatgtcaataaggtgtgatgataattttgtttaccttggagaaggtgaatgtgatcttggtcattttgtggaacctctcacttatagtgaagcacctaattgtccacattcttcaaaattgatagaagctatggatgatgagattaagttcaatggaaaaaaaaaataatgtatttatggaagttagctctactacctatggttttaaatcaataggttgcaaagggacttttaagaactaaaaggataaaatgggacagattgaaatgtataagtcacgtttagtgacaaaaaggctttactcaaagagaaggtattgattacactgaaactttctcacctgtttccactaaagattcattcagaattattatggccttagttgcgcattttgatttagagttgcatcaaatggatgttaaaactgcttttctgaatggagaattgaatgtggaagtctatatgtctcaacctgaaggctac

SEQ ID NO: 407068 - DNA, 882 bp, Cannabis indica
acatcataatatgagttacatttgaaaaataaaagagaaaattacgcattccaacttaaatatcaaattattttcaaaaatatgccagcttattttaatgtataaaataataatacaaaattaatactttttgtatatatacagttagagatttctctctcctctaagtcccaatcactttgctggtatactttaatgtgattttattttttcactttgcatacatcaagtcactctttctctcctttcacacattcatcattttttttatattaaaatatttatctttcctttcttttttatattaaaatattttttgattactttttaggatatttattttaacatatagaaagcatataatttttatcattgctaaataacataaccaaaatcaaatataacattatagtttcttttatatgttgttagttaataagtaattactttttaaacttaaataaaatttaatatatcaatgattaaacaaatttataggtttttttttagagaattgaaagtttacaactttataggttattaaaaagtattttaattttttattttatcttagatgtaataagattatattctaaataaatttattttttataaaataattttgataggtttataaaatgcttaaggaaacaaaataatatcttaaacattatatgttacattttcaagaagtcaaactttaggtgtaaacaaaattagatatatcaaccaatttcataagttattaatttttttgtgttatttaataattaaaaagtaactaaattgtataaaattttaaaataacttatatagaaaatagagattatcttaaatatcatagaataaattgtttaatttaaagtttagttatttactttt

SEQ ID NO: 407069 - DNA, 587 bp, Cannabis indica
aagtatgaggcagcgacatgacatttttaaattattctaaaactatttttctcttctctccttaattctttcaattttaatattttattaaaacataaatctactaattgatattttactattattttaattttctataaaaatataaaataatttataaaaagttagaaaataaaaaataaattaccaaaaaaaaataaaaattaaatcaaatataatataattaatcataaatttcgtttatatacatacataaaatatcaattaatatatatatatatatatatatgaattgatatctatatatctacatatatataaagcagagacataaattggtgacatggtaatttaaaatttcttttctctctttgattttctcattttttttttatttttaattcatataaaattgctctaaaagtatgtttctcttttctcctttattctctcacttttttattttaattctataaaaaaaaatacaaaaatagttccataaaactcaaattatagtaataataatacaatatacaaccttaacgtttttggttttttttaaacattaagatataataataataata

SEQ ID NO: 407070 - DNA, 502 bp, Cannabis indica
ttttttaataaaatgggatgaaattttgtactagtcaaaagcttaagagacaaaaatactaattattctttacgattaaattaataatggttcatatttatttttccaaacaaaaaaaaagtttcctatttttgtatgacaaagttttgaaaaggttaataataacatttatagggaccgaattttgtcccgttactgtacggacacggattgcaatccgtaatgtactgtaaccgtcggatgggtagttactttgatccaaaggctggggttcatgtaggggttgatgtaggggtatgtagggttaaataaatgggtaccggttacttttttgaaatataaatttattaaaaaatggaaaagtgaaccgtaacatccatcaatcaagtcctatcaacctatcaaccgtcgtccctctccactataccatttcattgttatttttattttgttttttattttgcaaagttctttcatttctattttcgtctctgctagggca

SEQ ID NO: 407071 - DNA, 858 bp, Cannabis indica
aaaaaaaaaatgcattgctattacgtgtcaatgatatatacctatattatcataagttaacatcttaataattatcaagcgaaaatttaataataattattgaattaatatattttcatgatatttacactaaatagtaatttatgttagggaactctatttacaccccatagaataataaatacactttattattaaaaaaaatataaacttaaataatttttaaaattattcttaatatatatttttttcttcaaattattttatgttaatttcaatacttattttgagctcattttcataattttttctaactcgggtatatatatttttattttttttaaaaaaaattcatataattttttattttaattttttgtcataatatttaagatataatttatttttgtttgatagaaatattttttaagaatatgaattgcaagaaaaaagttaaaaaaacttagtacaattaaagatataaattttatataaaataaaaattataaaaatggggtttgtttaaaaattttgggagtgcaaacaaaatttcccttttatctttggacaatactaaatttatagatggtaccctttagtatttttttcatacaaaatataagttttcagcaaaaaaaatcacggtcaaaaagcaccaattttatttattaattataatattatattataaaggctaaataccattttagaccatgtgttttgcaaaaattattaattagactttctgttttgttaaatgacataattgaccgtatattttccaaaatagtaccaatacaaccctgaactgatttttttgtcaaaataaaatttaataataatccgatttaaaagtgt

SEQ ID NO: 407072 - DNA, 509 bp, Cannabis indica
gatcgtgttgaggagctatcttcaagaacactctttctcagaaatgaactactgcaggggtcgactattatttccagaaaggatactgagatgagacgtgtcctcatcgagcatgatagaaacatgcatatcaattgcaactaatttaataggagcgtggagatgttaaagattgagatccaaatatgattttgtcagtatttggatgctagtcatcctgttcgtccttagctaataacttagagtgaatattattgtgtctcctcgaagtgaaccttatcttcgtaaaaaagaattaagtgacatgagtatattcatctcacattttgaggctaccattcatatttttatacacatttatttactgttttacttcttttattgttattattttatttattatacacaatctttttttctctctttttactcatcaacacttttcaaataaagttaaaagaaaaagaaaaagagacaacattgtgactctaagttattataattttcac

SEQ ID NO: 407073 - DNA, 540 bp, Cannabis indica
gcgtaccaaacgagctctttgaggttttttctacaatgcacggtatatatattgtgcactgtagtcatgatatatatttaattaatatttatatatatttatattattgtatttatgaaattaagaatttatttttgggaaattttacaatgtatatttttaaaagtgatgtacgaatgtactcctatttatgttgacacctgacaaactttttagtctattttttatatagtcgtgtatattatagttatttaagatatcctataagaaatttaaaaaaatttaatactcctaaaacaaatgcacttcttttaaaaatggcgcactaatatactctacttgttttggcattcacaagacttgtttagtctttttttttaatggtggtgtacattatagttatttaagacgtcttgttaaatttcgaaaaatttagaaaaatttaacacgccgaaaataaaattcaaactttttgtcgcgtgactcttttatttagagaggtgcattgtaaaaatatcttataatattttttttttgtgt

SEQ ID NO: 407074 - DNA, 1261 bp, Cannabis indica
taatatatacaaaaagaaagagaattttaatgaggaaataaaacccctaaacttttaagatttgaaaaacaaaaaattcaacataaaataataacgaaattaatatgtaattgaagaaaattaacatatacatattaattgtatacaaattataggttctaaatcatatacaataggcaatctgataccacatgttagaaaaattaataataaacccaagatcaatttgtatataacatagaacacaataataatatataataattaggtatgcgtacctgattgatccatagcaattacctcaattcgatccatagcaattacttcaattcgatagtgcaatactatcaactaagtcttcctccctagatctctaaatcagaagcagtttatttatctgattatcaaaaggtatacaattgtgatgagacaatatgtatttatagagttagggaggggacttagctacataaccctagttggactgggcctgctcatcaaaggcttcagttaactagaaaagcccacacttctgcttcacctagactttacacacagatgctaagcccattaacaagtgatcaccaacaatatgggctaacacaacaaagaactatccaatcaacccaagttttaataaaaccaataaaagttaatgtaagcccaaataaaaagtctaacacaacaaaccatagtcgcttccaatttttcctccatggtccaacgtttaaaaccttcatcaagcctagttgcaaaaataattacaacacctcttacatcagtaactcgagtttgttgccaacaatcatgaacaaatggacatctaacacatgtagcataatctttggaacactttgacacaagagacattgagtaccaataggaacatgtttgagagtcaattggaaactagttaaaaggcagttggaaacaagttctccatgaaaaaaaaatcaccttaggaggagttttcagctgccataaattcctccaaaagcctaagtttgcttcttgagatcagttccctttaagttcacaaaacccctatccatccaataaacttatgtttactaagtcatttccaacttacccaataaataccctgttagacttttatttgggcttacattaacttttattagttttattaaaacctgggtttgattgtataattctttgttgtgttagctcatattgttagtgatcaataattgatgggcttagcatttgtgtgtgtaaagtctaggtagcagaagtatgg

SEQ ID NO: 407075 - DNA, 525 bp, Cannabis indica
gtctattttgaaagacaaaaaagttcatataaataataaataatatgttaattaagatttttgcttttgaactttgacatgtaataaattatgcttataaattttttaggtcgttaaaaatgtcccttgaacttttgtgattgttagatttaagaatttttatctaatttcaattaattttactattttaaaaaaaatttatgtactaaatcatgttcctcagattttgatatctagcaaatcatgctcctcgaactttgacatgtacgtactaaatcaggcctctgaacttttatccatgttagacttttttattaaaaattagaaaaaaaaaatccttaaaatctaatcttctcaatagttcagaagcattttaaagaccttaaaaattttggaaacataaatttagtacatgtcaaagttcaggtgcgaaaatctaattattatgtgagaaatactaaaaatcaccagtagtgcctaccactctcttatgtgtccgtatcgctattggtccagctaagtatc

SEQ ID NO: 407076 - DNA, 518 bp, Cannabis indica
tattattaaatgttgatgtcaatctaaccgtttagtataatcggttatattaggttagtagagtcctttatttattttttgttggtttaaaataataggtgtcagacaaataaaaaaattaaaataacatgtgtcaactttttagactttactttttttgaaaaaaagactatactatatttattagtgtaatatatattataattgttgtgcctgactagtcacacaatttagattgtgcgtgactccatctgtgacccatagatatacagaggaaaatttgattttctatatttaaaaaaccttaatattttattcttaaaccaatacattttaaactcaaaaaaatatgacactttttttcaaaaccccaaaaatacccctctcataattcaaaccctttctctctccttccctcaaactctctctgcatctctctctctctctatctcggcatcccacaactgccccacccaacccatcccacctccgacgaccaccgaggaccacccaccact

SEQ ID NO: 407077 - DNA, 776 bp, Cannabis indica
taatcattcaaacaaaatgtaagacaacaaacaaaattgaaggtagacaatccttcaatcaaaaaaatctctatccaccgataaagtaaattaggccaaaacattaaagaccttactctaagggaaattggaaacaagattttcataactagactaaatcattgggatgagtatggccttaaacttcatgaatcaatgtcaaaataatcccaagattattccaaatgagcaaggctataataatttcaaattccttagtcttgaaaaagccaatagtaggcagggaaagacctgaaagtacattccgtgcaaagttcatcttattgcccaaacaccaactattggaagagaaaattcccattaattagttgtaagttttagtcgacctgagggtagagtgcacaattttattaatggtaaatgtggttgaatccagagagtacattgaatcatatatttcataggggaattcggtcgagcacctagtgaacacaaaacaatgtgttgattatagtaatgacatggttcctgtactaacaccatcttcatgaatccaatcgcgttgagaccatttaagatcgaatctgattaaaacattagagaatattcttcaattacacagatctggaaacacctcattgtcttagatctatgcaactgcaaattaatggaaagagaaaatcctcctttggtagcattaaactgagagtttatatagttttgatgcccctgagcgcggagattgcagaaccagagaaggccaactattcatcact

SEQ ID NO: 407078 - DNA, 714 bp, Cannabis indica
atcaattttcagagatttcagcaaggaattgaaatggttcaagcaaagttaaacccttgaaaacctttatcctttgaattcttgaggttttgctaggtttaagcatgcaaaatggaaattagtttctgtctgagttcattgggtgttgttttagttttctgggttaattctaagttagttagagctagtttgaggggtgtttggtgggttattgagtggttaagaaagtttgagtttttgaactcaaacttagctcaacaatgacaatttttttttttcgtttttgtgtatttttgcgactgtttttgcttgaaaattattcttggatgatatttcaagtattttggaaagtttggctgagtttgaaaaaaaaattgagtgagattcgaggttttagaattttctgcagataactagttaaccgtttctccaggcaggaccctagaaactggtttattgatttcaaaatttggcttaccaattttggcagtttctagagcctttgattttttgtgttttctcgtacattttagagtattgtcatactatttatcgatgaaaaaacttctagtattgagtttaggtccccgagaaggtttcagcaagttgtttacccatttatgtgattgtgatatagggcctccgttcagcgcgtgattttcattcaggtcgattgacacacttgaaatttgaaaacgaggtaagactagcata

SEQ ID NO: 407079 - DNA, 833 bp, Cannabis indica
ttaaggctcctgacaattgatagtttatagtctctcgtagcaacacacatactcaaaacttgttaaaaatgagaaattttattatatatacttgaaaatataccattatcaatttttatactttttaacaattttataccaaataatgcctattttgacttgctttctcctttttgcccccttcatattaataaatgcatcttaaaaaaaataactctctctgctctctctttctaattttttttaaaaaaaccccattacaaccacgacggccgacggtgatggtagacattccactaaaaccacgactcacgcacaatgatcgtacgaaacccgctacacttgcggtaatagttaagtgtattagacaataattttttaaattgaagagtatgttgctatttttattttttattttttttgcaaaatagcaggatctgatttttttggtgagattttagattttttactgttgggaatattttaacaggatctagatttactaacaagtatgttgattaacatcctaaatatgaatatctctaaaacaatgaaattaaacacataagagtttagaaaaccttacattgattgcagaggaaaattatgactcctttcgctcaaatctctaacccttgttcctttttgtcaaagattattatcaagatctgagcctagatctccatttctccttcgggttggttaccaccgtccttcacactatgattgagtacttgacttactatgtgtgggcatgacactctatcactatgggcaaattggatgaggaacaatgaaggaggcttcgaaattctataaaaggtgtctctcat

SEQ ID NO: 407080 - DNA, 551 bp, Cannabis indica
tctcaaagtttggaaccaacaaagactttaagcattatctagtttgttggcacatcttatccgagagattatattagagtagtttttgaaaaaatgatttagagcacgtggaaggttgatttcaaattctaaatattagtattaggaagtgttaattggaatgggttaatgctaacaagaaaatggtaatgagaaacattaccttgtttattttgagtctttagccttggaatgttattcccttagtataataactacccttgaggagggtaatgttgatactttaaaaaagggtaggattgaatcattatcttctattatattaatttgaatagaatttttgacttaataaataaatttagataccaataatattatcagttattataaataaaatattacggtatatatttagtttgagaaatcggtttttttttttaaactgagttatttttatattattagcaataatatatgtatattcattatacataaattttatgcggatggtgtacacataaatgacatagcaaacaaaaataaataatata

SEQ ID NO: 407081 - DNA, 689 bp, Cannabis indica
tcaatccagataatcctaaagcaacaacagtacatgaatggcaatactcatacataaaataataagatttcattaataatatttttaagcgaatactattgaatgacaattactttattaactaatttaacattaaatttatactatcaaagggctgaaaataacaaagaagcaataaataatattactattcaaacaccgttttatccatattttccaaattcatttgccgcaaaatgagaatatgtaaagaacaacgaaattaccgattttatgaagaaacttaacccagcccaagtatataaacttaaataaatatcgttgaattttttttaattgatataatattgaatttttttaacatacatagctctttttttttttttttttgcaaaaaacatactattggattgaagctaaaatgatattaaaaatctcgtcaagctttctattacatgtcatgtgattcatgtaatacgaaaattgtattctacaacgacaatggagaaactgatcgtgagaatccaaagtgcgaaaaaagaagtctccttacaccacgataaatacattatatttaaattgacatttgaacttaatttacattcataccaacgtcaatatattatgtatggatcattagtgtaaaaacatatgtacaacttgatgatggtaccaaaatactagatgtt

SEQ ID NO: 407082 - DNA, 665 bp, Cannabis indica
agtccaattgaatactccatacatctgatactagcatactttgccaatctctggaaagaacataacacttatccaaggtgtaagtaagctttattgttgactatcacatccgtgtaaatccagtgcactggtgaatcattagacattatcttttgaagcatataatcacaattaccttccattgtgttgacatcactgtaattgtgaataactatatgttctgaatttaacaaaaattatatattaacccataaacataaaaactacatgtaaacataagttatttttaatcttttgttgataacaaatacgattatattgaaatgagttttatttaggacataaaatcccaacatgaatttattgtaaggttaatatggttgtcttaattgggcaacataaaaaattggttacttgattaagtaatattgattattggttatcttattagataacagagtaggtagttttattaaacagcgagctatataattaattgtaatattagatttagaacggttcaccaagtatgtagatagcattgattgcaaggaaacaatgatagcatatgaatcaggaagtgaaaccttagtggtaatgatggtaaaagaataaacgagtcctaggttctgatgaattagcattgtcaatgagagactcactat

SEQ ID NO: 407083 - DNA, 498 bp, Cannabis indica
ctatgtgatgccacctcacatttctttaaacatttctttagatatattgattgtaattggtctactaattacatatttcataatttggctaaactagttcttacttctttagatgctataacttggtaatctggatttccaaaatgtatttgagcggttgctataacttgatatttcattatcttcaacagaaaaagcggtttagtataaggaaatttataaaatattaaaaataagtaaaggtgcatgcttttacctaggttttttttttccttctttttacgtttttcaggttgcttttcacctttgtttttttttttttgttctaggtgcttttatctagttttggagtttcatgatctatttcaattaatttagttaataatatattgaaaaaaagttgaaaaatttatgttacacaacatgtatgtatatacctataataggcaaatagaaaaactgaattaataataagacatttttttatttttacatttc

SEQ ID NO: 407084 - DNA, 530 bp, Cannabis indica
atccaaacctcacttctataaattatttatcattttctttcaaaaatctatgttaagtgtcgattatcctaatgtatacgtgtcaaaattttagcagtcaatataattttaattatttaatattataaaataatttaaaaattataaaaatagttaaaaataaataaatcaatttatttttcttaaaaaaaatcttctttttccttcttttctttttctttttcttctttctctcgtctggaaccatcattcgagttccttcttcttctttccctgtgactggaactagatccttcctcgtgatgaacccagcaaccctagtgaaccccaggcgacgagaacacaaggtcagactactctctctctatctttgatctgtcccatacctacacaatctcaaaatcatcccacttgatccctaagcgatgtgggattgcaaagcttacccggtgttttcccttacggatcacgagactactgactgtcacaatctcacccccccttatggggtccgacgtcctcgtcgacca

SEQ ID NO: 407085 - DNA, 515 bp, Cannabis indica
ttttgcaaaagttacagattggggtctctgttttgttaaatgtaaaatggaccttgtattttttaaaaagataaaaatagaactttgagctcaatttttgacaattttttttaatataaccaacttgaagataattcttaacacgaacagatatagaaaatataactagttttgtcataacatctctagatcatattattattaaattttatttcaataaaaaattagttcaggatcctatctataccattttggaaaagatagggtctattttatcatctaacaaaacagaagtctaattgataatttttgtgaaatacaggaactaaaatagtacttaccttaaaaaactataaaataactatagaaaaacaagaagacaattttaaatcaacagaaaaataataagacatacttattaaaatatgtaaatcatttataaattaactctgaataaattacaaaacatccaaaaaattatactacttttattaatcgtgtaaaagataaaaaaa

SEQ ID NO: 407086 - DNA, 596 bp, Cannabis indica
atggatgtccaaatcaccatattaattatcaccattaatgcttgattgtattttcttttatttacatattaatttagtttctcatttctttagtcaatacgtttgtataaataggggtagttcaccccattggattaaacaactgagaaactctcattcagtttctctttctctcttcatcttctttttctttttttctttatctattttatattattttataacagatacaactaagttgatcaaatttaaaatttaaaattattattataaatttaattgttagaagataaataacaatttatataaatatataaaacaatttatttggtaagatattaatcaatcatccataaaaagtaatatttcttagagaaaagaaagtaaataataaagctattatttgtaacctatataaataacacctaaacaatttttaaataatgtggtatttttaatttatatgtctaatgtatttttcaaaaaaaataaataaataagagaatgtgtcacaacataaaaaaaaaaatagaataatacaaaaaaagatgtcacctaaactcttttatatactttcttttatatatgtatatatt

SEQ ID NO: 407087 - DNA, 663 bp, Cannabis indica
aaatgcccccttatttgcaatttcatcttttaaagatttaatagttgatatttcaagtcctctttcctttctccctagtgcaactattgttcatgtaaaacgtaaagctaatatggctgctcacagtttagctaaacatgctctagggttggatgaagcttgatattggttggagtctgttcctctacctattaactctgttattataaatggactttttcattaatttataataacaaagtttttatcctaaaaaaaaggtttgaggtacagttatatttattgaggtatattctttttattttttatggtatatgaaaaatgaaggaaaaaaacatgtggaatattaaactaaattttggatttttttttacgtagtaaatatttggtatttttatttcctactatgatgctatattaatttttgaatgtgattacgtcaaaaaaaaaaaaaaaaaaattaaaatgtgatatgtctatttagaattgtgatatataagagtggtatatatttttatgtaaataaaataaaaaaattagtatatgtcttctatgaatattgagagaaagaataaagtataaacttattaattaaatggtatattaatttgattggtatatctattttacttaatttagtatatcatgaaggaaacaaaaaaa

SEQ ID NO: 407088 - DNA, 507 bp, Cannabis indica
ccaagtctaagtctccaatctcggttcacgtggtctgggtctaggtccaagttcatgtctggtttttgttcgtgtcctgggtcataatccaagttttgatttgggtccacgtcctggtccaggtctgagtctgggtcctagtcccctggtcttattcgcatgtcccagtccgcttttggttccacttccagtttcaagtcacggggtacgggtccaagtttgggtctgggtttgggtttgagtctgggtctgggtttgagttcgggtatggattccaaatccaaacatagactacgggtcaggtccaagccctgggtccagatcaggatcccagtcttgggtcctagtctagttccacttctggtcccaggtcctggtccgggtcccagttcaaggtccagtttcggggtcaagtcctgggtctcggtgctagttccgaagcccgagtccctggtctaggtcccccaggtctcggtccgagtgtaggaccaagtcggggttcaagtc

SEQ ID NO: 407089 - DNA, 524 bp, Cannabis indica
caatagaattttatttggttcagagtgttacaaagatgtttattttattgatcaatagtgttagaaaatagagatgttacaagaatgaaatttgtcctaaactaaactacgcaagatttcacggattaatatactccatttctctgttacaaactcacaaattaactcttaagctcttaggcccgtttggttgatggtaatgggccaaaaaggaatgaaatggaatactaatgggcctgattattttatttggttgaaaaataacaattttggaaaagaattccatagtaatgctattccccaaactaatggaattgctattccattttttatttggtggaattataattccattccagcagatatctctcttctactctagccatgacccaagcacaacaacccctaaccctagcaaactgaagattaaccattgtgactgtcttcttcgtcttcttcgatcgatcagactcacgctgcaagtgtcgggggtagcgttgccagaggtaattctctctctctct

SEQ ID NO: 407090 - DNA, 614 bp, Cannabis indica
agtaaaaaaattaaaagacctaaaaataatttgagtatatgtatattttaatttattaataatttcattcatatataataataaattgatgatttgagtatattacttttttactaatatatttattattattttttttgagggaaatttgatattatatgcttaaaattaatttattcactaaaaatatgctagcatattttgcatatgtaaaatatacttataccatttttctcattcaattttatccctaaacaaataaaaaccaaacatccatctctctctctaggatactcacaccacacacacacacacactctaccagtcaaacgacccatcaccggagctagtgttgttcggccgccttacatttataaaacttcttcttttgtttttttcgtttttttcttctagtttacctagttttttgcgtattattttacgattatttaatgatgtattgcaatgataaaacaaatctgaggtcagggatgaagtttggtgatgatttgcgtatatttagcgtatagtttagcgtatgtttagctaatatttcgcgatgatgttcatgatgtgtttcgtgatgttgtgaattggagacatttagagatgtt

SEQ ID NO: 407091 - DNA, 988 bp, Cannabis indica
tcatgcacggatctagcagattggcatggggtgtttcagccctgccaatttctctaaaaataaataaaataaaataaaaaatgataataatttaagggtacttataaatacttcactattgtagatattgttccacaaagaataaatagtagagaagtgaactatatataagaacatgagctactccactcattgtcaattagttttgagatggaacccaatgattctcaacatggtatcagagtcatatctttatgggcaagtgatgatcatattcgattcgcacatatacagatagtgaccatgtccactctgatatggacattgtcccacatagaataaatggtagagaagtgaaccatatataagaacatgggctactccactcattaccaattggttttgagatggaacctcatgattctcaacactcacctcattattaaggttttacacacgcacatgagaaaaaaaaaagtttgcactgttacccattttttgttcgattgcagcccatgtgtgtaggaaaattttgattttttatgcatcatttaagggttaattggttaggaaaacttaaactataggtaattgttagaataggcccactttacctgaattctaaaactacccctctcaaaatcccacacccattctttctccttccctctattctctctattcgcccgaacctaaacccaaccgtcccaaccccaaatcgtcccaacccaaccgtcccaatcccagccgaaaccccaaatcgtcccaaacgccagccagacccgcacggaggagacccactggcccacgacgctccccaccgacccacggcgcaccactaatgacccacgatacacacggcgcaccaccaccgaagcaccaccactgttttttatttttttttattgattttgtttgtgattttagtgttaaagatagactttgttagatttagggatagatttaggttttagaatctcagatctgt

SEQ ID NO: 407092 - DNA, 551 bp, Cannabis indica
aagaatggaagccaaaaataccacgggtaggggaacccactataacattcagtgaagaagatcctgtcaaggttcgctgcacgcacaatgatccattagtcgtggaagtacagatagctaacaaaatagtaggcccaaactatgatagataatcggagcctcaacaaatatcctgtccaaaacaccatataaaaaaatggggctccaacacaaagatgtgatcccctacctccagtccgtatatggtttctctggccagagtgttgcacttttaaggcaaattttcctacccctcactgttgggaaagctctaaagagcataactgtgatgacataatttttggtactggatgttccatcagcctttaacgtcatgttgggttgaccagcattatatgacttaaagggtgttacattaatattccattcatgcgtcaagttctcgataaagaatggggtaggatgcctaagagggaatcatcaagtttcacaggaatgttataaccttgccctaaccaaggccaaaaaggaagaatcctccagtcagagtt

SEQ ID NO: 407093 - DNA, 529 bp, Cannabis indica
aaaataatcactatttgtgtctacaactatagcatcagttataccaaccgaagtaaattgtttatacgtcatttaaaaccgaaacaaaaataccctttttgtagtagtcactatcagttcgcaagatctttaactatttaccaatgttagaaattcatgaaatttctcaaaatatttcaatttttttttgttataaggtatattctagagagattgcctaagaacttaacaataactcctatcccactcctgaatgtacatccataggcttgaatacagatgatcctacttcaaagtggatatttgcttatttctccttacagagaatgatcttgtcaaaaatattatgaacaagatgtaaacgccatagatatattgctgtggttatgatcttttgatgattcctaggtctagttacaacaaagagttcttagaatagttgaagtggattctagtcacagaatataaaactcataatccatacatttgacatacaatttagatctattgacaaaaaataaatattaac

SEQ ID NO: 407094 - DNA, 596 bp, Cannabis indica
aagcagaaaaagaacgaacgaaaacctcgtaccgaaacttagcgatctaagctccggtagtagcaggatagcgaattctcagagcgggaaagcttaaggtaaggtttaattttattttaagtttaataacaattgatttcgtataggggctttctgaattagaatagttatgaaggttctaaccttataggattgttctcgggtagtcatgggactagttccgatattttcttgctgaaattgaagtaattttggattagaaatcgagtttggaactttttaaagcttagtccgagcgttaatggcgttttttatttaaaggctcgattttaatttttgttacgtaagaatggtagtattcatggtatatatgtgccatgtgaagtttgttgtgatttggataagttttggtagtgtttcggtgagtgcgaaaattgagattttcgtgtttcatagtttttaaaaattcataggagatcagaaatcgtatttttatcataacttttcactcgagtgtctgttttggacgttctatataccgtttcgaagcatgggaagagttttacaatatggtgtatgttttaaagccaaaatat

SEQ ID NO: 407095 - DNA, 555 bp, Cannabis indica
tttttctgtatttaattgaataaaagaagttataactatttagattcttctggaaacttaattatttgaattttcaaagaaaatatatttaagttgaaaattagttttttaaactaattttggatcagcttaaatatgaatattttgaaattaataattaagtagaatcttcttgaaaattaattattcagatattcttaaaatatttttaagttgaaaatttgttaattttggatcaacttaaatagggataattttcaaaataatgtgattagtttaagatatttaatttgatatttaattaaattttgaaaaattatttaagttgaaaatttggtaatttaagaacaacttaaattagatattttttcagaaattaattttaatatttttacataatttctaaattttatattaaattataaatggatttttgaaattattattatatgaaaattaaattaaagttaaaaattaatttttaattaattttggatcaacttaaagtaagtaatttttattaataaaatatatagattaaaataaatgattaat

SEQ ID NO: 407096 - DNA, 891 bp, Cannabis indica
ctaaaactaaattagtgacaacttgtaactattttagtcacaagtaacattttgttgtgactaaaaatcatatttagtcacaaaaaattatattgtgactaattaaaaaattgtcactaaaagtagcagttttttgtagtgagtttggaatttccaatctaaataaagaatgatcggcaacagaattatttattgttcccaaatattaaatgagattccgacgaaaatggaatataacactcttcatcttgacggggacttatttaatattttttcttgtatttatatataataattatatatgtatgttattacatcatttgcataatgcatttggttattaatcaatgtttaattaattaagaaactaataagaattaaaatgattttcctgttatatatatataatgtcagatcgttggattttagtgtggaattattacaaaagtactcaatattttgtgatgagaatatgaatcaaatagtggaggatgcttacaacattaccttgaagccatggcatggttggatttcctacaacagccgttaaagtaaatgttacactattaattatattcacaaaataattatatatatatgattagttttgcatattaagattaattaaataatatatacaatttattgcaggtagcgttaaaattagtgcctggtcacaaaactttcttaaaggcagtaatggaaattaatgatgaaaacccagaagactcccttagagtcacacaggaattggacactttcgtttctctacttaagccgcttttacaacacattcattctaccttggtacgtaataaatatatactagtccaattaatatatataaatgaaaataaaataatttacgctataaatatttaattttaactc

SEQ ID NO: 407097 - DNA, 641 bp, Cannabis indica
tagtgtgtgaatcagtttaccattactaaaacggaaaaaaatcaattccttagtacaacaatttcaattttaaaatataaaataaataataataaaattaaaaatatggttaaaaatatttataatattttaaattttaaattgttttgatataagctatttacataattttttttattttaaaccaataaatttaaaaatatgattaaaaatatctataacattttaattattttaaatttatattaaaatttctctatataaaatatctatataatttttatttttaaatatatataataatattataaaattaataaagaatattatgttaattaataggatattctgttaaggttaacgtagaaattcaaaaagtatcgttaaaccaaaaattttgttacatacccaaactttatatagaatagatataattaaattatcatttaaataaccaactaaattttgaaaatttagggttgttgaaacaaccttaaatatctttttcaaaatttaaaattcaaactaattttaaaaatatctaggtttagttgaattattttatcaaattaaatgaaatatctaataagataaatgatttgaaaataaccaaataaatattttacgtatcattttctgat

SEQ ID NO: 407098 - DNA, 506 bp, Cannabis indica
atcaaccaatcacaacatgacagctcagatacatttggctgacctgtcattgaatggggtggatattcttccatgacaatgactgcaaaagcaatctaaaaatttaaaaaaaaaaaaaaaaaaaaaaaaaaaacaaaccccacattcattttcatggcactatttagttgaaaaagatgagaatttttaatattattcaccatgtgattttctcacatacccacatgcctttttattttttccatcactttattaacaaaaaataattaaaaattcaagcttttaatgaaaaaaaatatagagtaatgatcaataatatcatatagggtgctttttcggtgcaattctgaaaaaaaaaaagtgtatcaatacattctttaattttttatatgaatatttctaattttattcagttatttaagatattttataaaattttgaacaatttaaaaattataaaaaacagaattcaaataatatattttacacatatataaaataaaata

SEQ ID NO: 407099 - DNA, 575 bp, Cannabis indica
cataaaaggtataagtgttgtccatacctatggaagtattttgtacataaagtttcaatttaatgttttctatgtaattatttcttttacatatataaatatctacactttaggaattagatggtatgaattagatacaacttaagtatttttataaatatgcctaatagcatcataattgtaaataaaagtaaaattttaaaaatatgtgatcaaaataagtattgggctaaaatacaaaattttgaaaatatcatatatattgaggaaattacaccctatactctttttatattgttctcttttatttttaccctcttttttaaagtctatcatttttacctctttttttaaatattgtaccaattttacccttattacttcaagatactctccatgtgactctcttatgtcagggtattttgggtacaatacatataaaaagaggtatgtttcaaataaatataaaattagatgtaaatttgattaatttattaataaaagtggtatttttcaacttacccctatatattgaggaacgattaatggagttttaaggttttctaactgtagta

SEQ ID NO: 407100 - DNA, 659 bp, Cannabis indica
gagagagagagagaggatatattcttcaaaaatccttacaagagaaaacatcaacaacatgagagggagatgaattcccccaccttcttaaaaatcaatcagtatcaaagaaactcttttgatagatatgaagaactaatacaaattaggaaaactgactcatgaaacacttttgattatctttgaaaaattgacgaagtaaccatacaaaaataaaatcaacgcaactgaaaatacacaacataaagaagaatatacctatacctattaagaaggagaaggacaaagcattactgttcacttgaaaggaacaatgggatctcaaaatcgaaaaagcaaaagcaatctctttgccaatacacgaagaaagagaaaaaaatgtaagctttgtaataaccgactgtggccttttccaagctttaagatggcaaatcaaccaaagtactatggaactgattttgcccataataataataataataataataataattacaaaaatacatgatttttttatttttatttttatttttaagcttcacacagtaaaaacaataattcatttttttttggactaattagtaatttttttccctaaattttgacatgtaccaaatcgtgtccctgaattttttttgccgttaaaaattccccctgaa

SEQ ID NO: 407101 - DNA, 884 bp, Cannabis indica
caattatatgatgaccactcagtttattggtatgctaggcaagtaggtagatatagtaggcaggttaaattagagaaattacactctataccctttttatattgttctcttttatttttaccttcttttttaaaatctattcatttttacctctttttttaaactattgttaccaattttgtctctgttacttcaagatactctccatgtaattatcttatataagggtattttaggtacaatacatataaaaagaggtatgtttcaaataaatataaaattagaggtaaatttgattaattgatgaataaaaaaagtatttttcaacttacccaggttaaatttgtgtttaaatttatatttttaaaatttttgaaaatattatatattttttttctaaataattaagaatcgaaatatattttttttttcttataatccactaatgttcgctggtcgtagcagtaagcaacataatgcttatgtaacaatcctcttcacacatttaaattttgaactatttgaagagtttttgcacaactctaagaaaaccctagctggattagttatcaaatatcttaattataattaatgagctagctatagctatggtttaacttatatcaaagaaaaaatataaggccaaggcagatataaaatgggttgttccataatatctcacaacaacattttctatgaatagcagcagaagtggtgggcatccgatccgatccaacttcttttttctcatgtgatccaatccaattagtaattggatttggaaaatcatcatccgatccaattcaattagacctcaaaaattcaatccaattactaattggattggatcggttttttaattggatatccaattacacacataa

SEQ ID NO: 407102 - DNA, 493 bp, Cannabis indica
aaaagatattaacacgtagatatatgttgaaataattttttcttttcaaaaaattatttcgacataattggtaggggttcaataatcctaataagacaaaaatactatagctataagattttaaaaaaattaatagcatgtatagtataatttgaaataaaagtaaatattttattttataaagggtaaaatagtcttaaaatacaagggtataaaatgtctttaactttaaaattccaataccacatttttattatcctatgatgggtgatcaaatatgtaattatgatagttacatttacgtttagttgttcgataattataaaatgataataattaataaattatttgtaatatgataataatctaattatatttattttttatggaaaaaaaaaatttataaatattaattattaaaaaaaatatattcttaaaatattttttattaaaaaaattaatttatttttaagtatatagttaattataatta

SEQ ID NO: 407103 - DNA, 735 bp, Cannabis indica
atttgtgagtctcgccctcaaaatactcgagtcgctcaaagagtagtcgattggaagcaaaagaagcctggagaattgcaaacagataatataaaagagatataaagagataatataattataataacaaagccaacgtaccatgaagtgacagtccaagctccttgaaagcatctcttttggactcctaagattgagaaaatcttaaacagggggaaggagagtttgaagtttgcgccaacaggcgaccccatatgcctgggcaaattctgacccagcttccccagctgcgatcgacagggtctcgatggcctgacttggagaggcagtagcgggggtcgcctcaggatgaggggcatcggcattgggaacagctagaggaggaatttgctcttggatctcattgtccgaaacctcgagatcgatagtctcggccagtgatttcttcttatgggcagtggttttcctttgcttctttggaggaaccactttggcagtagtagggactccagggttggatgtccttttcttccccttacggtccaagatgtcttcataacccatgtttgcaaaacaagacgacgcgttacaatcattataaaagctcattaaaaaggggaggagtataattttctacctaagggatttaccaaaatcactagaaggcaagctatcactagatgaaggggtagaaggaccatgatattcgctaaaatccctacaacctgtaatttt

SEQ ID NO: 407104 - DNA, 770 bp, Cannabis indica
tgaaaattcatgtatataattcagacttgtatgtattatttatttcatgatgagaatttatattataataaagagtaatttacagtgtaaatactttaattttgacttcttttttagttgtagataaatatttaagtttaatttttgaccgtaataatacctaagttatatttctggaacctccttaggtatctgatcgttatagtgttaaagtcaatattatccatgtattatttttcttattggtgtatatttaaattaatttttaaataaaaatttaatgacttagactaattaaagattgttacgtggaaatttacttgatacttaacggtcaaaaattaaatttaagtatttatttttcaactgagatttgaatttttaagtatttgtgctacaaattattttaataaaaaattaaaaaaaaaataatagagattaatataaaaaatcatatgaaggacaataaaaatattacatatacataaacgtaaataaataaataaaaagttatatgaaagataaaaaaataaaataaaatttatcataaaggacaaaaacaagtccttagggcatatccattcatggggcatgatttagtatatatcaaagtttaaggggcatgatttggtagatatcaaagtccgaggagcatgatttagtacataaacaatcactgaaacagtaaaattgaatgaaattagacaaaaatccttaaatttaacaatatcaatagttcagggggaatttttaacgactaaaaaagttca

SEQ ID NO: 407105 - DNA, 612 bp, Cannabis indica
gagtggcctgccaagtgacttgcgatagttcttcttgtacacatctacccatttttattcttatcacacgacatctcgccaactttttatattcttattccaattctcttaatataaaaggtgacgtaccaagaggattctttctcatcgcatccacagtatcatcaactccaagcttgttgtacaacttttcaatacatctaagattttgaagtgttaagtaatcttcaatacggatcatttctgcgatgtcgatgttgtcgttgatcttctccatgagttgtgccacattcttgattgttactttcacagactccaccaacatgtcaaattcaaacatctcatcttcacatttaaacataagtttttcgtatttatttttctcagcatgcttgaaatagtactcgtcactttttcctgaagtgactaaagcacaacggtcatttaatacttcagagcataatctttcggtatcagttaaagaagtaggcgtgattgcatcaaagaaattctttggttgaaaatgatagctcggcgtccctataagaatctttattttgaatctagggcgtttttgatcatgagttgaactattattgttattattattat

SEQ ID NO: 407106 - DNA, 796 bp, Cannabis indica
gtgactccttgacgcttagaatttctataatttcgggtcacatttaatataacatatgtagaaaatgtttataataagccactactttatccctattggacgtctcaattttttatatgtagaaaaattatataactcaaaaaaaaattaataattatatacaatgtagttataacaatcatgttacttgttttcgaaatatataaaataatttataatgtgaaaaataaagttcaaaacattcagctacacatacacttatttttcttataagcgtgtaaatttaattgactattttaaactttgttttgtagtatatatggtaaattatatgtaactttttttttttttgtgaaaagaaatgaaatacctacaactataatataaagcatcaaataacaataataaattataatttcatcaaatatatatataaaaaaaaaaataaataaaaaaaaaaagaagtaaaaaaatctcttactaatagtgacaaaataatacacctactataatttattcacttgccaaaagaagagcatcaacctaaaaaaataattaatcttatagaagtgaatattggaagtgtatggcttggaaatgtaataataaaggtcaaaaacaaagtaaatgatgctaaggatttagaataagaaaaagacgattagtaatagtaataataatagtatatcacgttgtttttttcatcatcaaaaaccaaaaaaaaaaaggataatttcacaaatgcacaaaaataataaaaatacggtttcacgaaattttaaacatttttacgatt

SEQ ID NO: 407107 - DNA, 540 bp, Cannabis indica
acaccatttcgattacgctttatatatttttctaaagaaaaaattgttgatgttaacagttatgtggtgtagattagaaaatttagacgaaaatacatataaaatagtgatctaagtaataaaaaaaaaatggaatatatagaatagatatatgacagttttaaaactaatatttaaatgtttgaattaataaatttgatttagctaacctcaattggttaaatttttagaaaatatatgtatgtattttaaaattaatatttttatatttaatgtgaatataattaaatttcaactaaccttaattggttagataaattctttgttgcaatgtctgtggtgtgactgtgtatgacagtcaatttatatatatatttatatatatatgttgatctcgaaaaatgaccaatcgacagcgggttcgtgaagatccgagaatgaaaagcaatagacaataagatttgttgtagaggttcgacccccatgtcatagcgggtaatgtcctactcccctttagttgtattatactgagggaattac

SEQ ID NO: 407108 - DNA, 714 bp, Cannabis indica
aaccttcaaaaatccaaccataggcatatattatgattaaatcagccctttaactatatttactactatattctattttttccttttttttttggtaataaccactatatactttcaaaaatactacatttcaatttactacttatattttggattttttttttagttacgtatactatatatggaaaattgtgagttgtagttaggggtgtttattagaccatattcaatatttttaggtctatacaaatccgattcaattatatattggagattagattttaccatccgatctgattcaattaatttcagttatccaatcgatccaacatccattggatattggattagatcggttctatccgttagatgtatttcatatatatttattggtttaatttgggtttattcaatattttagacatagtatttttggatcggatcggatccatctaatattttaggtccagtatgtattaaattggattggatctatccaatccaagaaaaaaaaagtaaaatttaatattaatttttatatatatgcatatatatatatatatattttacctataacaatataaaatttaattattcattcaaactaaatgaaaatactaattagttcgattgaaagttggatgtattggatttttagacaccccatccaacatccgatctgatccgattggatattcaaaaataacatccgat

SEQ ID NO: 407109 - DNA, 993 bp, Cannabis indica
acgtttggatgagaaattaggcaatccacaaccgatgagagagtgcgagctacgggtatagcatcgcccgcgtatccaccaatggatgctccgactcccgtcgggactatcattacgctcgtgtaatccctcctaaactgcttaccgagacggagttcaaatatcacaaaaactttctcaggatttagattctcattctcagagaagaggaagaagagctgaccttggccgagtgattgagaccgagacataaaatggtacttctacaactgctccgcttcctactgaacggtgtggattttcgggcgaaggacgacgggaatggacacccgagattacagaccgccatttttgcgaagtagcaaaaactccccagagtgttcacttatcctacggcgccgtctgcttcaattccggtgggctgaccactttttttttttttgaaaagaaaggcgttcattcgttaaacagaaaacttattacaaaatacattcctagtaatggagaaaacatcaaccaacccaaaacagttatggggagaggtacttaagcccacctagctaagttatggggaggggtacttgaggccatatcacttaaattattaattttttttatttttacactctaaaataaatttttttattatatttataaaaatttatataacaactcatataacaactaatggaacaacttaaatcgcaactcaaactcatatatcaaatggagcaacttaaatcgtaacccatcgtaaaaataaaaaataaaaaaatatatataatatatatactaggcggcaactacgtgcaaagcacgttgtgtttcattatatatttacatattatattattttacatattcataaattttaagttctattttttttacataagatgtttaaatattttaaaatattacattagatatctaattcataaaatattagttttatgttatttataatttaagatgaagaattagcaacttctt

SEQ ID NO: 407110 - DNA, 729 bp, Cannabis indica
ctaatgttgcagccagtccttctgtggtgacaggttagcttcttgtcaacgattccttttatactgtgttatttgactggggagctacacgctcatatatggcaaaacaggtaatcgatcttttgggtaggccatgtgattttattgaaagagggtttggaaccctaatgcctagcagggagttggttatctccaataggcatattaggtctatgccacttaggattgaagatatggagttgagtgctgaccttatagagctggaattaacagagtttgatattatacttgggatggattttctttccaagtattcagccagcattgattgcaagcgaaaaatggtaacttttcaaacagagggcgagcatccattcatttatgttggatcggtttaggggtctcggatcccgattattttagtgttaagggctagagatttactacacagtggatgtgtaggatttttagcaattgtgattgactccagcagacccgaaacatttgggcctgaggtagtcagggttgttaaaggttttctcgacgtatttctcgaggagttgccaagattaccgccacaacgagaaatagattttgtaattaatttggcacctagagctaaacctgtttcaaaagctccatataggatggctccaacagaactcaaggagctaaagattacagcttcaggggactgcttgatttaaggtttacctgacctagtgtatc

SEQ ID NO: 407111 - DNA, 630 bp, Cannabis indica
cttcgatatgtaccaaatcatgtcccttgaacttttttggacctataaaaaattccccttgaactattgagactgttagatttaggactttgtctaattttagtaataaaaattctaacatggatgaaagttcagggggcatgatttatacatataaagtttgaggggcatgatttgatagatatcaaagtttggggagcatggtttaatacataaacaatcattgaaacactaaaattgaataaaattagacaaaaaatccttaaatctaacaatctcaatacttcagggggaatttttaacggccaaaaaagtccagaggcataatttgatacatgtcaaagttcggggcggaaaatcataattagcctaacatgtataatgttttcaaaaaaaaaataatatttataaaattataattttacaaatcataaattatttttgtggacaaaaaaaaaaatattactataactaaaattaacagtaatattttctcaaaaaaaaaataaaattaataataatataataaaaacagaattatcaatatactaatgtagccatatatctaaaatagcctaacataaagttaattgttctatcgtaaaaaaatactgtatttttttttttaaa

SEQ ID NO: 407112 - DNA, 589 bp, Cannabis indica
taattatattaaaaaaaatgaaaatcaccatctcctaatatattttgttaacgagtttcatttatttatttgtttatttattattattaaaaaaaatcaaaataacctcacatacatgaaacacatttttgcatgagaatggcctttgaggacttgtctctaatggagtagatatttccactctaaatgggaaacgggaataattcttgtccttgaatattaaatggcatgtggatgggggatgacacttcttgtcccgacgagaactcgcttaatatattagttatattttattaatatttatattttataatatgtattgtatattttaagtatattattgtcattttataattttttaagttatgttttgtataatacttagtatatttaataataaatagtgtgttatattttaactttttatgtaatttaatatttttatacatttaaaatattaaaataaactttatttctacattagaaatttctcattttattttcgtcccattaagagattccccgtctcattcccaggaccggcccaagcattgggcagcttgggccattgcacaaggcccctattttt

SEQ ID NO: 407113 - DNA, 597 bp, Cannabis indica
aatccatatattctttagttattacaaaaaatgattttttttaatatattcttttatatcaaaatagattttttgataaaaataaataattttttaaatcgctaaattagttttaaaattttaatattcttaataattcaaaatattttttttaacatctaaattaattttttaagatttactaaaaaaatattaaatatttctcatttttatttagaggaagtacaatttaatagttgtcaaagtttaggaaccaaagttacaaatttacaaagacacatcaacatttaaaggaaataatgtgacgaaacctaacaaaaggactaaatttcgataaatgtaaaagtttatggagaattcttaacaagtcctatattttagggggtagaatagtattactgaaaattcagaagattaattattaattattctttatagagagatgaaagtattagagattttgccttatttatttaatatgttttttatgcttttttataggctaattaggatttttgcgccctgaactttgacatgtactaaacaatgcttcctgaacttttaaggtcgttaaaaatggcccatgaactattgaga

SEQ ID NO: 407114 - DNA, 612 bp, Cannabis indica
catgagtgttctaatcactttgtacaaaaaaaaaataataataatagttttaaaataatattaagataaaaataattagaataatgacttaaaaataaaaaactacccaatataattagtgtttttaaagagaataaaaatattattattataatatatattaaaaaagaaaaaaataactgacattatttcaagatactgtcaataataataataaaaatgaaaaaaaaaattaatataaaaaattatttatttatttaattttttaaaggaaaaactaatacaaaatgtaaaaatttatgttgattatcaaacagtttatataattttaaatatattaattatgtaaaaaataaaattttaaaaattaattaagctcgtaatatatataactgagaaaattttatcacactatattagccagtaaccactagtaactgtaccatgagtaactaccttgcccactagtgccatgcagacaaccaccaagagtttcacatcccatagcgatttggtcacgccttaacaacaatattaatataataacaaaatatgaagatatttttctaatagatatagataatacaaggtaagatcaataaaagcaaattt

SEQ ID NO: 407115 - DNA, 784 bp, Cannabis indica
aataagataaaataatcaaattttaaaaataagataacaatctaagaaaaaatatagatttttacctattttcaagcttcaaatttcactaatatcttaaattaattaatttaattttgataattagatttgaaatatgaaaaataaaaattaaaatacaaaactacacaaaaaattcgaaattaattccatgaaaaagcatgaaaaaatgaaaaaatggaaaaaaaaaaacttgtatttggtgcggagcgcgcgcatgatgggttccctggccgagaaaacacaacgcgggaggctgcaagcagcctctccccgtgcgcaggggacagattttagacaagttcagcccatcctggccgaaaaatcttggatagggccttgtctgaatgctcgtgcacccctgaaatcaaggggatccgcgcgcataagggaggtgtcaccacctcctgttttttcgattttcaaaaagtcataactaattcaaattaaatcgaaattaagttctgtaaaaaggcaaattgcttaattttttccatattatccaataaaaataattccagaacgaaaatccaattatttttataaaaatttcgcaaacatcaattaatcacaaataaacacatagatcaacatgaatcacatccaaatcacacatatatcgttttaagtctaaatttcttgaaagtaaatcattaccatggctctgaggccagttgttggaatatattttaccaggatcttgatttactaacaagtatatttttttaacatccaaaacatgaac

SEQ ID NO: 407116 - DNA, 570 bp, Cannabis indica
atatatgaataatcagctactataatctaacaaaatacatctacacacacatttatttaacttgtaattggtctattttctttcctcatagcatgaggacaaaactagaggacccacggtagatttaccctatatatatatatatatatatatatttatagctgaatttgatttcactaactgcaactttgagctctaacacattttgaccttttttgtttttttctttttttgggactttgctcaaatatttgatcatatgtttaaacaattaaaaaagagaagtgacattaaaaatagaatctagtacttttgtgtttagatgcctcccatataatagacatttgaggcttcggacatcaccctaagggagacatgctaggagggatgtccaaaacctcaatggctatgggagacatttaaagtccctggcaaagcatttgttacactatgaaatagtgtaagggttttaattagtaatttgtaaagggtgtgaattactgtaaatatgtaattgtatagctattatgggatatggattgagtaaatagaactttggttcaattgaga

SEQ ID NO: 407117 - DNA, 560 bp, Cannabis indica
cataaatatgatcatatgtgcacaatacacacaaaaagaggcaattttaattgacttaccaacaaagaatctcatactttttgttttgagtgtagtgtagtagcaaagccaaaaacagaaaaaaaaaaaaatgtattgttgcatataaaatccaatgatttcttatctagtctcacacccaaatataaagagaaattttatagttttatagttaggtgtcttatttttctctctggttattttacttttggaacataaataaattataattgaaaaagtttatatatgagatgtacgttatagtaataattaatatctcattaattttaaataatttattatattgaaaatatacttcaaacaattgcatacatgtttaatttttatatgttgaggtttggcctcttgagccagttgtaccaactgtttttaacagtttatgttccaacaaacttaattaattagacagtcaatactaaaaaagagttttttatttcgatttttaagttacatataaaaaatttattttagttggtgtaacggttgggttttatgcccta

SEQ ID NO: 407118 - DNA, 675 bp, Cannabis indica
ctttcttttacatttttttactatttgcactcaaactatttcatattatttttctttaattaatctacattttatattaaaaaagatcttaattaattttttttttacatttactaaaatatgattttttttttgctttctcaattttataatattttcttaacactctttctctatcttaaaaaaaattaagaggactcattttatatctttctcccttttacatgattaataataatagcatcttttggatgtttcgtaatttattcaaaattaatttacgaatgatttgcatatttttaacaaggttcatattttattatttttctattgatttatagctgcctttttattattttataattatttttatattgtattttatagttatttttctgttatttttatgtattttattttacaattattgttttgtttatgtgcattttatggtgtatattttagtttattctatttttttttgtatgtatgtgtatttattttgttatatttgtgttattttaaaaatagttttcagaatattttttttgttcaaatattatatttttagttattttattattcatgtgtattttttatggagtatattttaagtttcaaactgataattttttttgttgttgtatatgtgttgctttctagtttagatacata

SEQ ID NO: 407119 - DNA, 584 bp, Cannabis indica
tattcccatgaggatattgggaaccataaatgcaacgagaatcatgagagtttctatgatagaaaggcaacaaaataggttaagaacaaaataagaatagtgagaaaatccaggatgtaatttcaccatttcatatataattgttcctgttgatatggctgtcaccagcaagaatggaaatgatgacacaaaatttgatatcatcactaccgatgctccataatgattttttatcctttcacggttgtaaacctacatttacattattttatattaaaaaaaaagaagaaaaatatgtaatacacaggaatatacacagtacataattactaagaaattttttagttcttttttattattattattttttatttttatttatatatatataattatatatgttgtatgcataagaagagattctaactaaaaaaattaacactataaaaaatgttcttttttagcgataacttttagttacaacaaaatgttatttgtgactaaaacatagcatttagttacaagttgtcgctaatttaattttagtcataataagtattttaactaaaaatacatttagtcac

SEQ ID NO: 407120 - DNA, 543 bp, Cannabis indica
gcaacattttgcagatgaattgacgactgttgtatttgagagcagctctagattttgaaaggaagaacctatcataaaaagaatgcataaaatggagacagagaggtcttgattaacacaaggtttgcaactaaaatttaaaatgttgaaatccagaaaattgaccgacaacatatatgcttatctcatcaactatttgagaaaatcgacaagaaagatcttgtttgtcccacgcttgctagaggctattttcaagtctttaatttcgatcatttttaaacatatttaaaccaagagaaaagatttctagagcctcaatcttttcataaatgaaaagacaagaatcaaactctttcaaaggaaaaaaaaaaaaacttcaaactcaaatcattttgtttgtcataaagtagcacaagataagaacctaacctctcttgtgccccttaaatagcgtagacatcggtatcatacattgagagataccggagggattctgcaaaatcaaacagttaccatagttctcactatgtaggcactagactc

SEQ ID NO: 407121 - DNA, 1023 bp, Cannabis indica
agggtgcttaaataacatacttgtgagtagatctaagatcctggtaaaataattccaacacttcaaactcaagaaaactatagaaggagttacaagaggcttacctaaagcttgagaccaccaaaaacctgctgaatttagcttgaatttcgagagagagaaggagagagttgagagagagagtagtccttttcatgaaattttcttagttttagaataaatgaagtaaaggaaatttcttttattaatttgctagccaacataaatcaagaaaatcaaattaataagcttaataagacccacataagacaaaactcaaacttaggcaaaatgatcattttgcccttccaccctaaaaacataaataaccactaagggtttggaaaattctaaaattctcgactattcccgacattcccaatgtctaactttattgttccgctttactaaaaatactaggatgtgattctattagccaatcaccgcgttccaatgttgtggggcactgagtatgcaaaaattatgagatttctatatatgacatataacatggattctgaattcaaataaatcactataaattaataatttaaaataaataaataaatttcataattaaaccctaattatctgctaatttccaaattaaaattaagcggtctgtatagaaatactggattttttgccattcctgtagctgatttgatgtcgcaatagatctttgtagcttgttctggtaattctcccatgtcttcaagtattcttttgagccatatcgcttggcttatagtcattgctgctgcgatgtactctgcttcatctgatgattgtgcaatagttgtttgtttctttgatgcccaagaaaatattcctgatccaagtgtgaaggcatatccagacgtgctcttcatgtcatctatagatcctgcccagtcactatctgtgtagccaacaaatttttagtcacttataactctgtaccatattccgtagaattttgttccttgcaagtatctgaggatt

SEQ ID NO: 407122 - DNA, 406 bp, Cannabis indica
tgatctatttacatacatatagttctaccataattattttttgaattaatttgctttaatattctttttttattcaagagatataatttctattaataaaaccgacccaattacatccacaagaaaatttttcttcaaagagaaacttacaactcttttatattttaagagaaattttatcttcatctacaaaaaagaaaaaaaaaaaaacaaattttatcttacacaacttcttttttttttatatatataagattaagtctacgtttaaacctcttaatttaatgttatcatctatacaactcggattcatacactttttcttatttatgtataaattatagtttaaccaaatgccataaattatacctactaacacatattcttatgatatatataattttta

SEQ ID NO: 407123 - DNA, 835 bp, Cannabis indica
ggtttccaataatggtgttattgagtttgagtatttggatgataagttgttggaggatttacttgattgtcaaaatgctacaaaccatggaaataataattagttgtggtcctaataattaataataagattttattgaatattcaagttctgatttttcattcatttgtatatatttatttttctctgaggaaatgatgaaaaatgttgaagaaaaatacagttttttggtaaaaatctaaatttttatttttgggaattatgaaaaaatcgaaaaaatgagtcattttgcaataattaagttgtttgattattgattttattgaatcaaagctgtgatttttattcatgaattgttattggttatttattttatatatagaagtttaataatttgttgtcattagttttctctatgaaaatgatgaaaaatgtaaggaaaaaaatccatcttttttaggtaaaaatcaaaatttctatcttttgggtaattatgaaaatatcctaaatatggtaattgagattaatttgggtttttattggtttcattgagaataaagttatggtttttattaaatcaaagttgtgtttatagaagttcataattgtcattattacttttctcctaagccaaaaaaaaaatcagtttttttggtaaaaatctaatctttctatatttttttttgggtaattatgaaaaaatcccaaaaaatattgtaactttttattttctgaaaaatatactatgaagtactaagaaactaagataatcaacaacattcactatggactaatttgggattatatgggggtttattgaagaaggattaatcat

SEQ ID NO: 407124 - DNA, 316 bp, Cannabis indica
tgctaaaggttagttcccaatactatcactgctatattggcacaggacttattaaataaagaattggaaaaactacacagggtattatcttttgcttactttttacttttatactattatgcggtataaattatatttatattgtataattttaatactttatacaatagtgcactgccattttttaaaattttttatatttaaatttttgatagtgacttgtcacttttagtgacacttctaatttttttaaaatgcttttttaagtattatttatttctttttcaattttttatttaaaattaataataataaa

SEQ ID NO: 407125 - DNA, 623 bp, Cannabis indica
gataatgctctgctatagaaaggaatcaagggctagagatctgaacagaaggagtcattatatttcactgcacccaatgtaaggtttcctaaactttatatgagtttatttcattgttttagaaattcatattaggatgttaacgaaacatatacttgttagtaaatctagatgctggtaaaataattccaacaactgtcctcagagccatggtagttatttactttcatgaaatatgaattaaaacaatgatattgtttgtgtgttgatttggatggtttcatgttggtttatgtgcttatatgatgaatgtctgtgatttacaaaatttttccgtcagaaataattttattttgtttttgtaaaatattttatttggattccttgtgaaaaattaaagcaattttagcttttacagaactcggttctgataaaaattgagaaagttatgaattttggaagattgggtgccaaggctgtctagtgggtgcatcatgtgcacgaggcactcagacaacacagcacacgcgcgcatattgctggggacaaacccgtgtcttcaaacacggtttgggaattcagacacgcccatgaagctgcaaatcctcctccaggaggcagca

SEQ ID NO: 407126 - DNA, 780 bp, Cannabis indica
gttcatcaatggcgaagagattcaacaggaagtaactaatactacttgttttgtctagatctaatgatctagaatctaggtctatatgtgtcatgtttaagacaataacagagtttgtatttatgaaataaagaaaaattataattttacgagtacttatgctgctaaaaagaacattaaatttatgacacttataaatttaaaactttttgggctcgtttggtacgccgtataaggatcgtattgtattaaataataaataacactatatttagattaagcaatgtattgcattaattattacgaccaaattttttaatacaatgtattttttattaattaatacataataaattgtctgtattagcttgcattataatatttacaaagaatttggagtcaacaccaatcttcgacctgaatccggacccgggaccccggcttggaccgtgaacccagaccccggacccggacccggaccttggatctcggacccagaccccggactcagactcgggactcgaacccagacccggaccctaaacccaaactcggacccgattccggatcccgcacccgcacccggatccggtctcggaacacgacccgaactcggaccctggacccggactcgaactcggatccgaacccgagatcccgacccgaatcccgacttggaccccggaccttgacccggacttggaccttgaacccagacccgaacccgggaccctgacccagaccccggccccgatcccagacctggacccggacctggac

SEQ ID NO: 407127 - DNA, 605 bp, Cannabis indica
atgtgcctctaacataatatatataattattaacaatctcattaggttgttgacaaatattgggcacctagttaatgattgtgtttatggtattaagtctatgattatattagtccacaataataattttaacagtttgcagttttgaatttaataatcgcggttcaaaccgcaccgcataatatattacaaaaatactaatttttatattatgatttattttttcatgtatcaacaactcatatgtttacaaactccaaatcatacaattaaatttaaggaacatacatataaattattctctattttttttttttttcttttttaactttttttattgttaacatattattattgatatataatatgtaatataaatgtatattatataaaatttagataattcaatacaataacttaattagtatatatgttatgacgttaaaaatttgatgaaataacttttttcttatttaattattgaaactttattagactaatttttaatttttattttaggctatgtttggtaggagagagagagggtaagatggatggagagattagagaggatggggagtaagagggataaagaggattgttaa

SEQ ID NO: 407128 - DNA, 1045 bp, Cannabis indica
taacgaaaaaaaagcaaaaaaaaaaaaatgaaaaatataattaaaacgagcccaaacgaggcccattcagcggtcactaatgggcctaggcgaccatcgacaggacaacggagaagacagagacgacggagatcgtctcgaagtggcgaaacgaacgattttcgagacgaaaaggacgatcgccgtggaggcgtttctagctccgatgatgcatattcattattattcttcttcttcttcttgatgctctcctttttcttaagctgtgcagaggaagggaagcatcccattcccataggcacagttacagactcatcggatcggaaaagaaccgacttttcgaaacgccaccgcgaagaaccggaccgaaaagaaggactagtctggtgtggtggtggaggaggaagagggtggtgatgattgttgtggttttgttgttgggattccttgggaacaccgggtatgatctcccacttgaatggaattgttcctgcctttttaaacgattcatctatacccatttttcttttctttctctttccgactctctgtgtttatttgtttaaatgtaatcgtaatgttttggttttctttctctctatatatatacataaattgataattgaaattagagaccatttttctttttcttctaactaaaaaaaagaggaaaattcaaagatgtgttggcgagattaaaggcttgaagtggggtagtaaagtggggaccattattattatgtatcatagttgtgaaggagagttttttttttttttgaaatggagttgtgaaggagattaatgggtaatattttcttagtcacttaattgactttagtctctactacccactatgaaaaataataatggaaaaatatatatttaatttaaaccatcccaaacaaaaaatttaaaatttgtgctaaatttaacacacataaaaatatttagtctactattacaattatattttaatgtataagatgtaaaataaagaaaaaataattaattatattgatgattatataaaaattattattttata

SEQ ID NO: 407129 - DNA, 631 bp, Cannabis indica
tcgagtagacataggcaagatataatgactgttaagacacttagacgtataaaacacatagacatacaaactaagtgtaatagtggtgaacccaagcaactaagagcaaggcatccatctcgccatatgaagatatgctcgtggaaccttctctaatcagctccaaacatctttcaataagattcacagctctgtcgaatcagttctctctaatagatgctgacatttaaatgatgtagactcttgaagttcaccttgtcaccgagaactgtgattgccagagggagcgttatgtctttagcgcaggagcgacgagatttacattatcaaccttgaaaatatatcggaaaaactacagctcgctatcaaggtcactggtgttgatttcctatcgagacctcccagaacgttatgatttataacatgtttaatacacgattaccttgacccagtaaaagcggacgaatcacagttgtgtgatattcaaatattaaccacatttattttacgtcatatgtaatcaaaccccacgattttaggagataattgttgtaaagatatcagtcaactctgcaattaactgcttgactatgtaattataaatagaggcaagttagactgaaaaaaggga

SEQ ID NO: 407130 - DNA, 560 bp, Cannabis indica
agtaaacatgatttacacagagtagtaccactaccacctgaaactcaacactaaatttgacacgactatcttcgtaaacatacaagacacttatttttcctcacaatctcacaacagaaagcaatattattattgaatcggaaaaataaactaatgataagctttgatagagcatctacaccaaccaatgaaacttttagtaagaaaaacaaacacaatcaaattgctatgtacaatgagaatgaggtgttgagtgccagccacataggctacatacaaagaacactttttttttaacctatacatacaaagaatattaatagaaaaggatttacaaaaagtaaaaaaaaaattgaataatctttttgccaattttaccataaatagggattcacaagactcctctcacactgatgtaagtatcaacatgaacgtatgagcaaaagaaaacttctgccttgtttttctagtcatttaattttaagaatatcacaaaaatcagtaaagatggccattatcacataaaatattaaactaggttcccgcctagccctacaata

SEQ ID NO: 407131 - DNA, 650 bp, Cannabis indica
tgccaataatatcatatcatcaccaaaaaaaaaatttcatacatatttaaatccataaatatgtaaaataataaaaaaatactctcaactaaataaaattacaaaaataccctttcggagttagcagatattacatattaaaaagtatttcatatatatatattaattatttgggtcctgacttgggtggacctaaagcacccgccagagcctccttatagcaactccaacggtcgtatttttttaaaggttctaaaaatctccacatcatctaaaaatatattattttattttatttctctttcacatcatttttgacactcgtaattttaaaaacactacaatgatataacacccttcaagaatactataattataattttacatattattatttaatatactatttattttaaatttttaaattataaatattattacactacttatttatatttgattttttttattattttaaaaaagagatagtatcaatgccatgtagtagcatcaacacaactttatataatagcatctatttatttccaatagtatagtgtttttgtattttgctaaataaacaatctacataagtatcctctaaaatttaactattagaaatgctcttatgctttagggagttagcactc

SEQ ID NO: 407132 - DNA, 567 bp, Cannabis indica
ctaaacaaaaataataacatctttttcatatgatttcttatagatatccacggacatgtagatatattgactttacgtttctttcatattcatcccaataacaaatactgatctatcaaaattttctaattttttttttgttcgaattggaaaactaccaaaacccatatgagagaaaaagacgatttttgtgtagtttagggggtgggtcgcggccccacaagggctagtcgcagcccatgttggagtttcattatatggcttcatttcgacggtgatttttttactgggttgactgatagtattttggacataactctctcaatatttctcggaatcggacaattcaagatgttctgaaaaagataaaagagagatctagaacttttatgttttgtctttttccaaaatctaatcaaaagatagtcaaattcaggattgaaatttcagctttattttcttggacaattttctctattttatatatcatctttttgtgaatttttttttatctttctttcatcttattcctttgatattttttaatcttcttctattttaaatctg

SEQ ID NO: 407133 - DNA, 832 bp, Cannabis indica
ggttatagaaatagacttagaaagtaacataaatatttttacaaaagacaaaaatcaaaagacgttaaaagtaatataaaaatcaacaaaatttaatttaatataatactaaaaaataaacacataaagtttcaaagtaacaaaaaaaatatataaaataattggtaaataaaaatagtagcttattatattatatgacaactcattagtttcgaaaataaactttaaggttacccaaatatattttaataaaatagcacaatataacttaaaaatagctatttgattattaagatgtttacaaataaggttttagaggtaatcaaattatataatttaaaaatgaattttttttacgtaaaagtaactaattagtttcttatcagcatcataagtaaccaaaatgttacttttgaaaatctagaaaaataataaaaaaaaacgaaatttaggattaatttcgtttcagacatattattttgaaattaaggtattttttaatgacgtggcaaggtattattgtaattgagatttattaaggtatttttgtaaatagtttatattttaagtatattattgaaaaaatcccaaataaataaaacggtttgtttgtactgttggtaattatacgtgtcaaaatttcaacggccgtattttttttttaagttctatttacacccaacaaaatttataaaatgataaatatacttcattattaaaaaaaaaaatagggaaattctacaatgcactcccttagatacattcatgcacctgttttagcacctgaaataattttttagttaaattttttcttcgtggtcatgtacgttat

SEQ ID NO: 407134 - DNA, 1149 bp, Cannabis indica
ctgttttggttttttctgcagcgctggaagtgaatgcgttaagtttgtttattggtagagagcgagttcgaggatagttattaatgctctacaagtggaaaggagtcccgttgggttattgaaactatgtctccttttgtaatagtcacttcttctttattttctagttgtatcttctctaatattagtaggacttgttattttgtcgcccataatgtggctaagtgagcgtttacccacaagttgtttgatgatattccgttattcaccacccttttaaacattttatgtaatgaccatgaggtctaacttattatatattaatcaacgataattacttaaaaaaaaaaaaacaaaaaaaaagtgaatttaggcatatttgctaattagcatttgtatatggtgtctttcttttactggattttgtagcccattcctttcattttccatgtgttgaaaaatataatattttagatggcaagtgttgaaaaaccatgttcaatttataatttttttcccgaattttgacacataccaaatcgtgtatctcgaaactattaaaattatcggatttaaagattttcatccaattctgtttaattaagtttattaacagacacctaacatgcgattatcaatgtactaaatcatgtcctcaaaattttaaatgtatcaaattgtgctcctaaaaattccgtccacactgtcactaggtgccggttaataaaattgagtacaaagtttttgaaacaaaaaaaaatggcttttttcataaatgtacaaactaaaaataaaaataaattacaaaaaaatgtgacaaaaaaaaattattcaaaaaacttatacattttgaaaatttattacataaaaccatacattttaatcattaaataatataaatcattaataattaaactaattaccataaatagaaaactgtaattaatgtttctaatattattttataatattttatccttatgtttattatattaatgttttaaaaattattaataataaaacatgtttattaaaattcaaaacaaagaattctgtaaaattaattaaataaataataaacagttttataaaaataaacaaattaaatatttttttatttaaagaaaaaatgtttattatctattttag

SEQ ID NO: 407135 - DNA, 584 bp, Cannabis indica
ggagcaagctgtaatggcatcctttcgatggtattgagaagttatagggttccatctaaaaatatttattctatgtggaacaatagctattttttgctcatcaatcttgaaccgtatcagagtggtgcggatcggataggatcacttgcccgcaagagatatgactctgatactatgttgaaaatcatggggttctatctcaaaatcaattggcaatgagtggagtagctcatgttcttatatatggctcaattctctaccatttattctatgtgagacaatgtccacaacagatggtggccaaaacgcgataagtcaaaatattttactaatgcagtagatcttgtatttgcaagggataaaaggatcaagtttacggtattataattatgtcatcgattggtatatatattaaaaaaaaaaggtttgctattaatgattacgtcgaattgttagatatagagggattgaagcacctgaaaaataaacaaaaaaaaaaatgattggttcaatgtatatgtagataaaacgataagtcattcgtgtgtcgtatgcagatgtattaaaaaaaatttacttacctt

SEQ ID NO: 407136 - DNA, 776 bp, Cannabis indica
attagataaaatgataattttctattactaattagaattaaaaaaaaaatatatgtgagatcggatcggatatatgctttcatttctattaaatatcttttcaaattttacattaaaaaatattaatgataaaaaaaaatctctaatccatccagatttgtttttttagagtaaaaacttggcctcttacatatgttttatggttttctactttatttttaattgaattgagaaattaaaataaaaaaagtagttaaacatttaactagatatatataaattaaaaataagaattaataaaacaaatatacataattatagaaaaccatagaaaatccgtcttcatcgcttaacttatttcttcgtaaatccctcctttgaaactgtccaataagttccaataccacaaaacaaaacaaaaaaaaattcacaaaaaaaaaaaaaagccttcatcatcatcaaaatcaccttcaccatcttcttctttcttcccttcttcttcacaataataatattaaataaataatggatcagcataggaaaggagatgccagagtgtacatcatcataagtctcttcttcttgttcataatctccggcggcatcttcctcagtctctacatggtccttcccacaactccgtcatggtatcccatcctaggtttgattctagtctccattccttgggctttttggttcttcacattcatctatagatgttttagatttgctatcatcaataacaatattaaccaacaacaacaacaacaaatacc

SEQ ID NO: 407137 - DNA, 700 bp, Cannabis indica
atttaatatattgtccttttaatattttgtttagagttgtaattgtcttagtctttattcatcttattttattcttccattgtaatctctctatttttctaacatttataccgcaatttaccttattttttaagattttaagattatttttcaagatttgcagtgagaatggaaggtggacttcgagtaaaaacaaacaattttggtcaagtcctttccttaaatgataaaatatataaacatgttccagcaatgcatgtgaattgaaatgtgtaagcatttattttcttcagggtacttagtaaagtgaaaccatttattatgaagtaacattcaatctcatggtccactctgcgggactatatattttgacattttttacattttttttttttttttatttactgtaggattgaatttttttcagtattttttcctcaaaactactatatattttttatattgtgtattgtcttaaagtttttctgttattctactattattttttaattgttacactattaattttaattgttctgtttaatattttacaattattttataaaaaaatagtatttttaaaaaaaaatccatatagtagtatttttgtaaaaattaatctaaattctaatatttttattaattttccatatagcttagagtattactatattattaggtattttaaagtcgatgatac

SEQ ID NO: 407138 - DNA, 719 bp, Cannabis indica
gttaattcgccccgatgattcaagtgtcatggtttagcagaaataccacttctatctttgtgtgattgcagatataccacttctgtcattgacccactttttagctttataaatgcagatgttcatataatattaacactttacagaatatttatagatataaacttacattacaatgctatgttaaaaaaagaactaaatagaataatctactactccaataataaatttatttacaattttataattacactaatattagttttaatacattattaaataatatttcaaatataaatatttaattttttcaaacaaaaaatttgtaatctttaaaaataaaatatattcaaaatcttaaaaagactaaaatcttaaatgaaactagcaatacgtggctcggcacgtacattcacctagtatatatatatatatatataaaagcttcacttaattattaaaaataatttggtcaaagtattaataacattttttattagatttattttaataattatgtgcatgcatttctctctttctctctttctctcttattttgttaactttaaaaataatttttactatgggttctctacaaaaatacaattgtaatctactctttaatgtgaacattttaagacgtagaaagcatatttttttctctattttttagaaaaaaaaaacctatttggttaataatattgtaatacccggaatta

SEQ ID NO: 407139 - DNA, 534 bp, Cannabis indica
gcggattggaggaggaatcaactgaaatttatccttaattgcaacttggctttcctcctttggcgctcttctccatgggatatttatctggtttccgactctactatccgtgtttacgatggggtcaagttcatctagggcttaaaaagtaagggcatcaatgcggatgaagtctttttatatgcttcggtcatagtggatactatctggcgagttaggaatgaaaaggtgaacaataatttccattataatgtgaaccaatgtattgatgttatccactattcttatgcagatttgcaaagagctcttctccctattgcatcaattgtctaaagtgagatttggtggcctcctcctctggattggctcaaagttaactgtgatgtcagaataggatcagaaaactcttgcattgcggtggtggctaaacaccattatggtgaggtgatatgggctaatacggcaagatctgatttctctgatgcttgttgtggcaaggcagctgcgtgttgtttagctcttgaaacggcaaag

SEQ ID NO: 407140 - DNA, 533 bp, Cannabis indica
atcattaaagctgggtttatgctccccttgcaaggagtacttcccctggatgttgctgaggctaaagccattttgactgcggttcaatggttacaagctactaagctggcagtttctatccttttttcgaattgtaaagtagtggtggacaaaattaataatggtttttgtaataattctattttaagcaatgtaattaattgtaccatagccttgctaactcaaagccctggccttgttgtaaagcatgttcataggagtcataatgtgttagctcatgaacatgctaaaattggtctcaggcttcttagcgagtgcgtctggaatggttgtttgccttccagttatacctgttgactttgttctttctttggtttgtaatgaaagcatcaggtttaataaaaaaaaaaaacgagaatttaacaataaataaaatccctagagttttaagatttaatgacgaaagttttatcattaatttatgacgaaaattaatatgtaaatatggataattaacatatacaaattaatta

SEQ ID NO: 407141 - DNA, 1332 bp, Cannabis indica
ctgaaaagcctcttcacactcttttgcccactcgaattttttgttgcctcgcaatatattgaagaacagcacacacttatcagttgactttgaaatgaatctgttaagtgtagtcattcttcctgccatggattgtacttccttaggctttgccggtgagggcatgtctattaatgccttgattttttcagaatttacttcaatacccctcgcattaactatgaatcctaaaaacgttcttgaggaaactccaaaagaacatttttcgggtttagcttcatcctttacttctttaatatcttaaagcattctgcgaggtttgaggtatgatccctactttttattgattttaccaacatatcatcgacgtaaaccaccatgtttcgcccaagttggtttgcaaacatttcgttcactaattgctgatacgttgcccctgcgttcttcaatccaaacgacatgactttataatatatccagaatatgcgtaccataaaaagacataagctcgtgcccaatagttgcatccactaacaggtcaatcttgggaagtggaatacagtctttcaagcacgcctattcagattagagaatcaatacaagttctccaagttccgttaggtttcggacgagaacaggattggctatgcaagaaggataaaatacctcgcgtataaaattgttgactagtaacttgtcaacttcctgtgttagtgccccttgcctctcgaaatccaagggcctcctaatttgtctcttcgttgggtagttgggaataacatttaagtgatggcagataatcttagggtcaatccttatcatatctccacgactccacgcaaattgatcctggttcgccttcaaaaagcttattaatttctatttgagttgctcgtccaagttcttcctaatgtacacatatttggtgggatttcctgggtcgagaataaactcttccaattcttcaattggttttagcaagtttctttcatcttgaactcgaggatcaagatcttcatctttcttctcgttttctcttgccaagatcgtcatcagttgatgaccagctttcctatgctgcagctctatgcgataacaatcgcgagccagcatctagtcaccacgcaccaccaccacgcaatctggggcacaagaatagaatcatcaagtttattaccaagagcaaaatattcattagcaatatcagataatttctcatagaattcagttagagtttcattatctagcatcctaagctcatcaaatttagtttgaagcataataaatgtaaagcccgcttagttaatttggaaattagcagttgtttatgat

SEQ ID NO: 407142 - DNA, 597 bp, Cannabis indica
gttgagcacctctcctgacctttcaaaagttttgttggtccccaaaacaagtggattctaatattttctgaggacgaagatgatgctagaagaatctaagaaactccatttttaaggcctatgctgatgaattgtcaacctgggtgcaggcccagcctaggtgtcaacctgggcactgggccctattttttcacttcataactgtttttttccataaatgtatttgtttcccaattttttatgaagacaaattcaatgagaaaaaattatcttcgatctgacactaggaaggtgcctagactgacaaattatcaaccttggcgttgggtgcccaaggcctaaggtgctcaaaaaccaacttactctaaatttgattctgacgcctcaaacatgtcccttgtatgtctagttgatgtgacaatgcatgttttggccactttgcacaaagacggtcccaaaaactaaaacccaagtttaggatgtcaacttgggtgtcgggtgaaaccctaggtgcccatgttggctttcaggatataagtttgtgtaattttagctcccaaaccttgtattaggttgctccatgtctttagggtacag

SEQ ID NO: 407143 - DNA, 557 bp, Cannabis indica
taacttaattctactttataaaagtgttacttttcttatttcttttccaaagttatttagtgatgtggttagctgtgaatgacctttcgtttctataatatatagtttgctaataagtacgatcaattgcccgtgcttctcaattattacaatactaaagctgcttgtgatcttacttatataagaaaaaatagtaatgattaaattagttattttgtttattttagaaagaaaaaaaggataattatattaaatttattaaatataattaaagaaaagtgttacgaaatcttataattttattaaatttttatgcataaatattattttgaaatttgtgttttgtaaaagttgctaactggatattctattttgttaaatgattaaatagaccctatataaccaattgaggctagctcaagtggtcataggagggtgcgtgtgtgttggaggttctgggttcgagtcccagattatacaatgtaatatataaacgcttaaataaataaaaaaaatagactctatattttctaaaattgtacaaataggactctaaa

SEQ ID NO: 407144 - DNA, 523 bp, Cannabis indica
atggtaattcaattgagtgggagggctaatcataggtattgaatcatagcttctataagtatttagaagtgaaacgatgatttccttcgagcttggcctaatagaaataaatgattgagatctcatttcactaattatattagtttactgaaatatcatttataggtagctaagtgttttaaggataaaatacattgaatggtagaaacgtaaatttgtttctattcgatgtagatcatctaagtgtaacaatggataatcataacgtatctatatcttggtacatatagagcattctatatatttgagagtgcaactccaaatctatagtggcataaggtggaattaataacttagagaattcactttgtaaattctgtatctacttgttggaagctcggttatataagcccatggtcccttcactagttgagataatatcgcttgcagactcagttaattgattttaattaatcaattataattctaagattagactatgtcttatttatgaattttcact

SEQ ID NO: 407145 - DNA, 830 bp, Cannabis indica
atttttatgccgccacctgtagccgattcttcccttgcctttgaacgatgaaccaatccgacagccatggtagcatcattaccagtatcatcttccatagccaccatgaattacttcagccacttagctccaattgtatgattcttacgtactggcttgaccctcatccattccccatatggtttaacaatccttccatctgggacatcaaagcgtcgagggcataatttatccgaatggcccattataaaaagaatgtaggaggtgttcatacttgaagttcacccaaaattggatgtgtttcgcaacttcatacgcctcttaagtggcctcataacattgatggtaacatgaacacgtaaataatctctccataacccccaagaagttcttctcatccgattcaacaaacttaccaatataatttgcaatatccgtgactatttttgccgttttaaatcccgatcgaagatcatgtagctgtacccacatatcaacctcattcaactctatcattctcggatcttctcctttcctcagccttttaaaaatcagcaagaacttgttgaacgtccacgggctacgatcaatcatgctttgaatatctaactcatggtagaattgaaacaagtatcgattagtatccaattctttaacaatcattcctttacccgattgccaaagagatgccatcaaatgttgcatacatcaaaatcaatggatctttctatcaagaaccttccaacaatgcaccatcgatcatcataatcattccccgtagtatcactagcatcgtaggcaaagccgcctctcttcatcgtcgatacgcg

SEQ ID NO: 407146 - DNA, 846 bp, Cannabis indica
aaccggtaagcggtgtaaaacctgtactgtatttttgtaacaaccctctgggttcttacgatgaggccggtcaggctttgaacaatcttggttatttgtttgaggtcgggatagaccatgttttgaaggaggcttttgacccccaagtccttgagtatggggaccagctgcaacgatggatatctcccccattttctatatccaccaagaaacttgagatcaaggcaggaggactggtgggaggagctcggtgtgataggcccaccagagaccagctagcgcattgcctaacattcaagtggatggcctagtttgatcgtcatattgggtagggagcgatgttgcccctgcacccctactttcaagatatagccaactacttcaggctgtgtccaactcagatcactccgaagggcataaagtatgtttcatcattgtttgtgctttatacagagttgggttgacatcagcccttactctatgagattggatatttctttgattttaagtctgttctgaggcaaggccagtctggatacttctattttagccacctgggctaccagtggctgggtaacaccataacaatgctttgtcgaagattggacggtatctcagaattacttcattgcatgtgacatccagcaagtcaatcaccgatttcaaagggtgtcgacttacactcgctctattcccactcttcagctgagggatagagccaatcatatcttgtccatccctgtcgagagaaggaacatactcaggttggcttgtgaggccaactgtaacgccctgtccaacagggaccccacgtgtgtgcaatttatttaaaataccaataattat

SEQ ID NO: 407147 - DNA, 655 bp, Cannabis indica
gttataaattacttttaaataataaaaaagagttttcagtctctcgtaaacctcggacatcatctcccacaattctgtcatcacccgactcttaatccatctccaccatccacgtgtcatcatccacaaccgtcagataaaatcagcttatgaaattacagattcatcccacctagacaaaattctttctcccaaatctgccacgtcagcaaactcatcttcatatataaaaagacaaaattactgttattatttctcacgatcttcttcttcttggccgagtagagagagaaagtactctgttaagagttttagagagagaaagctgtgaaaaaatggccgagtcagggaagatgcagagcaatggaacttcatcgtgttgtaaggctggacctggttacgcttcacctcgagaagccatggatggtccaagagaagctctcctttatgtcacttgcgtttacacaggtttctatttctgatctcttctatttttattttatttaatttcttttatttctctttgataattttgatacttcgattatcctatttgtatttaatttaagtttagtttgtattctttttttcttgtaatcttagatgtattactaatcacaatctatcgttattttttactttttacttttaaagt

SEQ ID NO: 407148 - DNA, 394 bp, Cannabis indica
accttggccccttttgcctcgagatgaccagcgagtatgtctcccatctgactcgattcccgcctaaacggtacgctgcttgtgcatccttgaactccgtctaccaggttcaggatatcagcaatgccctggctgcggtaagtactttgtgatttatttctttcctcgatattttacttaaggctttcattctcactcttacttccttttccagattactgcagagaccagccgcctttccaagaccatagttaatcatggcttcgtcttgtccgaatttgggggcatagacgaggtcgtgaagatcctgcaggacttgtctgctgaaaggcgggcgatccaggaggagactgagcgaaagaaggctctgccaaggcgaagctcgaggaggagg

SEQ ID NO: 407149 - DNA, 705 bp, Cannabis indica
accgcacctcgtggtttggaaaaaattcaaaccgcaaccgcatcgcgaagaatttcaaaccgcaatttttttttgcggtgcggtgcgggcggtttgagcggtttgatgtacacccctacaatatatattatatgaaacctctccaaaaaaaaaaaaaaaaaaacctacaacaaatcttacagatatattatgtaatgtgatctgtgacatagaattatcatttttaataatttaattttttttaaaaaaaataaaaacctaaaaacatgagatttagaattattattattactattttttttaattagaaaaaaaataaaggaaaaacagaaagaggtacatattttatgaagtaataaaaaaataaaaaaaaaataaagagaattaaggagagaataaataatactaattaaagagatttttcagtatatctttcatttatatatattgttttgtttaatttctaattaagtacttttttttttaatttttgaaatgggtttgaaattttgatttttgaattttttagttattgggactagtgtctcatttgaatgtgattatatatatatacatattttatatgtacaatcgttgtgtacccgattaagcagaattgtctattattttagggattattttacaaatacacaaaaaacaacaaaaaaaaaaaaattaaaagtacggttgtacggaattttaaat

SEQ ID NO: 407150 - DNA, 1174 bp, Cannabis indica
agcagcccagaaaatggccaaacgacccagatcggaatagaaagcggcaaaggccaatagcaaaaatgataagagatctctgaaaacatagctgagtgagcgccatggattcttaacccacaatgcttaggaatggcggctcggatctcagctatcttaaacggtggaggatcactcagatcgaaatcgccgttttggtttcggatcccatttgccaccttaatggggtagtcacctttttcttctctcgccatttcctccgaagcatgtgattctgtcattattgaacgcttaagcctctctctgctataaaataaaaccaacaaaaaataaatgaacgagctttgaaaatgttgtgaagaaatttgaaataacaaaagaatatacatatacattattagatatatagttgaagggttatttatatttatatttggctaacctctttgaggttagagagaagagaaagcgagaacactggttatggtgtaatgttacgtttgtttatatagagaaagaaagctaaggagagagagtgacctaaatgaaagggatggcgctgatgatcgcacgtatgcagatgtacagcacaaacgtgtacgatgatagaagcgcactcgtttgctcttctatgccattgcgtgacaacgtaaatttatttagggcttaatgtctttttcttttttcttaacattaactacactataattttacttaattataagtttgtaactattttgtcaatgaaagttcattgttaaaaaaaaaaaaaactattttgtattctctgtgttttcttttttagaaacaaatgtcataagagtcgatataaccgatgtcatataatgtttgttatgttttttttttcaattacatcttatatgtacataattatagcacatgctaataatttctaattgagaagtgctaattataattttttagtcaatttttatgattgaaaatataagttaaaatatattttttttttaattttatttcgtaacactattcgttatagttacaatattactcttgtacatttttgaaaaattctaaatagtttacagcacatgtggtcaaaaaactcaaacctattttagacactgtaaaccattcaaaattttacaaaaatttacaaggatggtgttgtgagtataacaaataccgctat

SEQ ID NO: 407151 - DNA, 631 bp, Cannabis indica
gaacgtcatatttgaataaaaatgatctacaaggccaaaatagaaaatttgtgggttatttgttgattttttgaaacatatcaaaaatctcaatatgttagaatttaaaaatctatataataataaagtccataatattttatctcaaaattaattagttgaataacttatatttattttatagtattttttccacactgtattaggttaactccaataattatgtaccacataataattaattactaatagaacaaaagaacaaattgattataacattcagatttaagatatatatgtatttacatatatataaaacacattaatatacttattgactatgattcactctcaattcattgcaaaataatgtcatgatagagtatatttatttacaacttgttaataataggctaaatatgtgtattgttttgtataaattataaatttttcgaaacattcgatacataattaaaaaatattttaatttcactacttatgaaagagaaaaagctaaaattttgtttaagattatttatggaaaataacatatctaacatttattattttttgtttaagagagtactaagactaataataatcacgagtcatgatcactcggcgcatatac

SEQ ID NO: 407152 - DNA, 562 bp, Cannabis indica
actggaacctaaacaagaactgtaggaccaggaccgtggaacaagacttggaccgtgacgaagacccagacccagacctagaacaaaacagacctagccctagacccaaaccaaaactggaactcgggctcggagacggtcgtgtagctagaccgggaccgatatcaggagttggacctaaatttgggattcgatcccaaacatagactcagacctagatagggatccggataagaacctgaacttggacccaaacccacaccgggattgaaacttgggaccaagatctggttcgagatcttgacccaaacccaaacctagacccaaacccagacctagactcggaccaaaactcataccccaacccagacacaaaatagatcccgaaccaagacatagaatccgagtgtgggtcagtgtttcagtccgggtccgagtccttatatagttttgggtctgggtccaagtccttgtcttggtcctgttcttgggtcccgatccactttttgtttcagttattgtttcaactcatggggtacgggtcgagtccaagcatctagtc

SEQ ID NO: 407153 - DNA, 696 bp, Cannabis indica
agaagaacgggaacaaacgagcacaatactacaacgatcgtggagcccggagcccatactaaaatccccgcttagaaagaccctgacgtaatccaaatcgaccaaaatgtcgagcaagtcagcccagccgcacaggcccagcttgacgagttgaagaatatgtttgatggcatggccggacagcgtaacaatgagcttgagctagaccgtgctcacggaactcctttctcaccagagatcaatctcctgccattgcctcacaagttcaaaatgccaacgtgaaagatgtatactgggagagaagatcctctttcccatctcaagtattttgagatgcaaatggatttacaaggagtacgtggggacgtatgctgcagaatcttccacgccactctgtcggaagcagcacagcaatggtatttcaagttggctcctagaaagattagttcatggaaaaccctttcttcagaattccatgcacaattgtcttcctcacgtcagctcctatttcatctagtggtcgaagtaaagcaacaacctagcgagccactctaggtatacatcagcagattcatgacgaaagcagccaaagtctcgcgggtaatcgaggatggaaagttatccgcgaaacgggggggcattgaagtccttggtgaactatggaaggatataagaaagtgttggaaatttatttta

SEQ ID NO: 407154 - DNA, 569 bp, Cannabis indica
aaatttattcagttccagctcacagtaaatgttgcagcacttattatcaatgttgtggcggccgtatcttctggtgatgttccgcttaatgcagtgcaggttggtgtcctgggtctgtttgtttcttctgcggtgccatttagataggtttaattatttattttttgtttgctgcagcttctttgggttaatcttatcatggatactcttggtgcactagcattggctacctgaaccccctactgatcacctgatgcatagacccccagttggccgaaagtaagttttctctataagttgctttagtgtgtttttttttttggttcagaagtgttgttttagttagtttctaatataaaactcaaatttagaacttttgaaatataatcgtctagtttagattcttttggggtgttattttctcagaagaagtgtggatggttggaatagtgagctatggttatctgatgcaaggttaattggaatatatgaaacgttgtataatctgctgttgaaattcgacagtctcttcctgaaaacctgaactttccttttattgaccttttgag

SEQ ID NO: 407155 - DNA, 733 bp, Cannabis indica
atgtccattagtactgtttaattaggtgatgaaattgatgccattatgagttagtcattatcagattctttgtagctgacatttatataataatgctgatcattttagtcatgaacacattcaactttagttttatccataatttcatgcttgccaataaaattcacctcaatatatatatatatagtgcaagttctatgatttgcttttaatttgtgaatgcagtcgatcaagtggatcaaccaataatgatatatagtggagtagttcatgatagtattgtgatttctaacttatgggtggcctgggacgatttttaattaatgtaatctatgtagcggatattatcattactagtatatgccgactcagatagaatgaaaagtggaaaatataaatattatactattgtctatgtcgaagcaaagaaagattaaaatcctacatattaagagtatctaatttatttttcttatctataacttttagatagatgttacctttaattattaacaatttagagattgatttttaattttctcttttattttacacacatttaaatttatttttttttgatgaataagaattttattgctccaaaaacacacatttaaattgtgttttatttagtatttaaacattaatttttaatttatttttaaattatcttaataacatattacagttaattatatcacttattaattattaataatatttttttcaatta

SEQ ID NO: 407156 - DNA, 648 bp, Cannabis indica
caaatgacactctccgtttttaatggtatacggatgtgaagcaatggtcccagtagagagtaccattccctcccatagaagggccaactatgatctagccaccaaccaatcattgttgcaagaatcactagatctcgtggaagagctctgagaggagtcacaaattcgtctggctgcataccaaaggaaagtgacaaaacacttcaattctaaaatgaaaaaataaaaagttctccataggagacttggtcataataagggtctttccagcctcacaagaccacaaagaggggatgttacgcccaaatcaggaaggagcttatgagagtaaagatgaaataggctttaggacatacaagcttaaacaaatggatggatccctaataccaagagcatggaatgttgatcaaagaagacctattgtaaaccaagaccctgttggataatggttttaccaggatctagatttactaccatgtacgttgtttaacatcctaaatatgaatttctaaaacaatgtaatttaaacacatatatgttgggttttatgccctaaataaaactccatttcaatgtaatctttattatttaaatatcaataaagaaacagaagtatttcatcacttattatttggtttcatgttatca

SEQ ID NO: 407157 - DNA, 713 bp, Cannabis indica
taccaattgaattgattttttttcttcttcaaaatttgtaaattgtccactcatggttatatatatatatgtgtgtatttatatatatatatatatatatattcaaagtggtttcttatactttgctaattttgaagtgatgaattgacttctcatactttttataattgtattttcaatttagttattttgtgggaacttcaaattttatgtaaaaaagaaaaattattatatcataatttgttaattttataaaaatctcaaataatttttttaaaggattttatttttaaatgtttatgttttaactaatttggaaacattaaaaaaatataatttaaaaaactcaaaatttttaaaaaattaataaaatatttttatttttatttgataaaattttaaaaaatatatattatctttaaaattttaaatttttaccaagattgaaaataaaataatatatattttattaaaatatgactaagtaggctagattaatactattaatcacccattatacaatttttacaaagattactaaacacccttatataacctataatacaacctccttaatggtatctaaaccatgtgggatttttttcttctcctaaagaactctctaatattgagtcaaaaattaacaaagttaattaaaaaatataaaaaaaaaataacaaaaaagaaaacatagggtaatagattgttagaat

SEQ ID NO: 407158 - DNA, 509 bp, Cannabis indica
aggcaggttttttgggaaattttaacactagatgccaaatttagcatttttttaggaaaatttgcaacataaatgctcaaattgttgagtttgttgcatataagtacccaaattttaaaagtagcggcaaaaatactcaatttatcaatttgtgtgattccatccatacctcttttaacagttcagttaagtgttgattacaataacacatgaatactctattagtccaactcataatttcttaaaaaaatatttaaattaatttaaaattatgaaaaatattactatatagatttttaaaataaaaattattaaaatattaaattaaaaaactttatcgaacctaaataatttctacaaagaaaaatctaaattaatgactatcttctcttctaaaattttctacttcctattttatcatctgttaatgcaaaaaatggatattaacttaaattctcaacaaatcaagataaaaaaaaataaaataaaaccacccagatcaaatcaaa

SEQ ID NO: 407159 - DNA, 1120 bp, Cannabis indica
gtttgttaattatttgatatatataaatatattatttttaaaaacttttatattcaattaccaaacacttataaaagctcttcaaatagaaaaaaaagttcttttgaaattgaaatccaaacactaaatgaaaaatttaaacttttacttctcttcttctactgtactaaaagtaaaagtataagtaaataacttctcaaaagttattttaaaaaaagctaaaaaacttttaaattaaaaaataattttttattgtttatccaaacacccctaaaaaaaggactttatttatacataaatatatatattttaataaaatatatatagtttattcattgacctaatattaataattttattccaaattataatatatatgcataaatattgtatttgatcaaataatttatgatgatatagtattaaagattatttattgttgttacatttatttaaatattttagtgtgtttttgattttttttttttttttgaggtgcctacatttagctacaacctttcaattagaaaatattttatttagtctcaaatatattctaaaatagggattctagtatatatattatatacagattacaaaatatactataaacaacttgcatggactttgcaataaattcaaaggtaatggaccctcttaaaatgaatatatcgatgcactcatatctgttttagcatttgaaataattttttagtcaaattttttctcatggtcatatatgttatagttatttaagacatcctacaaatttttgaaaaattcgaaaaagtttaacacgccgaaaactacgtttaaatagtgtattgtacgcgtgactattttattttacacgcgtgtaaaatagaatgtttgaacattgatttctatattgtaaattattccgaatttctcaaaattttgtaagatatctttaatagatataacgtacatgaatatgaaaaaaaaattaagactaaaaaatttttctgaatgccaaaacaagttaagggtgcaccaatacatctcttttaaggggtgcattgtagaatcacccaatactattttggatcctgtgttttgcaaaagttatcaattatatcttctgtttttgttaaatgac

SEQ ID NO: 407160 - DNA, 897 bp, Cannabis indica
agggtcgagcaatgcagtcattgaagtcactaccgttcactttgtacacatcatgaactagactgttagtaattgaaaaactgcaagtacaaaatatatatttcatcatggattactcgaatatatttcatcatcgattactcaaaaaaaatcataataataataagttttttcatttttacactttcaaaattaagtttttttttttttatgaaaaattctcgtagtaaactcatataagcaaccaaaagaataacttaaattgtaaccaaaatacacataacaatctacatatataaaaatatacggaacaactacaaaacgtaaataatttaaaataaattaaaaaaatagtatataaaataattctcacaataataacaataattaataaaaaatatgattaaggaatgataatattattattacctaaagtatcaccaaccatgaacattttgtctttggtccaatcggagtaattgaagttaggtttccacccattctcatctccaacaacatattcagtcccaaaagccattttgggaaccacaattattgttgcaatcaaaaccaacataattattttctttaaaaaacccattaattaattataattaattaaattaaaattaatctatgtttttttctttattttcctgaatgtctctctctatatatatgttttagcaatctctttatatataggtatgttttccattgaaattttcgaaaggaattgaacaataatattctctttaatattatacatagtacagtttggctaattaaatagttaattatacccctatacagaaatctttggattacacgtctctatagctacaaattaaatcataataaaataaaacagagaaaatataaaaatatatgatgatt

SEQ ID NO: 407161 - DNA, 274 bp, Cannabis indica
gcattattactttgctattgatcgtaggaaatgagggcaatgataaccactcgtgtaatttttatttttattataaacaatgattactagtaatcacaatacctacattcatgaatggtaaaaaaaaaaaggacaagaggaagccaacataaatttaggtgcagtgtctattaatgtgtatcacaaattttaaaatttactcctttaggtaaaactcttgaattaaaaagagtaatttgcggtaaaacccccccaactatcaatttacttgcaa

SEQ ID NO: 407162 - DNA, 999 bp, Cannabis indica
aaataaatagatattctttagttattgtttaaaatgtattagagaacattatcccacatggattaaatataaaaatattgaaccatatatgtaacgtccccacttcaagcttctattccgctcttacactcacaaaatgatagctcttatacacgacaccgtcactctggctgctttctgagatgacgactgaccctacaaacctcaaaccaacacgagtctttctagggtactttgtcctcactcgcacacttcctgttaaaacttctcaagagatcacccatcctgaaattaccacaggtcaagcacgattaaccgtggagttctttcgtgatgagctactgaaaaataagatacaccttgttgataaaaggtagtatcaatcaatacatttaagccctcttcaattgtgtagttccatacggtatttccccttacggatcacgggactactcactgtcacaatcacccccttacgggattcgacgtcctcgtcaaccacactttcagttagatcaagactcggataccatttgtaacgtccccgcttcaagcctccattgtaacgtcccctcttgaagcctccattgggctattacacccacggaataatggttcttatacacgagcactacaagaaatgtcatttttaccagcacagttcgctactatgctgataaaagtaacttttaccagcgcatttcgcaaactgcactggcaaagagatcaaagtcttaccagcgtacatttgcagtggctaaaatctaacttttaccagcacatttacgcgctggtaaaagtcttttttgccagcgctttttattttatgctggcaaaagttctaataccaacattgatttgccaacccccttttgccaacacatcacaagtaaattctattttaccagcgcaataccaacttttgccagtacaaaaatgtgctggcaaaagtgacatttcttgtagtggagtacgccactctggctgcttcatggaatg

SEQ ID NO: 407163 - DNA, 816 bp, Cannabis indica
ttaaaatataattatattttctgggatattacaacctacttcactacagatgaatatctaagatattcaaactccactaaataaagattttttaagttttagtgattatacttttctctaaaaaaatagttatttgtgcgctcttcaatcaacataaagaacccgatacctataaaatatttaaaatattaaattgaaagcttactcaaacaacatcacactaatagctaaaaataattgaagttaaccatgcgaaacacttcaattttttctaatattgttaaatattgaaagaaaaaataaatagattaccaagtctaatatagcacctcaaaatttttcaaatgctatcaacaccgataaacaccaacaaataattaacaacacacaattaattaaataattaaatcaaattaattaaaattaaacttataataaacttttttccctaacaataatcataaacttataataaaatatttatttacctaaatttatacaataatatattttactaataataatttttaattttacctaaactaaattaaaacaactaattcacttttacaataacaaataaaataaataaacattttacctaaacttaaatcttatatattttaacatatttttctaaatattttttactcgtcatattttttacaataataactaactttaatatacattaattttcttaaaccacatcaaatatttacacattaaatttatatattcacaaataattttaaattaaacacattaaatttaaatatatatattcagctaaacaacatatgtatataaatatat

SEQ ID NO: 407164 - DNA, 946 bp, Cannabis indica
gaaagaagttcaaagagttgggaaaaagggtcgatgagtatatagcaacccacataaaaattagtggagaaaccactttacaaactcaaattataaatttaaaaaaaaataaaaaaaatagtacacggggtaataattaatgatgactatattgggaagatagataatgataaatttagcattttaaaatatactcttgggaaggcaaagagtttttgaaacaaaaaaatgtatattatatattagaaaatcccgaaattggtgtcttattaagattttcgccaaaataaatgtgtattttttaattgttaaaatattatctttttatttgaaagagttaaaatattatctggggaaggcaattagttatgggggtttggaaacatagaaaacaaatgtatcttatattagcatatggtcgaaattggtgctgcttaaaatattatatacaagagaaaaaagtgtattattattaactactttgtttttttcgttttttttttttttatttgagtgtacagtaaactacttgttagacagtatattgggaagtgaaaattccctgttgcaagtcccttgcttagtgaaaattcataaagtaggcatagtctaactttagaattataattgattaattaaaatcaattaactgagtcttacaagaattatggtctcaactagtatggggaccatgggtctatataactgagcttccaataagtcgaactgaatttaccaagtaaattccctaacttattaattccttattgaatccacacttagaacttggaattgcactctcagtcatatagaacactctatatgtttcatgatatagacacgtcattagttatccatttttataatcctaatgtgatcaatcaccctctaatagatgatctacattgaaaaggcactaagttatcgttacaccttcaatgtattt

SEQ ID NO: 407165 - DNA, 560 bp, Cannabis indica
aagtatcagcaatcgcagcaagctcattttcatttcaacaattgttacacaaccgttacagcagcctcaacaactccctgaacaaatggctcatcaatttcaacaattttagatattttagacattcatgcaaatgatgtcatagtcgtcgtcgccaaatagcccacaagtaatgatgcagatgatgacgcagtcgcctcagacgtctcaagtctcacagtttcggatgccacaagtgatgtcgacacaacaaatgtcacagatgctgcaaacttttttagatgatgccgacaccacaagccggggcaacaatatgagcagcggacatcacatatgccgacaccacatgggcaacagactgctcagatgatgacaagttcccagatgcctccatactacctacagatgacggatgctcctcaaccgcagattctaagagatgttaatgatgatgatgacgacgcaacaacaaatttcttttagtatttttattttagttatatgaactattacttttatgtttatttatggtttataaatattcactttagtaagtatta

SEQ ID NO: 407166 - DNA, 570 bp, Cannabis indica
gaataattctaaaaaaaaaaaatggtagatgcatcattattaagtgtgtctcccattattcaacgttgatattatatcagtttaacatggaagagtgaattaaaaataacttctcattttaaaagcaaaaattaatctcattagtatactagttcaatatttttttaaatatattaaaaaatatattacataattgtttttttaatatctccaatattttatatataatcattaattttgggagtaagatttaaaaaattctcttgtcaaatggaccatcttgagttagttttgtcatcacttcaagtggccgaagaggaccaaataccttttttagaagaccacacatctcattatttcaattaagggtctcctctttctctttttactttttagtccctcacaaagtccaaggacagagtatacatacttatgaggattattgttatggtatgcggtgccaccaaggtgtttaattaacacttctagacatagccttttatatttaattagtaattttttataatatttattaaattaaaataactgagatttaatattaaattatac

SEQ ID NO: 407167 - DNA, 786 bp, Cannabis indica
gtctggaagtcttctcaatttcagggttaataggcaatctggcagttgctccttgacgtagcataaactaattgttcttgagaaaagagaaaaattcgaaacaaacagaattaaaactgaaattgaaaagaaaaaaccaaattaaaataaaattaatttttattaatattaactaacaatcctcagcaacgacgccaagaaacttgttgtggtaattttagcacacaagtatacgtatcgtaaacaagtaatagactcccaaagagtaaggttgatcccacaaggattgtagttaagtactttaaaattaaatctttacttctattcagctatataaaatttaagagaaaattaaaactagaaaaatcaaaaaaaaaaataaaacaagaagcaagtaaattaataggtaaattaacgatgattaaaagttgggattttcgatttcaattgtatctattgattatggtttaacatgattcaattccaattaccaattctatgcaatagcaggtttactcaagtaatttatagtcttctcagatatataaatctcaattacatgtaaattgtctacgctcgtgataaatcaaacatgtaaaagacattaaacataaaaatcctataagctatccggaccatatacgtacttatcaaaatttggttatattttattatagcataattgacactcacttctcagattttgtatcaaaatcataaacatttaattggtgatcaggcaatttaaagtaaataagtatgaataaaatagaatacatagaaatt

SEQ ID NO: 407168 - DNA, 896 bp, Cannabis indica
ctttttttttttttttcttcttcttcttctatcctcacgcacagccatcttcatccttgaaaccctagccgccaccacttcctccaatgtctacctcaacttctcaaacccgactcaaccctctaagaaacacatccatttctctctcatccaagctccctctctcctccgctttctccgtctcgctcaacccccggtggcgttagcagtctcgtcgcctggtattgattgtctctactggtcttgcccaagcctacgatcctcgtcgccgatctcctcggtgcgcctaggcttgatctgctcaaggacttcactaacgttgattgctcgtataatctttacccctgaggagatcggtgttggctgtgcgtggagctgggaatggggagtcgagtcggcttcgtaccgcgacgatagatagaggtaatgctcggtgtagctaaggtagtggccgccgtggagggcatgagattgttgtcgctggttcgaggagatggagctggaaggtcttctgggtcgtcgacttcgtcgtcattttgatcgagatcaagagggttttggcaatctgggtttgggggatttggggatctgggtttgggggattcagtgatctgggtttgggggattcggggattctagggttatggtggattagggttttttgaatgcaaggagaaagaaaacaaaaagaaaaagaaaaagaaaaaaatataaaataaaatttttaattttattttttttaatatttaaagaaaaagatttttttttattttttatttttaaaataattattttttttattttaattttaaatatttattacgtggactaattaaattgtgccacgtgtacacagtgtacacgtggacattccaacttggcacttaacagctaaa

SEQ ID NO: 407169 - DNA, 546 bp, Cannabis indica
  modified_base (478)..(478): a, c, t, g, unknown or other
  modified_base (519)..(519): a, c, t, g, unknown or other
atttagtgcataaaattccaacaaactcctatttgtactaatataaaactaaaagtgtattttaattaatcttgtcttcttgatgttcaaattaagtgtggtatgtgatattgtcattgtaatataatctgacaggttgtattcaattttaaccttctctactattacatctccttagtcacaaaatctttgatattgtaaaatttctttctatatgtttagtcctcttagggtattggattcttactgtttggaaactatatgtgtgttatcaggaagtaacactagtagttaatcctgttggaaattattttaccaggatcctagatctactcacaagtatgttgattaacaccctaaactatgaactttctaaaaacgtactagaaataaaaacacaatataaaagtttaggtaaaaccgttaacatttagggttgcgagcggaacgtaataatagactccttcccgtttccagntaatctagcccttgtatccttttcctgtagcagagcaattntacataatctgaacctgaatctctttc

SEQ ID NO: 407170 - DNA, 838 bp, Cannabis indica
  modified_base (137)..(137): a, c, t, g, unknown or other
ttggcttagcatcctctttggcataaaatattttatggcttgaaatgatctgtgtcaaaaatcaccttattcccaatcaggattggcctaatctagtcacaagcaaaaactatggccaacatatccttcttggccgngtcataaatcagttgaaaattattcaaggtcctactagcatagtagatggtgtaaaacaccttgtcaactctttgctcaatacagccccaactgcatagtcacttgcatcacacaataactcaaacgacaagtcccaattcagtaatgactatgggagcaaaaatcagcttctccttaagatttaaaggcttccatacactcttttccatactcgaaagacactcccttagaaaaattctataaaggcttaaaaatctttgagaagtctttactgaaacttcaatagaaaccagcataacccaaaaaactctgaatccccttaactgacacatgagtaggtaggttctcaatggctgacaccttgattttgtccacctcaatgcgcttcttggaaattttatggcctaatacaatcctctatttaaccatgaaatgacacttctcctaattaagcaccaaatttgattcctcacatctagtcaaaactattccaaaattactcaagcaatggtcaagcaaataatagaaaacgaaaaagtcatccataaaaaccgcaattcatttcttaaccaaatttaataaaatagccatcatacaccattgaaaagttgctagtgcattacataacccaaatgacattcttcgaaaagaaaaatatgataaggacatgtatgttggaagttattttaccaggatctta

SEQ ID NO: 407171 - DNA, 909 bp, Cannabis indica
ggttttcagttatattttatcgttcgtgttcttgtaggcttagaaaaaatatagatgagattgattataagagaaaccaaggccaacttcacaagcaaagcaaaggaaaaaaaaacgtctttaactttggagggttgcctctaagaaagccccttattctggcttcttgttcttgtttttaattttaaaaataattaataatagagatttaaaaaaaataatgataataataacaacaagtaatctaatttggctttttttttttgaaggataatgtggctgctttcaattaagtctttttcttgcaaaaaagaacaaaatgttggctgctttcaataaataaatgttagtagtagatttgaaccaatgaaagtttttgtttgaaaagtacccctcctataataattattaggcacttttatttatttattgcccaaatcaagtattgaaagtacttttaatgcaaaggaaagtttgccatcattaatgtgcagaaaaattgtagcaaaagtttttaaaaagcttattttagtgtagataaatctttaattttaaaaaatagccctaataatttaagtttgacattcttatgagtctgttcgttatttttttaacaggttagttagtttctctctaaatattacgtgttgatattaaaatgtggtataaattcctaaaaatcccaaattgaagattctcgttagtctttatgtacttaatttaattgtttcgtttgttcttctaaaaaaatatcatgtgttaattttttgttggttaaaattattattttaattaaaattgatttaaaataaacaaactaaataaataaattattttaaaaactaatttaattaaccttttttttttattcttttctattattttattctttcttctttcttcttctaa

SEQ ID NO: 407172 - DNA, 572 bp, Cannabis indica
ggggatgtgtcgctaggaatggaaccgagtttcctttgacgatgagctagtgctcgtcatatgacttcatgagattgatattgctttcaattctgatagctacattttctggtgtcgagatgatctttctcgtatacatgccatcttacaacaagatagacgtctcactgtctgtcatctccagtcaccgaactatttatacttagtttgtataccgtgtaatatatgctaagtgtttttatcgttatcgtctcttttctacgtgacaaggttgaagcctcgtcatggacacttacactctcatggtttgtcgtcgacacataagttagcagtttgtacgtttctatctcgtagaagactgttcagccaaccgagttataagcatactctgcaaattgtgtcgctaacgagttgttctatgccaagtgtacttacaattacgtgtttgatttctttgttcttcccagctcgacacgtttcctcttccaatgtgcttaccgaattttgggtatacattgccccttaaaagttatttttaataaaagagctttttaatgattacaagggtattt

SEQ ID NO: 407173 - DNA, 390 bp, Cannabis indica
ttgggttttaaaagctgacattccgttatcttggcatatcgataactgctaagaaattgcctatagttgaatgcgatagtttaatagagaaaatggtacaaagaatcaatgtttggagttcgagaaacttgtcttacacgggacgggcaactttagtaaactcagttttcatagctattcattcttattggtctcgactaatgatacttcctcaaaaggttctacatgagtggactgggtatggtagcttgggatgatttatgcaagacaaagaaagaacacagattgaatttagaagaaccaaagaatggaatgaggcgcctataggaaaattgttggaaatattttaccaggatctagatttactaccaagtatgtttcattaacatc

SEQ ID NO: 407174 - DNA, 559 bp, Cannabis indica
tattgtgatccaaatttgaattcacgtttttgttacgtgagatatttgctttataatttgacatactattggagtaaagttttttaacaaagtgagctatattctgtatttacatcacttatttgcatcttcattggagatgctcttagttaacatcatcctacagttgtatttattggaacgaagtaattcagcatagcaaggtaaactagtgtgaataggacataaggagcaatttggagtggtacaacgaagaactttttagaattactaatttgatgactacggtaaagttgaagtttgtatttaagctaatgacaagattaagtaagagattcaatatcagcctcactctacatcgtatttgttgatttcagaaatctagattgaggttcctacagattcctaaaccatacatgtttgctagattgatgagaatgaaatatttgttaagtataaataaagaaagactctacaatttatagtagttcactccctgtattgcaatagtaatagagttacgtctacttcaagtttttattgttatattatttttaat

SEQ ID NO: 407175 - DNA, 520 bp, Cannabis indica
gtgatcatttttatatgataatgaacttatttttttatgaaagaattttataaatgaattaaagttcattttaacgaagaacaaaaaaattagtcataatacatgtgatgattattaataaaatataaaattaatataaaaatgaaaatcttaataataagaatttaaaatttattttttctgaaaaataaaatttcaataaatttgaataaaattaataattttgtcaaaattatctaatttaatttttatcttaaactttgtttaaaatttcgcctaaaacattgtacaagcttgagaccgccctatatatgaccatcctcatttttaatacaaaaattaaataaaactctttaaaaattagctttatttgttagagattttataacaatggaagaaaatcaagacattacaacactattgcaatataatacaaggatcaacaaagagattaaataaatattacaatatataatatacaatatatatatagatattatatatatatatgaaaggtaga

SEQ ID NO: 407176 - DNA, 570 bp, Cannabis indica
gttgtaactgcgatacccaattaagagcatgaaaagagtttttgcctccatctcatcagatctaaaacttccttgaacaacttttgaacaagcagcaacaaccactccattatgatctctaataattgctccaacccctaattttttctggtctaaattggtagctgcatcattgtttaatttgaaaccattaatacgtggtggctgccaagtttggtcctgctgtatacagactgatctgggcaaaggatgaacctaattatcagctacaacagcctttaagcaaggtcttttagcatgtaaaaattattcatggtaacttgttacatattaaacaatagaggcagcttgacgtgatactccaccatgaaaggctctgttactatcagtccatatcccccacaacaagcaagtaatgacctcaaaatcttcctgattatggattgaagaaagatgatgcaaataatcaccattaaacatgctttgagcttgtctaaaaattaattaaaaaatttggaaatgcttccatattgctttagcatgtttacatccaaagagcgcatggccaat

SEQ ID NO: 407177 - DNA, 740 bp, Cannabis indica
ctctctctctctctctctctctctctctctctctctctctctctctctctctctccttggaaactaactagggtttgaactttttcagctcaatttaaagaatttccagcaagcttttagtgtttccacccaaggtaacctctctagcatcttgctctatagatttgttaagctttaagttaagttttgctttatttttgggagtttgggtgttgtagcttctagtgttgttcgaaattgttttcaggagatgagttaaagtttattatgttgatttgaagtgtatttaagggttgttgtgatgtttgaacaagctttgagtttaagaactcaagctttgctctttaatggtagattttgattctgagcttgtttagttattttgttgcttggaatatgtttattatagtatatatagcaggtctagaaagtttggtagagtttggggttgaattgaggctgtaatggaattttgtgtaattcctgcactgaactagaattccagttcagggggacctgtaggaactggtcgatcgattggtccccaggaaaccccacagaactgaaattagggaaccggtctaccggttttgggaaccctagtttttcctatttttacgatatttagagtatcgccatgttatttattgataaggaaacttttagtttcaagtttaagtccccggaaagtgatttagcatatcactcactagttttttgaataatgtgatttaggggcc

SEQ ID NO: 407178 - DNA, 533 bp, Cannabis indica
atagtttaattaaaaattttgacctccaaatttttatatatattaaattatatctttgaattttttagaattttttttcaattattgagattgttaaatttaagagtttttgtccaattttattaatggacatctaacgtcaataaaagttcagaacattgatacatatgaaagttcaaaagtgacatgatttggtatataaacaattgataagttagaaaaattaaataaaattagataaaaaaatttaaatccaacaatctcaataattcaaaataaatttttaacaacataaaaaaaatcaaaaaaaaaacaattcaatacatctcaagattcacgagataaaaagtagtttaattatgtctaattctagctatattattatgccaaaagtatacgatgagaaagaagtaccatttcttcctactactactaatttagctgtatatataaatttcaaagtcaaagtttttcataaagtaggccatgtacacctattcctctcctatcatttctctgtccaaaccaaatta

SEQ ID NO: 407179 - DNA, 611 bp, Cannabis indica
atttttttatgttgttttgatgttattttcttgttactttcatgttaactttttttatttattttcttgtattttataaaataccgtaaaaatataaaataaaaaactttgaccgtaaatatgtaaaacattcatagaaaaatagtgttttatataattattctaaattttaatatacctacttactaatattattaatttaaataaaaaaaacttcataatttgttataacatttataatactcattttgatttaattcaaattaatttctgttaaatgttgcttcaaaatttaatttatttccctttttgtattgtcttttgaattataaagggctcttcccttttttacccttctacatgaaatttcaatatggtttacctaactcaaatttctaaaattcacaagtacataccatttgatatttattttgtgatttccatttgatatttattttgtgatttttatatttagctatgattaagtagttcattttatatttttacaaggctaattagtaattttttcccccgaactttgacatataccaaatcatgccccttgaacttttttggccgttaaaaattccccctcaactattgagattgtt

SEQ ID NO: 407180 - DNA, 675 bp, Cannabis indica
tgcatcgattgatccattttaaggaaatgtattgtaaaaataacatttttaattttataaatacaaataataatatataataatattaaaaaaaaaaagaaatgtcgtagctacagtgccacgacatatataccgtgcactgtagccacacggcatatatgctgtaaattttggtgctacgttggatggattttatacactaaatgcaagttttaatgcaagttaagaaaaaatgttaaagggtaccagtagtgcataacaccttcatatgtgttaatatcgctagtaattcaactaaatattgagtctcatataatttaatataataacttttaaagagtatcgctagccaatcgcaacacgacatattaagaagatgctaggcactactggtgcctaatagcaatgctctaagctaaaattatacataaaaaatcgctaattaattataagatagtgtcaagtaccttagtgcctcatagaaatttctacaagcacactcttaagaaaaatctactaatgtactccttactcttttttggcatttgaaaaaaaaaaaaaatataaattttttataggtgtaccttaagacgtcttagtaaaattatttcaaaattttataataagatatattaaataaataattataatgtatacagatataaaaaaaaaaaa

SEQ ID NO: 407181 - DNA, 660 bp, Cannabis indica
aatattttatattctgcctgttcagttttgctgtagcagaattaccttctgctgctgcaaacgcttacagtttttatattttcttatatacaactgacatttacaaaaacacggtttttcaaatttgtatatggatctctcattctcgactctcttcgatcggaagataaaattttcacattctaatcaggtataacttagtttcttgtttacgttataaatctaattttattcttacacattgtaggcatgatgattgttcataatttattttcctctattttagaacgattcaaatgtgattattttgtttgtgatatgaaatttactaagaaaaatcttactttagtcaaaataaaatttgtgactaaaagttgaatttttttttttctaattatatataaattatcattcctacattgtgatcctaaaattactactacaaaaagtacaattcccgtccgtttttaagtgtcatttaaagaatttgcgtcagtttagaaaactgacgtatatgccatagtcgcaaatagtttttttattaacgtcgtttttcaaatgacacaaaaaataattatctttatttaaaaaccatcacaaaatatacattcttcttttttattttttgcgtcagtttggaaataacgcaaaattgtttgt

SEQ ID NO: 407182 - DNA, 664 bp, Cannabis indica
ttaaatttaagttaaggaaggacgacgacttttttacgtttttagtagtagggacgggtacgtttacggttttttttttttttttaacattgtataacatgtaaaaaattgatgcaaatttatattttagtattaaaagttgtataaagtaaaaaattgtaacaataaaaatattgggtttgataattaaaacactaaatataaatcttaagttcaaaatgtaaaatacaaatactataataaatgtacttctattggaattagaactcatgacctttactatatgcatgaaatagctttaccatcatgtcaaacttgcattatgttcataaatataactttcatttataaatatatgttgtaactagctaaaatgcatatacatatatttcccgatttaatttttttaaggggggcgactgccccacctcgcctctacgtgatatttaacaattgaattcattagaaaagaaatctgatttataataggatatagttataatattgaaaaaatataaaaaaaattacaaaaatataattgtacagcataattttacgatttaaaagttttttttttttgccaaaaatacagactattaatattttcatgtaattttttgttgtaatttttttttattttcttattatttgtatgttatttttt

SEQ ID NO: 407183 - DNA, 721 bp, Cannabis indica
ggacactaacactgaatttgtagaaattttgtgcgtcactaaaaatcacctcaattttcagcaagaaaatatatcagaacagtcccatgactacccgagaacaattctataaggtccgcactttcataactattctaatacggtaaaacttctacaggtaaacaaatttttttaaactaaaatggattaaaccttaccttaagctttctcgctctgagaattcactatcctgctaaccggagcttaaatcgctaagtctcggattgaaaatcaaaaaaaattgatagggagtgagttttgatggaggacgagagttttgttttcatttataagtttaatttataaacttatattatatatattgttacgttcttatatatataataatatattaattatattattatagtaataatataatataataaaataatatattaataataataacagtattattaataataatcatataataatattaatgaaaatattttactaatgtcctattaattcttagccactaaaaatttctactcttacaacactaagcaaaatctcacaaactcttaattacgctaatacctatattatttacataacacaatattccaatcaattatatcaattaaactctttgtgacattattgccccaatcaagtctccaaggtcgccaaacctaaaaatatttttatttcacatgtagctcatattacattc

SEQ ID NO: 407184 - DNA, 689 bp, Cannabis indica
gttccgcactgctcataatatactactgaaaaagtacacaacatactaattttctttttttttttaaaaaaaaaagaatatatatttacacatatttttcgtgtattttcgtagataagatatttacaatataattttgtgctatatatataaggttgtagtgtactacaccttatgttcttgtcttagggcccgtttggcacagcttttggaaaagctaaaaactgttttttgaaaaagctgtgaaaaaaatgtgtttggcaaaccgtcaaaaacagctttttcaagaatttttggagaagctacagctaaaagctaaagctgctctaacccaacttttagaaaaagttttgattaaaagactataataattttttttgtactaaaatcatatttacttatttattacatattaaaaaaataaactaattataataaaataaataatcattaaatctcttgttttttttaaaaaaaaaaataatttatattttattttaatattaacaagcaacatgaatctagaatttttcttatatacttgagtttttaatttttttttttttacatttgataaaacataataaacaaatgctataaattattttttatcaaattcatacacatttatatttgaaaaaaaattaaaaatatatataaaaaaaataaaatattatataaaataaatt

SEQ ID NO: 407185 - DNA, 675 bp, Cannabis indica
gggaattacttttcaagcctatgtttggattaaccacagatcagactgtggtggatgagtatgaggctaaattggtgaaggttctggatgtgtatgagaatcggctctccaaatcaaagtatttgggtggcgattgcttcaccttagctgatcttcatcaccttcctaacttgcaaggcttgttgggaacaaatatgaagaatcacattgagtctcgtccccatgtcaaagcttgggtggttgatataactgcaaggccagcttgggctaaagttcttgcaatgcttaaagcctaggcaaaggttagactagtattgagcaaatttggtcattgaataaaatgaggaattgatgtatttgactcattgtcgtgtttgtcattgcttttttgttgaacttcaatgaaagttgattaaaaatataaaaagtttgtagtttttacattaagaatgaaaaagtgttatttttcaactcaattactaaggaatatatactaatttcccaacaaaatatagggaaatttacaaaaatactggaatttgggttaatttttacaaaaatactgtcacacgaattttttttcaaaaatactgtgtttttataaaacaccagcaaaacacaaagcagaacaactcaaaacaacagtagaacaccagtaaaacaccagtagaacac

SEQ ID NO: 407186 - DNA, 599 bp, Cannabis indica
gctaatcgagtcttggatatgctccgttcgtttgaaatagcttcgggccaagtggttaataagcagaaatcttcggttttctttagctccaatactagggaggacaatcgaagacagatttgtgcagttttaggaatgattgaagctgatgctaatagtacttatttgggtctcccaagtacgattggtagaaataagaacgctgtgttgggatttctgaaagagaaggttctaaagcgcatcaaaagttgggatactaagttcttgtctcgcgcgggtaaggaggtgcttatcaaaacggtggtgcaatcgttgcctacttacgctatgagcgtatttttactaccggttggggtgtgtaaggagatagagagtttgatggcaagattttggtggaaatcttcttggaaccaaaataagggaattagttggatgagttggtcccgcttagcgaagcataaatttgaaggaggaatgggatttaggagtcttcgtgattttaatattgctatgcttggtaagcaaggttggcgattacttataaatcctaattctttggtgagccgagtattcaaggctagatattatgctcatggaga

SEQ ID NO: 407187 - DNA, 529 bp, Cannabis indica
ttaaaattttattatacttataatattaaatttaaaataatttacagtttattatacttcttgtatttcaatgtatcttaatcgtattatacattgaaagttgaagctgtcaaatttataatctatgattttgttgttttttattttttttatttttaaaagaaagaacatataatttagttcttcattggttttttttttctctgataactttgatgtttctttttgttcttccaggttttgaaaacaaatctttttactaaatattataaatttaaaagtaactattataaatattcttaatttatacattaaatataaattaagtatgtaaaataatttattatattagatactatagtaaataagaattggtgcgttttcacctatttcacagagaaattatattttctaaaataaaaataaaagtaaggtaagtggtctcgaactcagatcttctcaacaataaactagtggtacaacaattacaccaaattaaattatttgatattatttggtttacaatata

SEQ ID NO: 407188 - DNA, 637 bp, Cannabis indica
aaactaacagagcacatggctaaccaccaatcctatcgaaagctgttctaggagaggacttgttcctatacttgtctgtctccgagaatgcagttagcgcgaccctagtacgggaagaggaaaacacttagcatctcgtgtactatgtcagcaagcgcatgatcggagcagagacgcgatacccgatgatcgaaaaactagttttctgcctcctaatggcctcgagaaagttgagaccttacttccaagctcacccaatcaaagtattaaccaaccacccgctccggcaagtcctacaaaagccagaggcgtctggaagacttctcaaatgggcaatggagctaagccaatttgatctacactacatcccacacacttccatcaaagggcaggcactagcagacttcatcacggagtgccatgaagctgaagctaccgcaaacatacccacaccaccagtcccagcgtggaaggtttttgtggatggcgcctccaacgagaatgggtccgaagttggagtcacgatgatatccccgaacgtactttgactccaggcagctttacagtttgaattcacaacttctaacaatgaggccgagtacgaagccatgatagcaggactcagattggaaaaaac

SEQ ID NO: 407189 - DNA, 557 bp, Cannabis indica
cgagtttcattgatctcggtataaattgtgtagattagcacatacttgtcgtgcttcttctattttttcttattcttggttgattccttagagtcatctttccttttagagtctcctagattgtcagccttcgtctagacggtacttgtcgagacagtgctaggtttacttcccaaactattctttaacaacttcatctcttttcttgcttcctctttttgaacaaacacttgagccctctcattgaactcgttgatgtttttcactgggcgaccctacaagtcatccctccagcagttgagagatcagtcgtgatccctgcttaaagggcagtaagttggatactgtcgttcaaatttctaacccttttagcagctgtaatgaaacgactcaagtaggccttaagtgtcttgccaagctactgctttatgttagtaagagaagacgctttaggtcgtctgtttcttgctgtctggaactgtttcttgaagtccttagacaactgttcccaagaggtgattgaacgattggtaaatttgttgaaccagctgctcgct

SEQ ID NO: 407190 - DNA, 550 bp, Cannabis indica
tgataaatatatatatcaatgttatattaagtgtgattattataatagaaaatattgttcttttttactaaacatttacaatttaaattttaaaattttacttacagatatctttatttatctttttatcttaattcaaatttaaactcactaaatatatcttatcttttatattatattaatgtaactatataacatagtattttttttaactattgtatttaaaatttaaaccccacatattttaaaaatatccttctattattattttttttactcaattcacataatttaagaaatatctttttattattattattttaaataatgtaatacaaaaaagtgtttatgtttatgttgtaatgtcattaccgttctactattaatagtttttttttcaaaaaaaaaagtttatagatatttttttaaaaaatagaaagtattataaaattaaaattattacgattaaaataaaattataatcaacaatttttttataaatattattatatttttttttatataaatatcacttaaattaaatattttt

SEQ ID NO: 407191 - DNA, 606 bp, Cannabis indica
aactaatgaacatcatctacactatttgacaaacatattatttatcacatttaatattgtcacttaattatttaatcttaatattatattatataataatatatcattctctcgctaaattaaatttatttaattaactagacattatactattgagtaatataatgcataccttctattgtattcaacaagtctttctttattttttaagcaagaaccgttttaaacaaaagcaaacacgtagaattactaatttttattacacctagtcattttaaattgcttgatagtacattacaattacgataattagaataagaaattaaaatactatgggctcgtttggtacgccgtataagaatcgtattgtattaaataataaataacacaatgtttggataaagcaatgtattgtattaattattacaactaaattttttaatacaatgtatgttgtatcatttaatacataacaaatggtccgtattagtttgtattataatatttacaaagggacccgggacccggacccagatgccgacctcgactcgggacccagaccctggactcgggacccggacctggaccccgaccccgaccctgacc

SEQ ID NO: 407192 - DNA, 544 bp, Cannabis indica
tacgtacttttagatcaatcactcatatatatgaggagaagctagtgaaataactaataatagaatttggcaaattaatagaactcatccacataaacttaattaaaatgacagcttaaatatattcttatgacaaatgtaagcatatgtattgcaatgctaaataatcagaaattcttggagtaatatatactatatggtatttattatatttgaataattagtcttctttcaacttacactaagttgtgcttctagtataaggatttgttaataatactccttaaaacatgattttacaacacatttattttagttttattgtaaaataaatgaagtagtaggtaataattgataaataaatacaaattaaatattttttactattattacggcctcaatgaataaagagtacttttttataataatttatatttttagttttttaatcatttaaagtaaaaaaatatatatttaatttgtatttatttatcaattactatttatcgcattactcgtttaataataaaatatatgataaaag

SEQ ID NO: 407193 - DNA, 892 bp, Cannabis indica
atctccatgatactcatctcgataattgtaatgaatctctagtctgatgagtgaaccgtgaaggtctctcccccacttcatctattggcgtcctcgacaacatgctcacacgtgaatgcctgaccgcccaactcttcatgcacaccatgccatctaaaagtgcatgcaaactctagcacccctcttgactttcgcaggctcacatgacgactaagtcccactggcacagccctctagcctccactcaaactctagtgccatcttaacacttgcgctcagtcttcgtagccctactggcttcatagatgcattcattccacaactacgcatctctaccgatgctttagtgtgacttacgcccactggcgctttaacaagccaatacatcccactcaactatctcggcgcttccatatggatcaaataaaagtcacatgcgaacacctccaagtacaaccatccactgatgattgggcctctgcccccttggtctccatgtgcgtccctcttgacacacccatgtagcaactgaagcattccatgtctatctcaaattgaaccatctcggtcatcaactctcgaccactatcatgactaacaagaatctaggggcccctgcactacttccacacccatgccaacaagcttccttttgagcgcctcctgcagcttacgatgtcactcaggaaaactcagcctagtgtaccaagcatacagtatggactacccaatcaaccttgtactatgctaacaagtttcaaacattctgttccacctctctacaatcacacgcggtagttatctttctagcatccttccacacgcctacatcccctctaggataggccaaccaggttcacctcctactgagataaacctggctctgatacca

SEQ ID NO: 407194 - DNA, 784 bp, Cannabis indica
atatatgcatgtaaaaataattaggataacggccagtgacggaccccagaatttttactttgtggggacttatttatcataaaaaaaatatttataactacattataatcactcttattaaatttatctaattttatgggggctattctactattttggtttataattattaaattgaaaaatttacatttaattttttaaaaggcaatatttttgttagggggggctataattagttaaaaatagaatgggtctgtcgtccctgataacggctatttaatgaggatgttgaatttagtatttctttttttttttttacctaatagaagacttctcaaaaaattatatattttatgtatgttgaaattaaatttaatagctaattgcttgcatgcttgtatcataattttcatatcttaatttatttgaaaaaatttaaacatttatgaaagttttcgtatttaaaaaaaaatatagaattacaatttattctcatgtactaacgatataaaaaaaaaatacaattataggtaatgataattagttctcacttttttatgaataaaagaaaattattataaagccaatgccaaaataaattcaaagatttgaataaactcagataattctgaccacaaaaggcttgcatcatcaaaagagagcgagtttggaagtgataaaactaggaaaatttacatggtatactaacttttgttatttttttataaaaatactctcaggagatattttttatttttttactgtgtttttttataagtttcat

SEQ ID NO: 407195 - DNA, 508 bp, Cannabis indica
aaaaaaattgtagaatattttaataattataataatttatgagaaaaaatttaattaaaaaattaaatatatattgtagaatatttttcttatattatataaattaataattaataattatataaaaaaaaattaaggtggaaaacagagaggcaaagctacttttatgttttttttaggcatgagattcactttattggtttagtagtgatctaaaatctaaattcatatttggaatcctattagaaaactctagaagatttatatatattttcaatttatatttaattagaaaaaaaataaataaaagagtagaatatcaaccaaaacataatttgtccttacatgcttaaattcatatcaaccacagaatatcctaaaatcattaaaaaatcctacataaaattaaaaaaaaaaatcaattaataattttgttgtgaatctgaaaggaaaatatatatatataaggaacagctcatatcaattcatatagcaataagatacctat

SEQ ID NO: 407196 - DNA, 670 bp, Cannabis indica
aacaataatatatgatgtaaattttgttcaattgaacaagtactgatatatattacatatatatattgtttcatagtttatagaatccattatgagtagaagtacagtaaaaacctttcattcttttgtacactttatataagtgagaaatattgtcgttttccatttctacttgtcgtttgtcaaaatgggataatggaccattacattgggtaatgggctttgataccagcccaactctctatttgtgtttctctttctaaaccaaattctcactatgaaagaagggaaaaagaagtctatagaattgattagaaatataataataaatatacaacttttggattattaaaaggattaatactatttataccctcttaaaagggatgtactaatgcacctttgatttgtttcggtatccagaagtaattttttagtcttaattttttttttatattcatgtacattataactatttcagataacttacaaaattttgagaaattcataataatttacaatatagaaaacaatattcaaaactgtctatttttacacgcgtataaaataaaatagtcacgcgtgcaacacattgtttgaacgtatttttcagcatgttaaacttttccaaatttcttaaaattttgcaggatgtcttgaataactataa

SEQ ID NO: 407197 - DNA, 861 bp, Cannabis indica
aataatcgttagaattattagcgccatggcattaacagcggtcccgctactaataattgtatatatatccaaccccgacctttggtacctgtttcagtactttttttgtctcgtaagcttttttagacagtcaattttgtgagttcaatctatgccatttaaaacgtcacgttgtcgtgaggtataaaaactacaatgattgtgctaaagaattaaatgtctcaagcatacgacaattatagatcttttaattacatacaaacagatacgtcatgataagatagagtttatttaagatttagttcataaaaatactaataattttttttattagaatttgttataaataatttaaatttttaaaataactataagtatttaatattatatattttgtaattttgtcacttaattataatattttctttaatttcaacattttcaactgttatcaggtcgttgattatggttgaaataccttgtagatagtcaatgtaagcataaactacaacatttgagtgatatgaacagtgatcgataccaatctaagccttttgattaggaaagtcaataagagcattaccgattagattagtgtaataattattaatctaattagaatattctggatgcaaatttaccttatgcaatttgttgtaagcgtatttgcacaatattcattttatcactttataaatgaaaacttaagtagtttagaattctaggagaaaagagagacgaaaaaattcaaagaaaaaataaattcacagttaacgaccaccactggactattaatatgtactactcttgaacatgcggtatgtttatattggtgcacctatatttttatttcaaatttat

SEQ ID NO: 407198 - DNA, 626 bp, Cannabis indica
tttcaggcagaacttgaattggactgggagaaagataataaggactaaatggttctcctttggttgcatcattcagcggaggcctatggcttctaaattcaggtttgtggttgggaaggtgaaagggttcaagagttggattaatggtgagtgaatggggttttcggatgagactgaaatggaaatgagagaaggagtagagtgaagaagaagaacaacaaggttgagctaagaagaaggtgatggccatgggagcttttggtaaccgattacaatgtatagttaaaaataatcttcaacaaaaattgtaaataaatcccccgttttagaaaaataaaaactaaaaatgaagaagataaacaaatcaaacattataaagaatctaaatctgaaaaataactctataaacgagagagaaccctaacctttcttaaatcatcttggctgttcttagattgaagataaattggagaagaacttccaatcaacggaaaggtgtttccattgaaagaccattgatttagggatttgaattctcagtaagccgtcgtcaaggggtcgtcgaggggttgccgtgttggaaattattttacaaggatcttagatcaactcacaagtatgttgat

SEQ ID NO: 407199 - DNA, 919 bp, Cannabis indica
gtcaaactgctttccgttaccagacactatcttttgtggaaaatctatatctttacatgatattcttgattacgaagtttaggacctttttggaagtaactacgttcatgggttttggttccacccatttagtgaagtaattaaatgaatgctttagaaattaaataactgataagtaactaagatgaagaatatttacatgatttgggcattaattatccctagtccacgagtcagtatattggccttataggattttcaaaggtattacaagtggtgtttactacagaacgagaaatagtggtgtttattacaaggatggtatcttttgtcctgttaacttttctctcaaaaaatattatcttgacaaattttgtcttaacaacttttatatttttcctatttaattaattttaaaaaatatttatttattacaaaaataaataataactatttttccaattcaaaatagattttttaaaatgacattatagtactcattatcttttcccttcacaatgtttcaaggtggcgatttagggtaatccgattggcttttctagtcaatcagataataatactgacttgtggactaaggcttattaacgcccaaactacgtaaaaatctagagtgttatcttcctattcgattcttttaaattatattttctttagctttattattaaataactcgttttctaaaaatatcagtaaacaggttgaaatattctctcaagtagttgagagattctcttatcaaaaatattagtaaataatttggttatggatatttatttgaataattaaatatgatttaattaattgaatattgactactataaatagagatctaatttgagaaatcaaaacacacttttttctacactaaattttgaatactattggaattattttacc

SEQ ID NO: 407200 - DNA, 756 bp, Cannabis indica
actatgtgattatgtgtcaattaacaatttaaattgaccaaaacccaaataataaatacaaataggtaaaaaattggtctgactcttcatgccaccccacgcgacccaagtttttttttttttttattttcttgggaaagaactattaaaaactacatgtagttttgtaataaatgacatgtagttcatgggaaaacaacatgtaatttatgggaaaatgacatgtagtttgtctagaaaagacgtagtatatccatgaaatgatatatagtttccaaaaaaaatgacatttagtttatcagctaagtcaaaaacgacatgcagtttatcaatcaacccaaaaatgattaacaatactgaaaaaaggacatataggggctgaaaccatacaaaaacgacaagtatttttttgggatcgtcttaaacctcttgatgggtcatgctgacctggtttgacctatttattttggactcaatcaccgacccagttagatttcagcctacggtacaccgtttttgatgtcgtttggggggtttcggtccaattttcataatctttcaatttcccatacctattttcgaaaaaaaaaaatataaaacctgaaaaatatttgacccatttaccactattaataaagcttgaaaagtttgttgttcactgaatttttgacaagaagaaacataaaatatagtctcaatcattgataaactcaatactcatcatctcatctgatttttttagcattaaacacaaat

SEQ ID NO: 407201 - DNA, 768 bp, Cannabis indica
gctcaaaacaagtcctggaacactatcgataatggctggccgagaggtccactagagcactgtcgtgcatggtggttgttcccggtcgatgagttgtattagggagagaactatgggatctgaaagttcttgagaagggaaacacaaaactgcaactcacttggctcaaagaggctcgaacttggccagattgaagttgagaagccttggctccggcaagcacctgacagcgacgaaatggtgaagggggaacacggggttggggttttcgatgtctggtaatccatttctggggttcgtgtgggctaaagaggaccgattgaggtggtccgttcggtcctctgttaaaggaatattcaagcaagagcattataatcactataatcaaatattaatccaatgatgctcttacaactatttaagatccaagcatttatttagagcattaatgggtaagaaaacatacctcccatattgctcatcccatcatattgagccattaatcaatatccaagtccaaaacacacaaacaatatgctagagagtgaagagtaatcaagagacaattgtggagcaaacccacttatgtctaaccatcaaccttaacacaaactatccatccttaatatatatatatatatatctcacatacccatctaaccctaaagggttatatagcttattgggttaataaggactaatgatggtggactataactcaatgggccaattatagtcatatgggtgctctcatatgcctctaaataa

SEQ ID NO: 407202 - DNA, 620 bp, Cannabis indica
atattaaaatgtaattatttaatgaaaattattagtttaacgaattttttttaataaaagtaaacggttaaaactaatattattaaattaattaattaattttttttttgaaaaaaatgttttaaatattcaatttaatttaaaagtattaacaaaattaaatagttattttttatgtatatataaattctaaattaaatttaaattagatattaatttaattaattaatactactttataataaatttattagttattttgtttaaaatgtcaaaacttatttatttattttatttttaaataaaaatattttgacatatttttttataaataaatttaaaattaattaaaatttatatatttaggaaatataattaaattttagggaaaaaacaggaatattctaaaaaaagaaaaatattacaacaatactatgggccggcccaatgaacatttgtacagcccaaaatgaaaatattacaaaaataccacttgcccttaccttcagccgcacgtcacaaacggagaggatgaatgaagctccatcgatgcagtcagccacgcaaccagaatgaaaccagatcgaacgtaaaacaactgtaaatcccgtcgaatttca

SEQ ID NO: 407203 - DNA, 678 bp, Cannabis indica
atggaggctccctttcatcaaaagcagagagtgtttaccaagcaagttcgatatggagctcgggtagctacactcgaaaagcttcccttcgttctgtaaaatgaaccggttagtttccagttccgccgagaaaaccgtcggttcaccgaacacgtgggtagtgaatatcgacccaaacttgttgaccctctcatcgataaagggctccgggttctccgtcttatacgccgagatcagttgaagggtttctccgattaagggtaaaccaaggttccccggcggcaaccggagccgccggtgcctggatgaccggaggaacagaaggaagaaaaaggcggtgatgattgataaacagaggaggagaaaaacaggggattccatgttgagtctctttttcttcttatttgtacatattgttgtttttttttttttttttaggttgtataatctttttctatatgaatacgtggtatgcgtatatatatgtgtgtgagtgtatagaaataatgtttatgaaagagaaagaaaggtgagttttttggagtttttcgtaagaaggcattaatggaagatgtaggaaagacacgacgaggggtagtctactactatctactcagaatctgaataaggtaagagaaagaaatttttttgggttttgtgggaaaataaaattgatgt

SEQ ID NO: 407204 - DNA, 502 bp, Cannabis indica
aaaacaatataaaaaacttaaataacaccctaattaattatttcacatcggattcttgaaatttagcatcaatcgacacataagctttataagaccatcttcaataggagatgtaaaagttgagctatatctagtacaaaaattgattttgtgatatttttacatcaatttttactgtcacgacccgagtcctaagccgtgacagatatgtaatatttataacttgggtagtcaagtgtcacactttgcaactattgttggaagataatacttataaatgatattttaatttatattacaaaatacttattcaaaaaaaaaaaactcatatatttataaagaaaatactaataaaaataaccaaatcaagatcactcaaaaatatatatataaaaaaaaaaaacaaaacacaataatatcctcatagttatatagtcaacgaataaataaattaataagttaataaaataaccaaataatatctagcattcatcattcctca

SEQ ID NO: 407205 - DNA, 634 bp, Cannabis indica
actccacccacctatcatgtgtgtgtgccttttcattttgactattaagcctcctcctctgccattcacacgtgcgatataaccttcaattacgactcaattttgtcgcactattgggtcactactccactggcggaaccagacaaagggtcgttgaggccaaacatattgtattttattttattttagttttttttttttgtggtgagtactagtacaaaattacaaattttatgaagtttacatactaaatataaatttaattttttaaaaaataaaaatcatagactaaaaaaaaaaattaaaaaataatgacgaaaaataatttagggtaattaattaattacttcttttatgtaaaatattatttttttcattatttttttaactatttttttttaattttcttataaaatatttttttaaaaaaaaacaaaaacttattttgtcaacctttacaaagaaaatttaactatatatattatttaggattcttctacgaagaatttcctaaatgtcctatttataggacatttaatagcttgttctaaatgggtaagtgtattgtaataccgtggtcttagaatgtaacatatttaaattaagattgattaaaatatttttttattcagct

SEQ ID NO: 407206 - DNA, 670 bp, Cannabis indica
agattggattcgattctattcattagtatgtattttatatgttatttattggtttaatttagatttatctaattattttagatagttttggaccggatcagatccatctaatattttaggtctagtatatattggattgaactggatctatccaatctaaaaaataaataaaattttaatgttaatttcatatatatacatatatattttacgtataacaatataaaatttaattacttatccaaactaaatgaaaatactaattaatttgactggatgttggatgtatttaattttttatacactacatccaatatccgatacgatccaatcgaatatttaaaaataatccaatccgatccaaatcataattgaatatctaatgtttatcggtccattgtaattggatcgatcgattttcattggattggatcaattttatatacactcctaaatacagacaaatcaaatcagtatctaagatcgtaaaactacttaaaagcgttttaaattttgtgaaaaaactatttattttattcaaaaactttcaaatataccattttatgtagataatatttttataagacctctcaaagtttaaaggggtgagttgaaaaatgcctcttttattcatcaattaatcaaatttacctctaattttatatttatt

SEQ ID NO: 407207 - DNA, 654 bp, Cannabis indica
ctccgggtgtcttctccgggactcatgctaatagcgcttcctagtggcataaaaagacttagcaaatcttttcaagttatctgatccacgtgtcccttctcgactggtccacgtattttgggcgaattctggagcaacacaaagtaacaacaaaaaataatatacagataataaaaatcaacaacaaattaataagaatacaacataaaagaccgtattttttgtaaataaaataaaaaaatcgtaaaacatatttaaaattccatgaaactttattaatttttttcattttttttattatttttgtgtatttgtgaaattatccttttattatatctattaaaaatttccatctttcaataatattataaaagcataactgcatacacgtatatggtatattagtaagattaagtattagatattcatattaagaaattctcatattaattgaaatatgtttgatacgataaggatattaaattatatattgaaattaataatattttataaataaattatatatggacgtcatagagtgttttttagagtttttttcaataggaaatgtaagagttgtgtcacatatataaaacatttaacataaaaaatttattttatggtataattagggaactaatatgtcactagtat

SEQ ID NO: 407208 - DNA, 587 bp, Cannabis indica
aaccaacaacttgaagacaatactaatacgacagatacaaaaaatgtaaacaattttgtcatagcacttttagatcggtattataatttaaatttattttagacaaaaaatcaattcaggatcctatttgtactattttagaaatacagggtccattttgtcatttaacaaaacacaaggtccaattggtaacttttgcaaaacagagagtccaaaatagtatttacccttaaattaaaggtaaaatagtcattaaccaatcaccccttataacctcataattaccaactattcataattattcctcatacctctagaatatcaatctataccaatgtgacatttttggccaatttattgagtttcagtattgccgaacacaaaatataaaatcaacttttatatataacgtatctagaacaccaagaattcaataaaatctaatcattaaaaaattatatcataaatgtctattccctatttcataatttactaatgaaatgctaattttcatatttaatcatgtggtcattataattatagtcgtcacgaggttatttttctagttatttcagttgtttaataat

SEQ ID NO: 407209 - DNA, 653 bp, Cannabis indica
ccaacactcacacacctacttataatcacttgagctagccccaagtagttaaatacagtgtaattagtacaaccgacttatatcttcattaaaaataatagaaatatagttaagtgttacggcagtggtaaatttttaatggtccacgtaatattaattttaaaaaataattataaatatttaaaaaatcaaaaaatcaatttttttttttttattttttttaatttaaaaaattatttttttttacttttttttttactttttcttcttctttcttcttctttttatgcagaaatcctcccaacccaataaacaaaccttattccttcaaaaaaatcaacaaaccctaattctcatttgtgttcaacattaattggggttctttttgatttgattttctttacacgaagtttttgtgcaatcttgatatattccctctggactatttccaaacaggtcaccctctggaccattccctgcaaactcaccaaccctttctctatactctcagatagctccaacaagctacccacaaaaatcccatttggtcactcagacgaattcgataccgaattcatggcaaacccatcagctataatcaaatttggaaattgggtatctgtagaaaaagtgattggtttgtgatttaaaaa

SEQ ID NO: 407210 - DNA, 983 bp, Cannabis indica
gactcttagttggattaagagcaataactggcaaaaagttgaagtagagaccgatagcctccttgttgttcaggctattagaagcgatcacaatatgtcctccacttttggtttaatcaccaaagattgtcatgctttattattgtctctaactgatgttaatttatgttttatcaaacgatcagcaaatcgggttgctcatgttgttgctaggcatgctcgatttctccctggttgtagtatttttgagtataatgtctggcctgatttacaggctctcttgtattcagaatgcttttaattcaatgaagatgatatttcatttcaaaaaaaaaaaaaaaaaaatttatgcccccatagcataatttttcattgtagttaagggttcattggatcacatccaatggatttagacccaaccgatccaatctaattatttattggatgttgaattttgtcatctgatccaatccaatcaaattgagtcatccgatccgatccgatccaatggatatattagattggatcgatttcaactattagatgcattgactagttttttatttgattggattggatccatccaatctattttagctatcatttaagttaatttcattaaaaaaatatatatatatatatgtataaaaacataatttgaaacttaataatctaacatgggtaaatggcggcaaaatccccaatactttagttttagtttcactaaacccccacaacctaaatttctgcgggtaaacctccaaaactactattctgttagcaaaaatacacttccgtcgaaatttagctgttaactgccaggttggactggaccgaggacacgcggcacaattttattggtccacgtaaaaattatttaaaaaaaattaaaaaattaaaataaaattaatttgaaattaaaaaatatatatataaataaaaaaaataatttttctatttttttttcttttattcttttcttt

SEQ ID NO: 407211 - DNA, 567 bp, Cannabis indica
attaagctgtacaacaatctacttcttacatagttcaaaaaaaaaaaaaaaacaatctactctttcaatctatcatcaactaattaattggatacaaatataaaaatatgggcaaataaaacaaaacttttgttggaacaatcactaattgtacgtagccactaattattcaaaaagaaaaagtaaaagtaataaagaaaagccatatgaacagaaggaatccaattcaactttagctatgttcaaatgaataattattgaatcactttccctttccaaacgatcacacttctttttcttctttgctatacactacaactgattctctctcaagatcctaaactgaaaatcatggctgagttaatggtgggaggagctcttctttctggtttcatcaatgtcctctttgataggcttgcttctaaagatgtccttcacttctttcaaggagacaagcttaatcaaaagttgctcaaaaagttgaagactatgttgctttcggctaatgcgctgctgaatgatgccgaggagaaacaacttggagacaacaacgtgaggaattggctt

SEQ ID NO: 407212 - DNA, 622 bp, Cannabis indica
actggtaatatcatatcataccattaatagattaatatatataaaaccataggtagccactacgattaaaaaaaaaaaaaatgaccagtcgaagcatatatatatacatatactaactacagtatataagacaaaagaatatatatgaccttatggtcttgctggacacaatcaatgaaaggccacatacataaagaggttatatatgtatatatcttaatcaattactggaatttaaccgcaagcaaaaaaaaaaccagaccgcgaatacccaatatgtacattgataccaaactgtaaaagtcatcaagccattatcaatatgacaaaaccgtattcaatcattcataaattaaaattttttttcacaccgaatatcaaccaaaaattcaatatacatatatacattgaaattaaaacctaaaatattaaggcacaatattattcatagaaaaaatcaaaaccctaattttcaaaatctcaaaatttcataaaccaaatcatcagatcttcaattaattcaacaaaggtggctctggtaccacttgttagggtttataaaacacttaagaaatatataaatcacagatctaaacatattcataaaagtgctttaatatag

SEQ ID NO: 407213 - DNA, 853 bp, Cannabis indica
atgacagtaatataggagtaaaaacatcaactaattaacccaaacaaataaggtttccaatggctaaagttccccaaagttagctaacataacaaaaaaatttaggaaaaaaaatactttagtttaaaattactttataaatgttgataggtacaatgatcgaaattaattaggtatgttaaaaatatccatttagttagagcggatcggagttctgatctgacaaaccacttctaatctgaaacattcagatacttattggatctaggatcaagtctgctctgccctgcctaattttttccgggtcgaatcagattcgattcggtttcaatatatattaaaaaaaatttgattcaagactcggacctcgaacccagacccggactcgaacctgggaccagacccaaacccagctctagacacccagacctagacccggatccaaactcgagtttcggttcggggccctgacctgggaccctaacccgaatttcaagacctgaagccgaacctgggaccgggcctggaaccaggacccgggacccaggacctaaacctagacccgaaaccagaatattacccgaacccggacccgagactcgagaaccgaatgcggactcaaacccaaacacagaacttggacctgagactcgagacctagacctggaccccgtcccggacctagacccagacccaaatctagacccgaaacaagacttggaattgggacccagattcggactcaacccatagttggtgttggtagtcgagtttattgaaaatatagtataactttacacaatctattaaataacaactcaatactaaatatagtaattgtattaaataatac

SEQ ID NO: 407214 - DNA, 544 bp, Cannabis indica
aaatctatataaaactcatcttaaaattttataattattgtcatcacacacttgtagctaccactacattcaaattggatgtcatcactgttatacctaagtaaatttataacttttttagaattaaatactcatactattaaatattagaataatctttttgtgagtatttattttcaacattagaataatcttggatctataaattaaattataaaataattaattcatgatataatatatatacatatgtgtgactactcaatggttacatttttattgtaaccatggttatatttttttttaccctgtaatagcaggttaccaataggtaaaaatttattttttagaattacattaatcataattaacaattttcctaaaataattaattttaatttaaaaatttaataagaccctttttagccattaatatttataaataattttatttttatatttaagtttatattataatatttttaacatttaaaccatttaactataatatttacaataaaattctatttttttttacaaaatt

SEQ ID NO: 407215 - DNA, 923 bp, Cannabis indica
ttcaaaaatttgtaacaactcatatgtcatatagaataatattacttttgtagattaatgacaatatattgtataagcaaaaagaaaaaaaaaagacaatatattgattcaatttctgacaactcacctactatacaaaatgatactacaaacgtgatatatgaggtgggatgatgggatacctagtattatccaagactcaaagtaccaaccactcatatgagattttccttttggatttcttacttacttatttttttttttgagttaaaaaaacagaatttttttttctttaagcaaaaaaaaaaaaaaaaaacaacaagaaattttatataaataatatcacaacaaatgatcaaaaagaaaataaaacaatgatgctaacaattttatttaccaaaccataattttagctaatacatattatagaaaattaataagccacactctacgcataactaataaaatactattttggcgtcaaccacataataaacaaacttgctttctttaaaaaaaaaattaaattaaattaaaatcgttacgtaggattggcgctgactcctccatagtgcttacattacattacattaataaaaaacttactcattattgccacaaaatatataaaataaagaagtccctcattgttatggctgatttgaattattaataaagttccatacttccattaaaaaaaaaaactccctcattattttctagtgctcctttatgagatttcttaatataaaacgacatcaacgtttcttatattttctatgtattttcttttccctagttagatattacttaaattaatttgatttaaatagaaaaaaaaaatacaataatttctaaataatcactactacaatataagcctttagcttcccttttttcaacccaatttataaaaagggaag

SEQ ID NO: 407216 - DNA, 148 bp, Cannabis indica
agagagagagagtgtttaatgaattgtttctttatttaatgtaagaatgattacattaatgatgcgtttactaaattgtaattagaatcataataatcaatgggagaaatgaattgatttaaaatagaaaataatcgtaaacaatatt

SEQ ID NO: 407217 - DNA, 627 bp, Cannabis indica
cccaggttccacctgaacctgttattcgtggttctgttcaggtgtgttcagtgtttgttccacctgaacagatccagatccttcatctgcattgttccctgcattttcagtgtcttttgtacctgcactagggttagatgtaataggcaaacatggaaaaatatcttctttaaatattacatccttgctattaattgttttgaaacctctttgttcccaaacccaaagcctatagcctttaactccttctagacatcttagaaaaacacatttcatagctctaggttctaatttcccaacactttggtgtgcatatgctgcacaaccaaatactctaagattaggaggtttaccagaccatttttcttcaagagtcttgaatccatttgcactggatggacttctgttgattaaataaacagttgttaaagctgcttctcctccaaatcctgtaatcaccagaaccatcaaatttgtcaatgtcaacctttaaattgctcataattattaataggcaatttagttataaagattattagagagtgtccgagtaaatcctttgttaaagatttcaagttgatctggttgagttcttgaatttcttgtttgtgtttcttgatttcttgc

SEQ ID NO: 407218 - DNA, 765 bp, Cannabis indica
tgcaaaagtttttcggttgttgtatatatatcgactcactacaacaattacataagaaatattgggtcgagtcaatgtaaggtagattagactacctacaaaatgtcgatatattgcttcgtcttgcaagtccttcccatcatgagtacataacttggcattagcttctccaggtgttgagatgggcttgcactcgagcattccaaatctttactaaaaatctttagcataattttgctgacaagaaatacgccttccttagttcggtcaacttataatccaaggaagtgtttcaattctccaagctctttcatttgaaagcaaactgtcaagttctcctttgtttggcggatctctacttcatcatcactagtaatgatgaggtcatcgacatatacaagaacaagtgcaattttgttgcctttactttgatgaataagcttgaatctacatgcaccatggcatgattgctctccactaaaaactcagctcggagcttgcttcaatccatagaacactttttatagtttgcaaacatagcttggatgagatctatcctcgaatcctctaggttgctccatgtaaaaatacattctccacatccatctaccatagtctccaatctttactagctacgagtgctagcaggacccgttcggttgtaatcttagcgattgggctatatatctcatcataatctagcccatatactattgagataagggctatttacaaaaatatgggaaaataaagataagttttgat

SEQ ID NO: 407219 - DNA, 909 bp, Cannabis indica
gcgttcttattttcttccttcagctgttaacgttgacgagtgacaacgatggctatgtgtgcatttctttttttcttccttaattgttaacttctttatttagttaattttttttgtatgtaataggaacatacagtatacactatacagtaacaatattacctcattgaaatattggatatcattggaatacgggaaaatggatacattatctatgtatccattctataacattaaaatatggtatttttataaattaaatttcatttcaggccataaattaacatttcgggctaagcccaataggacccgaacccgaccactcgaaattgagcacacacgacccgatacccgaaccacccaaacacccaaaaaccgggttcagttaagcatttctaagactcgaagcccgaaaacccgaacccgatcgcccgaaaacccgacccgtgtccacccctattcacaagtgattaatatccattttctatcaatggattcaaactgtatgttaaagtatggaatatgagtttagtattctgtgaccaggatccacttgcactattctaagaactctttgatgtaactaaacctaagtcatccaaagaccacaaccacatattttataaatctatggcatttgtatcttgttcatagtggttttgacaagatcattctctgcaaagagtcaatatgcctatatccactgaaagtaagatcatctatattagtagatggatgtacattcaggggtggatatgagttttttcgaccactctagattataccttatgcaaagaaatttgaaatgtttgaaaaatttcattaatttctagcaatggtggaaaaccattaaggtaagtggttaaagatcttgcgaactgataggggtggagaaaatatttggtcgat

SEQ ID NO: 407220 - DNA, 759 bp, Cannabis indica
gcattttctattcggtccagtgacatcaccacttacaagtgtccacgtcagaagctaaacagaagcagccgtccacgtggatttatcttccacgtgtcagaatatgcttccacacctccattccttgctagctaaggctcacaaacgcgcttccttcacaaattccattaatataaaaagttaaaaacaaaaatggattgcctcattttcgtgaattagaaaatagactatattagcaaactctcttggggaccaaagcatcgtttgttgatggaattgggtgatgaattgatcgaatgtatcgattggaatgctttgttggagtgggagccccccgttcctcactactgattcctcaacttcttcaccctcgtccgacccttcgtcctggatcgatgagattgaaaacttgttgatgaaggaagacgatcaggagaccactgatcccaaccctgaccacgaagaagacaacgaattttgttcaaaactttctttgcagatatacttgtagaatctcctgccaacgattctgatgaggtccacaccgccgccgagaatgatgccaacgtttctagcgatggaaattgtaattccggggagggagggcagtagctactgaggtcgaaaaccaaaacgacgatgatcctgtctccaaaaaaacgcagaaggtatcagtaattttgttcaagttactgagagcttttgaattgagttactttttgtttgattgtgttcgtcagattaggttaaaaaaaatat

SEQ ID NO: 407221 - DNA, 511 bp, Cannabis indica
tgtaaacactcacaaattcagcattgtcatcactctaatcaggacttccattgccatctttggaaactttttagtattttcaaatagcaatccttctaaatcattgaactttaaatccatataaaatatcaagcccttattaattttcgagtcaatatatgactgaatgttcaactccagctcctaaatctacactctaaaaccttattcaaaacttcaatagaaccatcagtcttctttcatttttcactagtttttttttatttttttgatgaacctcccaatgtaaggcattacgaacaagctgagacataaaactaacaagatagctatctaaaaaatgacccaaataagtatcacaaaaagtcttacgttgaacttcagttaacatggaattgatatttttaactacgatgttatcttgattagagaataacatgaatttttcctgaatcttttcaccaggcttaagtataaattctgtaaagtccttttctggcaagttaggtga

SEQ ID NO: 407222 - DNA, 731 bp, Cannabis indica
catcacctctttcagtctagaagggtggttagttgttgttttatgaggtgggcttaggctttgttggggtggttggttttattaggattttatgctctaaataaaaattatttcaatattatcttatttactatcaatagaagattagaagtcatttaaatttacatgtagttttcatgattatagttttaatatacaatttctgttaaatccaaaacatatagttatcaacaatgacagtgatatcatcacaaaggatatgtatactagtatcagatgtattgtatatacatcgaactagatcaatattgatagtagaaaagatatcataaacttaccgttagatcttttctgagacaatatcacttagttgatcttagatcaaaatatctcaatcttgagacggttaggttctagcttaactgtattgtaatatcccaataagcttaataattaataattagggtttatatttatattatgagttaaccaggtaatgagtgggatgataatccaactaatttagttcaacataaaattttaaatttgctataagtggataaataagcgtgatttttaaattacggagatttatatagtatgtgtgaatgtaatatgaactatatgtggaataaaaatattttcaggtttgacaaccttggagactcgatcgggggccagaaatgtcataacaggcttaattgatagaattaatgagaatattttgataa

SEQ ID NO: 407223 - DNA, 728 bp, Cannabis indica
atgagattaatatatataatgtgttagttgtattatattatatatatatagtataataatacacataaaaattataacatatgagaagttacaaatctgaaaataaattgtaacttaagaatcacaattgataatatgtaattaagtgagttattacatatggaagttatagaatcaatgggataagttttttgttgttagaaacttttacaatacttaattatatcatttaaatgagtattgggatgttggagaaagatttaactcggagaggagttacaaaactaaatattgagttttttggaaacaattgttttgtggttgttaatatgttgttttatggttattttttcgaacacctagaactatttttgaaaacgtacatgaattgattaagcatgtttctagctctcttgtccaatatttttatcccattaaacaccgattaaagtgctggtaatagccatgtggtcaaaagactttgattttcatatgtgatcatcaaaacactataaattaagatcttcggttcactttgtaagacaacaaatttctatcagaagagcacattgctagaaacactttaggcttgataaatttagaaagctatttccattcttttattttccaataagtgttgtgggagaggggaaaataagattttggacaaaggtgtaagaccttgctcaagtttggtgattctcctattatatacttgtggtgtatgt

SEQ ID NO: 407224 - DNA, 551 bp, Cannabis indica
aaaaaaaactaaaactccccgttattgcagcattgcttcaacaattaaatctgttatgcatccctacttcaaaatgcggagccaatgctataactcctgggacctcctgctccacacaataaattctgcttttcagcatattgcacaactccattttctacctttcacctgcaataacattcaccatatcattacaaatttattaccaaccaaacgaaattgaaaattatatctatatttatataagtatctatatacttatatatgggtcatgggtaatattagaaaattttgagtttttatgattaatttttctatttaattagaaaaatttctcatttttacattatatgggttgagattggtccatcagctgaaacaaaaaaataataataaaaatagtttttaggcagaaaagtgataaaaaagttgaatttgacttaaatattttacatatgttacatatttttatatagtgtaaaaaagttatattttttgatattttttttttaaattaagtagcaaaattaagcatagaaatttaaatttct

SEQ ID NO: 407225 - DNA, 967 bp, Cannabis indica
caagtgcagatagggaaacaaggaccaagtactacaaacaaataaaaaaaagccaatttaggaagaagagcataatgtatcagacaaacttagtttgccagaaggaaatagtttcgttccatcttcaagggtcagattaatcatatagttcttcaaatacttttagtccttgaattggactttgcagcagtgtaataaaacaaccccgttgccactatagggtagcccatgctatgcccattgtttccttggtaaccaacatgttagaaatatacaatcaataagtatctcacttgggttttggaatcatgttgagcatgccactctgaccattgttgtaatagctcttcaagcttatgtttactagctctgaaaaaagaaagagatctgctcaaaaatcaaccattggagagtaccaacagtttccaaaggctaaagatcgcacatgaataattacagacgataatataaacatttatatatatatataaacatttatatatacttatatataaatatatataaatgttaagcaaattaaggaggttatttatgatactaaagattcccagtttcccaccaaccttgttaaggagttatattttacacacactgaaggttgctgctgttcatcaaacattagccgagatctcttgacacccgaaatagctggtaaatttgaattatggaaaaagccaatttcacatataatcaattaacaaaaaagtcagataataattaagttggaaatcattggttctataactatttaaactgtaatcttatattttcaacccatttgtattagcctccaaattctaagtggagtagaggtgaatattgtcaataaaaataaataaacctcggtatactacatgaaaagaaggatacaactgccgcccatctttttatcccaatggaactttctcttgggaggcaagacgaccaatctcggcacttgccccag

SEQ ID NO: 407226 - DNA, 571 bp, Cannabis indica
attttctaacatagaaaagaggaataaaattgaatcttaaaggtgagacaatcggttatgaatgtaaataaatctcaccataaaataaaaaatatttatgcatctaacttgccaaaaaaaaaatgactttacacttgaattaactttctctgttgtcttgaatttttcgttgaagctgtaattcatcttgagtcatgccaaaatattttatatgatatattttatagttcattcaaaaaaaaaaaacacacaagttatacacaaaaattattttaaaatataagtatatattgttatattatttttaataatataatatatagattaaatatgtgtaataaactaataatatataacatatgatgcatattatttgttatcattttgtaacatataagagagttacttgttattatgagtaacctccatatttatcaccaatattaagtgtgtaaaaggtgttacacatcttaatttgaaatttttaatgttataggagttatggtgtgtgcatgagttacatttgagtccataacatcccatggggggttatgagtttaaatttcaaatg

SEQ ID NO: 407227 - DNA, 570 bp, Cannabis indica
gttttcaagcctccttcattgtccttcatattcgaacgcttagtgatagcgtgccatgcccacacatagcaagtgtaacaccctaactcttttagggatgttaacgtgatttttaacttattgtgcaactcgttgctaatcaacgaggttattaaaaatcgtgattaattaaaattttgcttaattaattataaacattaaaattatacacttataataaactatgatcccgtttacaaaaataactacaaaagtttcattgtgcatatacaaaagtttgtctcctagcgactaaactgaagagccaagcttgagttcttaaactcaaagcttgctcaaaccttactacacccaccgaaatcagttcacaacaacataattcaccataattaaacttcagaaatacataccaaccttactccacaactcagaaccctaatactcaaaatcatgcataattctaaaattaaaacctttaaactaaaaaaggatttgctagggactttaccttgacttggatacacttaaagcttgctggaaattactggaactgatgaagaaaatcagaac

SEQ ID NO: 407228 - DNA, 568 bp, Cannabis indica
cgttccaaacgagcccaaagagtattgttattgagaactattggtgcctagcaccttttagaagcgcatcctgtgattggttagttagcgatattctctatactattattatattaaattatgtgatacccgacatacttaatagcactaataacgaaatatgacaacaaaaaaaagagaaatgctaaaagacactatttagcgtcttcctatgtgttaatattgctacgttggaactatcgagtcacatataatttaatgtaataacttttaagaagtattattagtcaatcgaaaaacgacacgtctagaagatactagacaccactgataccctataacaacagggttagatagtaccttttctatttctcatacataaattataatgagattattaattcatgcatgcatacgtgtgggctttaattattattaattgtgtttggttgattcctatatataaatatatatataccccatctcttgagtccttgactatgatatatgaccaataacattaattaattaattatatatatatatatagtagagagagagagagaga

SEQ ID NO: 407229 - DNA, 422 bp, Cannabis indica
cactatcactataggtgtttaggttgccccgttgagacaatgtctgtaatcaagttaggtgtagtgtatcaaagtcacccactaacagataccgaacttagggcttacttagtggtaccattgtacacttgttaggtgaacagtctgtaataaagttatatgtagtgtatcggcgtcacaaatttcgtaacgaaatcattatccgatactgaaatagggttctacttagtggtgccgatgtacactcgcagtagtgacactatcactgtagatgtttaggggtcccgtgacacaaagtatgtaatcaagttaggtgtagtgtatcagagtattcaattttgaaacaaaataactaacccgataccgaatagggttctacttacgtcggtgtccatttacactcgcagtagtgacactatcac

SEQ ID NO: 407230 - DNA, 603 bp, Cannabis indica
ctgacggctaccgtacatcacggattacaatccgtgaaagtacaataacagaacaaaatcatatcccatatatataataaagtaatgtttaatttacaacagttataagcttttactaataatcttcatttttcaataaaaaaaaaaaaaaaagtgtttatgttatatgtatataatgattgttagagatgtataatatattggaaaatactaaatttatctctattaaaaaacatagaatttgattataaaaaatgaacttatagggattaattgttattgcatttttaaaactgaaggacttaatctctaaaaaaatacttttttagggactaaattgctaaaataaaaatcaaggcttagaagagttttaatttggaataattatataagacactattttttgtaaaatatttacatttttacgttcaaagaatatttttcttttttacatttttacggttttccaaaaaataacacgaaaacaacataaaatcaacaagaaaattacataaaagtaacatcaaaataacaacaaaaaataacatacatataacaaaaatcaagaacaaattaacaaaattacaacataaaaagaccgta

SEQ ID NO: 407231 - DNA, 742 bp, Cannabis indica
tgggcatctgatcctgatgatcgaaagtccacctcaggatatgctatattttttggttcgaacttgatagcatggaagagaaagaagcagcagaccatctctcgatccagcacagaggctgaatatcgaagtgtagcaactgtcactgcagagatcacttggctccactacctgttgaacatccaacttcctcagtcacctgtcatctggtatgacaatcttagcacaattatgctcactcagaaccctgtgttgcatgctaggacgaagcacatagagttagacttatattttgtgcgagagaaggtgatgaacaagcaggtgcacatcaaacatgtagcagcatatgaccaaattacagatgggctgaccaaggcaatttctagccaactgttctctactttcaggaacaaactcaaaatcgaagatctttcaattttgagtttgaggggaggtgttaaggcagttagttgagtctgttagttgttagtactgttagcctttcagttggttgttgcaactgatttctgttagttgttttccttgctgcttctacatgaatgttgtataaatatcttgtacactcattcattcaatgagacactctttcttctccattgtctttctctctgttacctttctctctatctttttctgctctttccttctttcatcttcttgttcatggtgtgtatttgctcatggctcacaggtttaacatattggaatggtcattcttttc

SEQ ID NO: 407232 - DNA, 523 bp, Cannabis indica
ggggttgccttatgttttcattcttacgagaagcctctggcacatcaatacgctcattcccctgattcgtaaattcttgggatctttgagccacttctcgacgatgttcttggttattctgatgtccatctactggaacatccctaattccttcaggttgctcctcctaggtgttttggagatttccttgatttgcttcctgcatcctagttcgaggtctaccttgcggccttcttactccaggatcaggttgattctgtgtattctttccaactcactgcttcgttggttagactcggccaagcgttgtcgaagttatcgattttccaattccactaatggtacataccttgtgggatcataagcatcctcacttttgggtacatatcctgtagtagtattgatttcttcgatccttccttctgggttttgattattaccactgtttacccaaattttaacgatgatgacgtgtcaagagtagcaacacgtggcacaaaaataccgagactaaattaatgaa

SEQ ID NO: 407233 - DNA, 493 bp, Cannabis indica
atatatatatatatagatttcaattcacatttgaattatttgtgtgggatccactaggattattactatatcatatccaaaaacactatacatataatgtttttattgtatgaatttatatatttcatttttttaattgttattattaaaattgaatttctaaacaaccagacaaacaaggtactacttatgtggatggatggtgactattagtgagaatagaatttctcttttcttttgttgttcataaataataagtagttattatcactatcacttgaaataaagaaaatcataacggttggtcaggcacggcaaaggccggccttttttaatgcactaaggctatgtttggtaggaaagaaaaaaagaatagaatgaaggaagaaattttaaaggattggaattagaaataaagttggaaggatgaagtgtaaataaatattaaaattattgttttgttatttttaatataattatatatattttttat

SEQ ID NO: 407234 - DNA, 756 bp, Cannabis indica
atttttgtgttatttttataaaataatgtaaaaaaccctttaaacataaaaatataatatattttttttaaaaattatgttttaaatactttgtaacattcttttaatattctttttcatacactcaaagttacgagaacgttacatttaactattttaattgaagtttattgattataatgtaatgtaatttaatttgaatttgaatttgaatgggatgaaagagtcatgtcctccacccattttatgtgcctttgttttgttttaagattgacccatttttgattttatccccatttcccatacactacaacactacccacacctattactgtatatatctatatcatattaatatttttaaatttacgataataatatataagttatatttattttaagttattatcatatgttattttttattagtatatataaattattttttttaaaataaaattttataacttaaaccaatcgagaattgccaccttattgccgttaaaatttaaatttatttataattaaaaaattaaacttaaatatttattgatatttataccataaattactcacttttatatatttaggcggcgtctggttaggaggaatgaaaatataggaataagaataggaatgagaatagaaatagaatggaataaaatttaaaaatacgtaaaaaaaaattgaataaaaaaatacattaattttttttttactttgttacattgaatggtctttccttcatttttaaaa

SEQ ID NO: 407235 - DNA, 570 bp, Cannabis indica
atcaatgtggttggtctcccacactgtttagggctaagagtaacactctagtcgcattctgagatagccactttaacatttatatttgacatcccctcctcgtagatcgcataacacataggtttgataggtggcatcccagatttcgtgtcgaaattaactgcaatgagtcatactacggtatagccgagcaatatggtaccgagaaaaatagggcaaagtcacctagatgtgagatgggatttagagccagtcgatgccttcaatatattcaagattacgggttgtagggatttttagtggatactacagtccttctaccccatattctagtgatacctctgttgggttttgtgcccgtataaattccatttaagtccagaacatatgaatttgttaatgattatagtgttgtcaggacagtggaatataattttaattatatattcgaaagtttattctctgatttgtcaaaacactggatttagaatgacatggtataatcagcgataggtattcttacaccttcaaaaagtgttatgtcctttccaggacatcggcaaagtttac

SEQ ID NO: 407236 - DNA, 697 bp, Cannabis indica
gcactattttcatttgtagtcttgtttggccgttagtcaaaccaaaattaaatataaaacaatttgaaagaaaatattaaaacaaatagtgtaaaatagttcatatataatatacatatatatggtattagtatctatatataaatatgtaatgatatggtaaatattaaaaatcttaatattaaataaaaagttaagaacaattttaatactctgatcacgtgcaaattaaaactttctaattttataattttggcagctatttttaacttaagttagtggttggtaaaaatagaaaaaaaaataagttttttttttctcttgtatataaagtgataatttttatacttataatttctacaattaccacaaatcaatttttttcagccatgaatatagtaaagactacactttacaacaagatgaaatataaatttttaagtgaatttttgctatagtctatattaaaaaataaatttttgaaagaatttgtaaaagattcatttatagatgatgttcttgatatgaaaaagagacgcttatattttaattttaagtattaattaacaatactttttaaaaaagttgttacttaaattttaatatagttttggctgaccctaataattgatcctggctccgcccttgtgtatgtatagttttgtaatgttcaaaatatatcttgatttgattaaaa

SEQ ID NO: 407237 - DNA, 722 bp, Cannabis indica
tttatatatcttttctcacaaaattatatgtgtatactaacatttttactcactaaattttcacatgttcttaaatttttaaagtcattaaaaatttactaaactattaaaattattagatttaagaatttctttttttcaattttagtaaaggaagtttaacatgaatgaaaattcaagaagttcaatttagtacatgtcaaagttcaagaaacataatttggtagatatttaaagtcagcatgattcatagaattagtaaaattgaatgaaactagataaatgtccttaaatccaacaatcttaataatttaagagcatgatttagtatatgtcaaaattaagagtacaaaaaatataattaatctaatattattatataaaaaaatactaaaaaatataataatatctaacactttttttagtatcatattaatattattattatcattaactaattataaagtgtagcctctaaatattattgtatggaataacaatactctataataacaagtactaaagggtttcttgattatatgtgaagctagaatctagatatttgatgattaatcttaactgataacacttgccacgtgtaagggaaattaagagtcacaataaaaatagtttgattatgtatttatggaaaaagacaaaataaaattgataatacaaacaaaacatgtaaataaattaatcttattgactagaatttgact

SEQ ID NO: 407238 - DNA, 569 bp, Cannabis indica
agaaaagagataatgcaatgttctgggattaattcttttcgttgatcattggaatgaaaatcaaaccaaccatgatcgacttagtatgtcacaatatctttataattaaaaaaataacaacaaagaggaactaatttttcataatcgcttcagctcctattcaagttgttcacttgaatatgatgaatttgtattccataacatttttcttagcctcttcctcaattttggttgactcctaccattagctatacgactgagtataaaatctaaaaaattaaaaaaaatcgttcaaaaccgaattgtcgaacactgttgaaatcgaaactgatggaatcgaaaaaaccgcaaacagttaaaatcgccattgaacggtcagtttcttttgggtaataaactgatcgaaaaaaccgaaatcgaccgttatatttatatattaatttattaagtttttttttgctttatctattgtagttactaataatattatgtaataataacatattattattttattaatattaaagttgaaagaataagataattagtttttaaacaattaatttgta

SEQ ID NO: 407239 - DNA, 461 bp, Cannabis indica
ttaaatatgattggatggatattagataatattggattagatctgttcggttattcattagatcggatatttccaacatccgatccgattcaattaaatttttaaaatttacatctgatccgattcaattatgattgaatattcgatattagatcggaattggatcagatgactttctggaacccctaataagtatagcctatgtatctctaaacagaacaatttaaatagtaaccagtacaagtcatgttcatgttcaaattaacgtagcatcaaataaacttatgaataagtccaaatgatcttaactaaaattatattagtatgtataacacaattacaagaagtgatattttatctatcttcgcttcttagggcttttcaaactctatttctggttgccttagtttttggaaggtggattcccatgatcatcactattttactttctaattaatgca

SEQ ID NO: 407240 - DNA, 732 bp, Cannabis indica
atattttaataaaataatctaaataattttgaaaactgactaaatatttatcaactttacaaaatttattattttatttattttaaattataaaattagataaataatatctatttattattttattttattagacatttaatttttatttaattttaaaaataacattttttttgaaaaattagttgataattttgaataaatatttaggtttgttaaaaaccttattttttaaatttgtaggtttaattttaaattaattatttgatttaatttatttaatttttgaaaataaaatttaattattttttaaaaaaagattaatttagttaaacttaaataaatcctataaccaactatccaatttgttgcttgtgtgttttatttattgtttaatattcaaacatgtgttatagaacttattattgtttgatctaagttactatagtttacttgttgacagatccaatgatctgattttaacggtagtccaattgtcaataggtcaaattaataatttgtaacatgtaaattttataatcttttttcattggtgtataaacctagtaacatgataggatccatccaaatcagtgtgtgcctgtgcctatatttttgctttgggcctaaatgcatatagggagcccatttaattttgattattaaaatggactaggttgctaaaataataatgtcactttgatagttttatttaggtccaattagtattgg

SEQ ID NO: 407241 - DNA, 335 bp, Cannabis indica
ttattcaaaaaaatataaattttatgagtttatatactatttgtgctaaaaaaatcaaaacaaaataatctataggaaaaatttaagaaaaagttaaaaatatggaaactatgtaaaggtaaagagagagttatacaatttttctcatatttttaaacaaatcctcataaaataacccttttttttaggaaaaaactatttttatataaatttataccttaaaaatcataaaataaaatttccaaatggatagactttcaacaagaaaggtagatgttagcaaaaacatttaatctaataattttgagatttaaattccatatatatatataaat

SEQ ID NO: 407242 - DNA, 540 bp, Cannabis indica
tttttatgcaacttcaactttctttcacggaagccgaagacttgcctcataaaaattcaacgtgactctctcatgcacaatttttttcgtgcaagaaagatcactcgggtatggcacctcttcaaccctcccagaaggaaggactgcttgaagtctgtctcactccacatggtgctttctctttttgatatttttgagcgaagtctaagcttgaatttttctgcaacttcaaccttcctccgcgaaagccaaatcttgcctcatcaaaaattcaacacgagtctcgcatgcacaatggtttttgtgcaagaaagatcactaggggtatgacatgtcttcaaccctcctttccagaatggaaggacttcttgaagtttgtcttactcctcgtgaagctttcaccttttgatgttttcaagcaaagtttaagcttgaatttttatgcaacattagtattcctttgcggaagtcaaagcttgcctcataaaaattcaccatgactctcgcatgcatgatgcttttcgtgcaagaaagatcact

SEQ ID NO: 407243 - DNA, 601 bp, Cannabis indica
tcacatctggtacttgaaataaagcatctgagtacttgatgatgatgatggtgatgataatggtggttgaaataaagcatcttagttgcaactaatatgatttaacttgtcaggttactaacagcaaagtttcccgcttgtttgctggtacacaagaaaggtgtgttgcttgcaagaaaacagtttatcccattgagaaggtaaagagtttagtatttgatgtctttacataaatgagatatttgttttgtcaattttgttttctaggacaatcaacctaaattttcagaaactataggatggtttagatcatttgttttgccaattttgagttggcattttcaaaaaaatatttttttttttgctctaaatttacaatattgcaatggtttagatcatttgtcagtggaagttttgttcccaacattaaatgtccctagagtatgaataaatgctgatttagtttaaatgatatatcttatttatcatattatgaatttagtttagattgcatagttttaactggtgtatttctgttagaactttttatgaaattatgtaaaaatagaaaagtgaagtgtgtgagtaagagtcccacatg

SEQ ID NO: 407244 - DNA, 482 bp, Cannabis indica
ttaaaaaattagcattcacttctctttttttctcctccgtctttctctctaaaagttcttaaaaattatttatcaaagaacataaactataaccaaaactaaaagttttgattatttttttagaagaaaaatagacgttgagattcagaaattctttaatggcgaagttaaaaaataatggatttttttttttttgaacatgtctctcttctcagatcatataacaaaaaaaaaaaatggtggatatgagtgtctctaacaaataattataataaaaaaaaataagatgcccaccataccaaaagtttttataatcattcagggttgttcaaatttccaacaaaggaataatgcataattaaaaagaaaagttgtttggagcttcgaaaaattgaacgaagcatcaaaggagaacaagaattcacccaagttcaaggtaatcctacctcttattcttaattttttctattattattattatt

SEQ ID NO: 407245 - DNA, 426 bp, Cannabis indica
aattataattactgcatctgttcatgttaggaattatcttcaaattagtaattatattaaaaataaaaattgtcgaaaattaagttcaggtcctacttatgcaattttataaaaatataaggtttattttgtcatttaataaaacagaaagtccacttaataatttttacaaaacacaagtctaaaatagtattagcccttattattattaggcattgctatatatatatttttgaataaaagcagcactttattaagaaatatcattcaaaactaaggatgaaacaaaaccaagaagagttgtgacagtcagtagtcccgtgatccgtaaggggaaataccgggtaagttgtgcaatcccacatcgcctggggaaggtcaagtgggatgattctgagactgtgtaggtatgagactacacagttg

SEQ ID NO: 407246 - DNA, 810 bp, Cannabis indica
acttaatgtcaaagctcgagaccatttgcatgagacccccaaaacaaattgacgaatgagctgaccttctgtaaaacaacattggcattgatgtgagagcaaaagacttggaggacgactgacattagaagagaagatcaagttgttggtgaataccgccaccgaggtgcctcgacttgggattaaggcttacgagtggtggtcggaggcccttcatggggtggccacaccggccccgggactaagtttgccggggccttccctggggccactagcttccctcaagtcattactactgctgcttcttttaatgagtcattatggcaagaaattggccgggtacgtattaacaatattaatttggaaagtttattatgttttattcatacaaaaaatatagaagtttatgtttaattttatatgtgtacaaatatcattacacacaaatttgacatgcttatataaaaattagttagttttttacaagtggagcctatcttaaaattaatgaatataattgtagacatttcctgctttcaaaaaattaagaataatatttatgccaaaagtatgatctaaatattcatttgcatgtgtaattgattatattaatttatttttttattataaattaggtagttttttttatttttacacttttaaataattttttttttttgtatttttacagaattctacatagaaaccctattgcaactagcgctgcaacttaaattgcaacaaaaaatcgtatagaaacccctattgcaactagccctgcaaccactttagaaactcaaaccgtaaatt

SEQ ID NO: 407247 - DNA, 825 bp, Cannabis indica
tccatctctacttgttatgataattttacttttcaaatttaaccatttggggtaatctttaagcaaagaattaaattggtccaacacatccacatcatcgagaactataagtagctttttgtgatgtaatcttctctttacataccctaaatcttcgaaatcgagatctttctcctttgatagtctttgaaaaaattgctttgccaaataagttgatccattttcttggtattctttcctaacatctttaagaaaacaatgaccatcgaactcatcacgaattttttcagaaatgacttgagctagtttggtttttcccaacccacccatgccacaaattcccaaaatttgaccgttgtcattagttgataacagattatagagatttgcaacagacttatcgattccaactaaacctattgacttaaataattatcactaatcgttgtagatgttgatttcaattttcctcggatataattgagaattccattcactcactcagcttcattcctaaattatatatacatatgtattgaattaatatatattgaaatttaattattatgtgacaaatcaatgaagatatagtaagctttcacatcaacatgtagataattgtactattcaagtataatattttttgtaaaaaatatgtatatataatatgttaactgtacgtattaattaaaaacccttaaattttaatttttatacacttaacctccttattttttaatttttatacacttaattaccccccttatctttttttctttgtagcaaaactcccttatgttttaatttttatacacttaatctctt

SEQ ID NO: 407248 - DNA, 580 bp, Cannabis indica
gatttaaatttttttgtctaattatactaatgaaagtttaattttgacatgaattaaaattcagggggcatttggtacatgttaaaatttagaagtataatttactagatattaaagtttgtagggtataatttagtgatatcaaagtttaggggcacgatttaatatataaaaaatcattttattagtaaagttgaatagaatttgacaaaaaaatttaaatttaataatctcaaaagtttaagggaatttttaacggtataaataattcgaggggtataatttggtgcatgtgaaagtttagagtgcaaaaattgtaattagtctaaaattgtatttcctgcactactacaaggtgacagtgtgacgccttataaatagttagtagttttttataatctttattaaagtaaaataagtgagattcgatattgaattgcatcaataacgatattacacctcataagagtgctagacaccatgaatgtcatttagcatttctcatttctatatcgagtcttacttattttactttaagtgatataaatctaaagttttgagtttgtaactgatataaact

SEQ ID NO: 407249 - DNA, 411 bp, Cannabis indica
aatactaaatggaatttttttaaaagaaacagcgaatggcaacagtttataaccgttgggaatactaaatattcccaacactttataactgttgggaatacttagtattcccaatagttataaagtgttgggaatacttattattccatgttctttttagtatacaaaaacaagtttttagattaaagaaaagatttttttccttaataaaaaaaattgtatttaataaaagaaaatactaaaaaaaagtttcagatctaaaaaaaaaattgtactttttttcttagtaaaataagtttgtatttaataaaataaattaccaaaaaaaaaagtttacaagatttaaaaaatagaaaaagaattttttttgacttaataaatttataaattgagaaatttagaatttatata

SEQ ID NO: 407250 - DNA, 1198 bp, Cannabis indica
gaaaaaagtgttatgagagaaaataaaggaatttttatacaaaatacaattatttctttagaaactttaacatttatattgtgataaggaatattttatatttatattattcattatttttatttactttttctatttattttagcttctacaaaatttttttgttgttctttccttctctctctctctgtcttttctctccggtcaacctctcttcttcttctttttttctcatactaatctttttttatctttatatatataaatatataaatgtaataagtgtaacccttcacatatttttttttatttaatttttttactttgtcacaaaattttattttattattttttttaaaaaaaaaatattacaagcactcattctgtatctttttctctcttttacgttttcttactacttacacttaaactatttggtactattttttttttttaattaatcacactttgtaaaaaaacttaattaattacttttaacctttactaaaataaaattattttgtcatacatattttttcttcatatgtatatatatagttttcacactctttcactctcttccaaaaaaaataaggagcactcttcctatatctttctctttctttcatgattaacaaaagtagtatttttttggatgttttgtagtttattcagagttcatctatgaatgctttgcatatttcaacgatgtcaatgtcttgttctttattctgtcacgttgtagttgtcttttgttgttttataattattttcatatttgtttttaattattctatagttgtgttatagttgtttttctgtattttttttattatacaattatttttttgttattttttaatttatgtgcatttgtaattatggtgtatatttttagtttattcttcacaattttttagttgtatatatgtaattttttgttttgttatttttatgttgtgtttttagttattctgaagtggttttcagaatatttttttgttgtatagttatttttatatatatatgaatttaacgttagacagaacaagaaaaaagatggggggaggggaggcgtgcttgtaaatgttgactccacctcatttgttgggcctacaccaaatagagcccaagaccgataatgttttaatgtaaaaggcaactcatcaaaagttaaaagctttttacaagggaagtg

SEQ ID NO: 407251 - DNA, 1033 bp, Cannabis indica
ttctacttaatttactaaaaaaataaatttttaactataacaaaattttatataccaactaatttactaaaagtaaaattttaattttataaaacacttttcgcaagtttctaaaataacataaaagaaaacaatagtaccttaaaaatcctagaataattaattcaacataccaaattttacacttaaacaaaattcaatatatcaactaattttatgggttactattctacataagtttattttatagaacaatttctataaatgtctaaaaaaaaaagtaactaaattattttcaacataagtgttaattttatttttggcatatttaattgacaaaaaatattttatttatttattgtttaattttagccgtgtgtaaatattggtttccttattttatatgtgaatttaatattaagcaatctatctttggaaggaaagttgtctagctttcctatttatggaaaataaggtaaaaaggataagtttggctactcatttcttttctacctaaccagctgtgatattctgatcttgtgcgagtttcttattttgcttgatcaaatttcttgaggagaaaaccaaagctaaactttccttttctataaaaggaaagtcgaacttactgctcacgattctgtaggtacaaaaatgaaaattcctgggctgattgaagatttattttagggaattttctagtggattgtggtcttgttcagaccgtgtatgagctatcaataaggtgtatattgattataaatacaccttatagcagctaggtttagtatctcttttgtatctttaattttcactcataactttagaaaaaagagtctttgttttgtaaagaagagcttgttcgactcttactcttattatttatattttatattgtcttgagtctgtattcaagtctacaaagaagaagaacaacagtgctacctccagaagaaggttttacaaagcttttgggagattgattttcaaatcttgcatggggagaaagcaagcgactcttcaaggagagtcg

SEQ ID NO: 407252 - DNA, 572 bp, Cannabis indica
gcttatgtccttttcatgggagcttatgggactacagactgagtcaccatgtagattgtctctaggtcgttagtcaagatagagaaagcaatgaacttggaaggattttctctaggggtatgttcggttttgcctgtgaactttcccttttttccattgccttgtctatcgttattgttagatcttttgccgcccaaatttgaactactagggtactgggggttttgagcggacactcctaccgagggagcctatggttggcccagtctaggctcgacatctgcccattgaatggcctcttcaagtttgatgaaaccatctactcggtcaagaaaatccgccatagagtctacatggccacttttcttgatatctttccataattctccgagtactttgattccccctaatattgcggccaacctccccttttcagttaaccgtgctacttttgtagcctctatcatcaatctgcttatgtaggctcggagaggctctcctagtctttgcttcactttgaccaggtcttctaaatgcaatgggagttggcgagaagaagagaactttgcatg

SEQ ID NO: 407253 - DNA, 627 bp, Cannabis indica
attcacttggccccaaaggtcaccatgcacataccctacggactccctttgtgttgtgagttgttgctataaacttgatcttgtgatgcttgccataaacataagtctcacagaatggtaatgcacatgtctgaagcttttcaatgactcccttcttgtgcaattccctcatgctttgttcactcatatgtccgagcctttgatgtcatagctgcatatcactttataagccttttactgtatctgcctcagccacatgtacatttttaccctcgagtacatacaacccatgtactctctttcctttcatcacaagcattgaaccttttgtgatccttaggctcccattcaaggacttatagccataatcttcatcttccaaggttccaagagatatcagattcttcctcaattctagaatgtgcctaacattatgcaaaatcttcacttcaccatttaattgccttatagccaccttaccaattccaacaaccatgcaagaaacatcattacccattagtactctaccaccattattggtttcttgataatcaaagaaagattctaagctgggacacatgtgataagtgaatcttgaatcaaggatcaactctttactgttattat

SEQ ID NO: 407254 - DNA, 639 bp, Cannabis indica
caaccaaaaatctcaaaaaaatttctcacccaaaaccattcacccacttaaagctcaaaaacattcccactaagagaaaattgatctaaccaatccaacaaacaaaactctactcaaatatcccaaaactaaaagaaaaaaaaaaccctagtaaatttctcttacaaaaatcctcatctataatatcttgaaatagaaaaataaaaaaggtaaaaaaaaaaaaaaaaaacctaagaagccttctcttctacactgcttcaacagtctgcccagaaacatcatcgtcgtcctcttgtgcgattgcaaccccagcactcaagcttcccagctcgagtgggagaacaagcttcactcaaattgggatgcaataaacaaacaatagatgtcgttgatgcccagatctcaactaagaccaagtatcttgtctacgcctcacccgtatctccgttagatgtggtaaagtctgtttgggccatggatggttggagttgctccgttcgactataagtagagagaaatcgagaaagagagggactgagagagtggagagaactcaagcgagatcgagagggagaacaagcttcagtgtgctctgctgcttgcgatcctggtggtgggaatctcgtccatcggttgtgg

SEQ ID NO: 407255 - DNA, 602 bp, Cannabis indica
gtagaactcgaaccactgtcccaaagagattgacacataaccaagaggttaatcatgcactccttccagaatcactagatgaagttgaagaaaaacaaactgtaacaaacttgaaattgatagctcatcagcaaaacgtagctcggtatttcaaaaaataagtaagagaacgaaatttctttgtgggagacatggtcctaagaatagtatttttgaacaccagagactgtacgacaggtgtgctcggaccaaactaggaagggccatatcaggtggtcgaagtccaagaattaaaagcttacaaacttgttaagtatgatgaaaaaacaaaactttttctagtaccaagttactggaatggggaacacttaataaaattctaccagtaagagtaccaggtcagatgaccacgtcaagtacgaaacaaaagaacatttactcttaagtgaatggccttctgggcagaacacgcccaaaggttcagataaaattaaaaaattctcaggtcaaatgaccaatcatgaatgtacaatttttattttctgcaatttgttttgtttatgctaagctaaagattacattagatcaacataatagcttca

SEQ ID NO: 407256 - DNA, 585 bp, Cannabis indica
tatattaattaataataacataagaaactaataaattttttctaatatcttaaaaatatttaaaattcgatatgaaatctaagaataagatattgatttagaaaatacaatagtgacgactataaggaaactacgataatgacaatggatgagatacaatgatgataacgggtgagatacggtgacaaaaataagtgagatacaatgtcaatgagacaacaagtaagatacaataataataatagttttgaatgatcgagatatgaaaataatgtcttatggggaacaccgtatttttttttctacaccaccctatttatttatttttataaaaataattttttttaacaaaataatttaaaatactacttataataaattttaaattttgtaataaataattctaaataataattaataaaattgtccatttaatttttaataaataaaattattattaataatatgcaataagataatatatttatagttttcctatatattagaattatatttttaagtaattatttattataatacaaaaaaaaataaattaaccgctcgaagagcgactatattacctag

SEQ ID NO: 407257 - DNA, 539 bp, Cannabis indica
caaagtgtctcactgagaataagactcgttccaaacatcatcaagaacaaaaagtaaatttcttttcctttctaatttcttccttcaatctccttccaacttttgtctgaattctcagtacaacatttctcagaagtgaccccctcaaatatctcccttgttattcttaaaatatcaaactcatccgacacagtaacccacaatcttagctgaaaattattcttaactcgttcgtcatcataaacaagttgagcaagagtagtttttcccaaaccacccatcccaacaatgggaaccaccactaatatcatcttttaacaacatatcaacaatggcatcttttcaacctccctcccataaacattggacaattctactaaaggagcaagtggcctttgagaacatccttttgatccattacaatcttcagcttacgaagaatctccatagcatcaagcttaactagatttatcaaatttagacatgacaagtgacataaatttcatgagtacctgttgaataagaaaattacaccactt

SEQ ID NO: 407258 - DNA, 547 bp, Cannabis indica
ttatttctccttctagtctctctactgaaagttgtaaaccaaaaataaaattttatagtaagttaaaagtgacctcaactcacttgtggttgccacaatatttaaattttgtagacagtacaaagaaccttcactcaatagcttcttaaacttagaaacttaatttattttttcttattgttgcacgcatatggttgccacaagttttaaattttgtagacactacaaaaaaaaccttcacttaatagcttcttaaacctagaaacttaatttttttttctttattgttgcatgcataaaattttcctgtaagataaatagtagacatatttaataattgacataaatgataaaaaataatagagaaaaaatatgaataaaatagtaatcaccttctcattaataaaaatcatattaagacttatcaattctctattcttcttagtattaagagactcacacattctacaaactctaatattcatgctccaactatctgtatcagtatttaagtcggtaagaaaagaatactccatcatgagagaag

SEQ ID NO: 407259 - DNA, 683 bp, Cannabis indica
catcatattcattcaactttcaaggtacacatctcgtacacacttaacacacgtacacaagccctttgaaaaaatcaccgctcagctactcatttcttttattctgtttttctcaagtgtaaaagttatagacaaaattcttttatatgaagtatgaacatgttgatcctaattatttattatatgacttcatgcaagttttcatgacattttaaaaaatcagggtatcatgtaaaaaaaatcagaagttttctctttttggaagttgcacctattatcctatcattatacaaaatgtcataataattctaattaaacctaaacaacaaaatgaatttcttttttcaaatattttaaagctcctatataaatttttttttctttttatcaaaaaaatacaatctctcaaatttatatttaatatataccaaatttgtactacataacaccaaacttaaaaataaaaaagtgataatgaaaataattacttaaatatatatatatattttaataaattcttaataaaactcatactaaatatagtttaaggaataattatataagacaccatttttttttgtaaaagatttatatttttacgttcaaagaatgtttttttatgtttttacggtattccaaaaattaacatgaaaacaacataaaattaacaagaaaactacata

SEQ ID NO: 407260 - DNA, 524 bp, Cannabis indica
tgcttgaagtttggtccctactactatagagatacggaaatttgcatttccggggattggttatattttaaaatctttggaataggttaatattaagggaatggtaatgctaaacattatctttgttttaagggtttaatattgtaatgttattgccatatacctttgaggataatgttgatattgtaagaaaaaggggaattagattattctcttccattatattaattagtaaatattaattttaaatttattttcatatataattttaaaatatatctattctatataaagtgtgcctatataactaaaattcttggtttatgagaaatttatgggtgactttttatttttatttaataaaataataaaatattatttatatataataaaataataataaaaccaatctcattaatatttgaactgatatttaagattctgatgtttgttttctttaatcttatacttttaactgaatttaaatgtctcaagtatatatattatataatgacatatatttt

SEQ ID NO: 407261 - DNA, 660 bp, Cannabis indica
aattggtttatttaacaacattaagtatagctccaatgcctctagtttaggtaacagtcactaatataaaacacattccttcagcctaaatatcgcaaaaagcaaatacaattcatatatatattatatatatatcctttaggacttgtttaataatgtatggatgtataaaagtataataaagaaacgatttgtgtttgagtattttgaccgcacgtacgggtggggaagtgttgggagtattatatatatttgcttattcaattatgggaaactgattaagcaaacgtatgcattgctgttgacaaaagggtaggcaagcctaattgccaggctacacactcaactacttatttactaaactgtcatctatactatgttttatctctttattataacctatataataaaatatggcttcattttgccatacaagtggaccatatatatattattaactaatgaccacacattatatttacaatattattgaagctaaagcaaatgatgacccaaaacactaagtatggtagaaagtataatcaacttattggaaaactattagctatttaatttgttttttttttaagaaaatgtacatcagaagtgtatatatatcaatatcaaattggatattagtttacttttccaaaagtgtag

SEQ ID NO: 407262 - DNA, 776 bp, Cannabis indica
cattccctcaagtgtggaatcagtattaactacatccattaataacaaagactcgtggactaaggctcattaacgccccaaccacgtaaaaatccttatctcactttcttacagctcaatattataatcatattttaatagttgccgaaaatctcggtcaacaatatatataatattatagctaataacataaaaataatttagttaaaaaaattattctcactgactaaatatatatatatcgtaatattttgtttataataaatcaaaatattaataatatttaaatttatttattaatttaaaaatactattcaaattaatatattggaagagaataatttaatctcactcttttttaaggtatcaatattactttcattaagggtacttataatattactaagggaataacattttaaggttaaactctcaaaacaaacaaagtaatgtttcacattactattaccttattaacattagctcattcaaaatgtaaagtttaaagaaaaattactatttagtgtggatattcaaaataaaaaaaaacaccatgcaataaaagtaataataataataataataataatttgaggaatttaagttgattttttaatattgcaggaattttataccacatttttagtcatttacttgaaattattatagtcttctcagtgctaaatagatggtgtataatttagtatagaacattattatcaaacaccaatttttatataatataatcctgttgttaggcttgatgacgtggcggt

SEQ ID NO: 407263 - DNA, 589 bp, Cannabis indica
ccatttatcagccaggttgtgacaaaattagcagaaaataaataatagaccataagtttaagagtagtggacttttcaaattttagttatttttatatttttttatatggctcacattttaggtgctgcgaatatccaatagtgtagaaaaaatataaccaccaaattaaacattattgtccataattttaccacaaataataatagtaaatagaaaaaaaaaaagatgatcactatgcagtgttggttgcttaattataagttgtttggcaatggtatgattagttaagaataatttgaataattgtaacactaagcataaaatatttgtaattgtgtttaataatgcattaaaatatttagttacattactataagttgaattacattatttaatgtaattattttagaaaaacacaataacaacaaaaataagattgtacgaaattttaaataattttactatttttaaaattttatttatataaaatatgttctgatattgtacttttgttatcttattgttaatttttattatttgtgtattattttttatactattttaatgttgtttggatattatttttat

SEQ ID NO: 407264 - DNA, 581 bp, Cannabis indica
tatcttttatttaatatcatttacaatcgctaacacgccatgtttagtgtaagagaggtcaattatataaatataatgtaagttaaatttttatttcatattcatttattatttaagatattctgtaaaattttaaaagattcgaaaaaatttaatacgctgattcaagggttcaaataatatgttgcacgcgagactttattttatacgcaattgaaatagattattttgaaccatatttttgacaggttaaatttctcaaaatttgataagatatcctaaatatatacaatgtaaacaattataaaaaaaattagactaaaaaattctatcaaataccaaaatagataaaaaaaaaatattgggaaattctacaatgcacccccttaaaatggatatattgatgcacccctatctgttttggcatccgaaataattttttggtcaaattttttctcatagtcatgtacgttatagttatttaagacattctgcaaaatcttaagaaattcgaaaaagcttaacacgccgaaaactatgttcaaacagtgtgttgcacgcgtgactaatttattttatac

SEQ ID NO: 407265 - DNA, 607 bp, Cannabis indica
ccaaaaaaggactttacaacatctagttggggatgacataaatttgcataaatatatttataactaaaataattagtatttttgtcacttaaatttttttacactattaatttgtacccctataatatacggctcgttaataatatcattcaaagtataactttaagagtaacatggtcatattttattcaattttatcatgaaacgaataacgtaataaatggtagttgataaatgaacgcaaattaaatatatttcgctcttttttactttaatgattagaaaactaaagatataaatataaatttattattaaaaaaatattctattattcattaatgtaaaaagggtgaagaatatttaacttatttatcaagtatcatctattaatttactcatttcatgataaaattaaataaaatgtgatagaaagaccataatactataaaaattatattctaatgagtattattaataagtaatatactataaaaatatatatatatggaacacttcttaatgggtaatacccattgatgggaactaaaaaaaattaataaggtaataatctaataacctttttatggcaagtttctaaaaattattt

SEQ ID NO: 407266 - DNA, 830 bp, Cannabis indica
tctacatgttgtgtgcttcagttggaggattgttccgctgaaatacgttctactattttgaaacaaaatgactttaattaatatatttttttattttattacaaattaaaaaagaaaagaaaatttaattttttttttttaaataataagtagattttacgtaatactaaaatattgatacttgcgttttaacaaatacgccaatacccaaaagttaatagatatttatttattaaataaatgaaagaatgtgtatcccatcatcttatctcatgtcattacatagatatccaataatatatacaactgcttaatattctacaatggtgaaggcggctgaaagctttaattttgctgtatagattatataataaaagtacacataaattaaatatagcattttaatgatgatggtaggattattataaatacttaataaacttatatattatttcttgcaagattaattcatcaaattaatctagaacaaagtatgttctatataattgggaattaagaccatatgcagttgttttttttttttttttttttttttttttttttttttttaatgtaactgcattaagataaacgatgggttcaagttactaatcgagagacattacgaagagttggaaccataaccattccaaactatctcccgttcaattcctagtaccatcctaacaagattgtgggcgaaacattcatatccctaggcattaaggttagagatacaaccaaaaaataatgacaagaaggcttctattgtttttaattacatccgacaagaaagatttattcactactacaaaaagtatattttccgt

SEQ ID NO: 407267 - DNA, 570 bp, Cannabis indica
actacattagcattctgcttaacataagttacggatatgttagagaaaaaagaaaaaaaactagaaatatctatgattaaatctttgaaagaggaagtggccaccatttttgaatttaatgcatttgtgaccataagagcatccgtttccacaagtatgattggcagcagcatttgaaggacccaatttaggttgagaaacatagctttggcctccattttcgtgtgatgaaaaatgaccaacaattaggcattgagaaggcaacaatggcatgtcctgaagaattcctgactacagcccccacgcctatgatatgtcgagattcatcgatagcagcatcaacattgagtttcaagtgtccacgaggtggtggctgcaatactgcaggggtagcaactgaagtaggtggcagagaagaggctgtaaaaggttgtttatatttcagttgagctgcacgaaaattattcaggtaattggaggaaaatgcaacaagtgagacagaagatcttgttgattttccatgaaccacctgggttttgctctgtccaaatgcaccaaagagtaccattg

SEQ ID NO: 407268 - DNA, 580 bp, Cannabis indica
ttttgagttggattaagcgtcatgcttagtctaagataattgttgagatggattatctttacacttgttaatgattaattgagttatttttaaacatatggtctctccttatggtttttatgtttttttgattgtaaggctttgtttgatgaacttgagtctatttctttgtgtcttgttaaacgttcaacaaatcatgtggctctcgcattagcgcgagcttttggtttggaagttgagtgtgtattcggttggaattcgcttccttctggtttgacatccatagttttggatgatttaaattaataaagttgttattttattaaaaaaaaaatagaatattgctaaacattcatacaaagtcacctcaaaatggtgttagacactactaaaatttaataacaatacttttttttacataaaaaatatcaaatagtatactcagtgatcaatttttagattatgataagtctattctaacattatcattctttgtaaacataaattgttttattaatccatgactataatacaacaaaaaaaaattacaaaaatacgattgtatgaaattttaaatatt

SEQ ID NO: 407269 - DNA, 609 bp, Cannabis indica
acataggtagtcccacgcctacaaaatctcaaaattagtacataatcaccgccttcaattcacctatgattccaaacaatactcataaattgtcccacttttgctaatactagataactcctaaacaaaatattttgttattttaatcaattagatcgatgcctccattaactactcatgtcttatattccacttgggaatatcaataatttgactcatattgtcatctctctaatctgtctaccgtgtcaaatgggttaccattaaataacatacatgaacagtccattcagatttcttgatgtctctaactgaatgtacaatgtttaatatcgatatcaattgaaacaacagttgtaatatttcccataaaattctaatttgagttggccaaaggaccgatactttaatccccttgagtcatgaccagtacttgggcaagacccacacactcttctattttaacatcaatatttctttactataggtaggttctttttagatgacccactaccccacaataaaataagatctggctctacattggttcaaatggtgcctttttgcatcttgaacactcaagataaggtcaccatttcttattctcac

SEQ ID NO: 407270 - DNA, 824 bp, Cannabis indica
ccgataaatataaaaaaaattattatgtatggtataatgtaaatatgtaaagataaaaaaataattgaataaagtaaattgtaaaaaaataaaatagagaagttgataggagttccaaatgtctaagaaaatagagattaagctaaaaacacatatagagtaaagcatatggtgtagtgttactttatttcttttgagataaaataatttttttttttgaacaaaaagctttcattaatcaaacatcattataaggaaacggcaagtcatgccttgcggcgtgagcacaaaaaggtgtaacctcaatttacatagcactaacatcttgagagttattataaacaagttattgagaacacttatatttaataaaatgactcaaaatgtcaaacataaagaaaaatagtttaaaaaaatgggtatcaaataaatgagttaaaatatttcaaaatttcaccttatgaataatgttttctacttgtgaaaaagcacaatattcattcttttaataatttatctattatttttctattttttatttaatatttttaacatattgtttatataaataaaatatattttagaaaatataatatttaaataatatagaaaaaaataaaaaaaaaattaatatatgatttaatataaaagtatgaggtgaaataaaaaaaatgaaaaaattatatagtcaagaacatgataggattgctacttacatttaactaagaacacattagtgtatttttaatttaattcttcaaatattttaagaaattaaagtgctctaaaagatggtattttagataagtacgctattttagcat

SEQ ID NO: 407271 - DNA, 649 bp, Cannabis indica
gtataaacaagggtaatctatcgtgataataatacttagttataactctttcgttataagttaaatttttaacaattaagtatatgtaaataattagcatttaacaataaatttaacgtgaggtgtacctcatttacaataaaatgttaacaaaaaaatattattaccctcaaaatttaaatttaaatatttaagtgtgattggaagctatacattaatattatcgccacaaattactctataaacaatattaataagagcaaatacaattttgaatcctgtatttcgtaataattactaattagattctctgttttgttaaatgataaaatagactcggtatttttcaaaatggtacaaataggaatctgaactgattttttgtcaaaataaaatttaataataatctgatctaaaagtgttatgagaaaattgtttacattttctgtatttgttcgtgttaggaattgttttcaagttagtcatattaaaaaaaagttacaaagattaaattcagagtcctatttataccatttcagaaaatgcaaagtctatttttttttttttgaggaaaatacaaagtctattttatcatttaataaaacagagagtctaactggtaacttttacaaaatataaggtccaaaat

SEQ ID NO: 407272 - DNA, 575 bp, Cannabis indica
ttgagtgagggcttagcccatggtttaaagtcactccgtccatatcaccctctcaaatagtctttcttcccttcctctgcttttttttcttggacagatagcatcagaagacacgtcgattcctcttccattttcttggactgagagcagtacaggtatacttcctcttcaagctaaacccattcatctctcaagactctcactctctctctctctcaggtcctattaatactttttctttccaaagaaaccctctccgccttaggtggttgaagaaagagaacgtttctgcagctacacacaaggttatgaatctagcaaatatatacattatataatttctttctaatattgttgtgttaaattttacatttggaatccattcatttcctcattagttttattattgtgttataatatatgaataaaatatacttgtctttctctccttttctttacagtcaaatccagtttgagtcttttgaactccgtggctgaaactcaaaggatcagtaggatgagtgatcttccggagaaaaaaagaactaaagggacatcaatggttgaggctgagg

SEQ ID NO: 407273 - DNA, 431 bp, Cannabis indica
ttggttggtaccaaaatagttgaagaaattacttagtatacccacttttatagataatattcccattagaccccttagtttaatataaattatatgctagacttaagtaaagagtgaaagtatattgggtaacccactcaaaaaatcgggtgtataaaatataggctaaatagtaatttttccccctgaactttgacatataccaaattatgccccctgaactttttttgccgttaaaaattccccctgaactattgagattgttaaatttaaggacttttgtctaatttcattcaattttactgtttcaggtactaaatcatgctcctcagactttgatatctaccaaattatgcccctcaaacttttatatgtattaaatcatgccccctgaactttcatccatgttacaatttttttactaaattaga

SEQ ID NO: 407274 - DNA, 708 bp, Cannabis indica
aattcatttttattttaatataattattttagagggatcggacgctcgcccgagtcatggatggagttggggccccgctcgggcggtcatcgacccgttacagaccggcttctgtgtttacagggacggtgagaaggtggaaaaagaaattttttatttaaatacattctaggcctttcgttatttacctttgttggaattttatttcgttattaatttatttttaaatatagggtattttttgtttttcgagttgaaaacgatttaaatttggtcaaagggttgtttaattcattaggttgattttgatgtgttgggcggcaattcagcaattttagaagtaaagggcagaaaattaaaaacatattttttcagtgaggatactcatttctggttttgattagattgctttaaaacatgagtagtatattggaggcttgattttgattttgactggaaaagatgtagatgtagatgttttaagaccctatcaaaataaatgggttatttctgtttgagttggaataataagtgggattgtttatttgcgattctttgttgcaattattcaaattttaaatcgtattaggagaaagtgtctaaaaaatgttcatgtttggtgatgcatattataagtggactcgttgtgatgctcttcctcaaaacttcaagctattagttttagaatttggctgatcatacatagtt

SEQ ID NO: 407275 - DNA, 516 bp, Cannabis indica
agtttttttttttcaataataataacttatacacacaattatattatatataataattcaaaataattatttttcacaactctattaattagtatgttgggattaaactcacttaacctctcaagtcagtatgttcatctatttgctcatcagatgaatatgaagaaagttgttgcaatttatagcagctggctttaataccaacttaaagggggacccaccagcaactatatataggggttcctccattttaaaaagagaggtctgagtggagagggttctgatctctaatctccaatgctcatactttagattcagttgagagagaaagagagagagtccaagatcatagtgagtgtgtgtggagggatgtaaaaattgagtatcactcttgaagtgatttccctcaatgtgaggcatttctttgtaattacttgctgtgttgagttgtaatattgggctcaatctattgtgtactactgactattcctactcaataaagatccactattcatc

SEQ ID NO: 407276 - DNA, 460 bp, Cannabis indica
caaaaaatatggttaaatcaagaattcagttacatattatatagaatagagaatatgttttttttatctaaaagaagtatgtttctaatataacaaattgttaataagtttttttttttttttttacattatattgtaattaaatgtatgtaaatttataaattttcctattaaatacaaatattttataaaaataatttgcatgccaaatataatacaaattttatatgttaataattttttttcttgtcaaaaatacgatattgtattataaatgcactaaaaactgagttataaaatagaggaggagcttcttccaagaaagctcattgtttagctaaagggcatactatctggtcatggtgtgtcatatgattgagctacgcctttgctaattcatgagccacaatattaaaattgggctaattaggatttttgccccctgaactttgacatatac

SEQ ID NO: 407277 - DNA, 581 bp, Cannabis indica
gtgtttttcaaaattgaagaggaagaagaagaaggaaaatgtctcatcaaaaagctaggtttttagctttggagacattagtttggatgaagagaccatgaccttccttttatactattcttcaatagggttagggttgaattattaggaataaaaaattgataaaatagagtaaaataagcaccctatggccgaccacttaatgggccccacattggtttgggctttgtcatttttctcaactattttacctatttttcacaaataccactttttgcaacttcaaccctataaatgccaaaactatttatttaataattaaaataactatcaaataaaattgtcatttataatatttattaattagactccataaagtcatgcaaacaataattatttaattaacttattttatatatagaaatgatataaaataataatgggtgggttattatataattaagtcttaattttataatgatgatcagattaatattgttgatttataagcgcatctttttaattttcaattcatagagacagcgctgaatctacattatatgccatctttttctcttata

SEQ ID NO: 407278 - DNA, 684 bp, Cannabis indica
gcagaacttggccatgcaaatcattaacagtagtctttctaaatctaacagaatgatggtcaatttgaaattttcttggacaacacgagtatagtagtatggaattttactaaactgttgattgatcttaccttctcatcatgagaaaatttgcatcccgcacctcgtgtacattctcccttttggaaagcccggcaaacgcctcgtgcctccctcttcttctgctcagtttcttcatcttcttcttctttctttttgtacttagtaacatgatcaaccctaatagttcgacctaaaacctgtgctccatttaaattatctgaaaattcaaaacaacaccaccaaaaaatacgattagataccacaaacaaagaacccacaaagtgtatcggagcatacaagttcaaaaaaacaaatggtgagagggagcaactaacctacagcaagatttgtacttctctggtcttcatacgcaacaaaagcaaatccttttgatttcccagtccccttatctctaactagattcacgtctagaatttccccatatctatacaacaaaatcaatcaaaataccaaaacttgtgaattcagaatacaaacgattgaaaacaaaattaaaaggcatatgagagtaaaggtacttactgagcaaacacggcaagaagatcaccttcggtaagatcg

SEQ ID NO: 407279 - DNA, 1087 bp, Cannabis indica
tttaaaaagaaaaatgcatgcatatgtttcgaccaactcaatgagctcacgttgtcagtggcttgcgtttagtattagtatttatattatttatatattatttaattaatacaacattaatgatcaattgcagtattatatgttaattaatacacctaattgttttctagtttttttttaaataactttcatcaagattagttgaataatgcacactatatattgaagtgtattaatattgttgaggtaataaataggctttaagattagtactatcgaaatacttaaaacactaaacaggttcttaccaaagcatcaacaaagatagaacaaaatatccaggtatgaaccataatagtttgttggctgaccaaaaacaacaaactgtgtcgttttttttttttattggtattattatgattgtttttatcaataatattttgtgcttaggattaattaataataacaaccctatattattattattattattatgggctggattgctgtatatgattataattgattatgtaactattttatttttattatttttatttttttaaagtggttcaaatattaaagccaataatatattaggcctttgtatattgctgggttgaaccattctaatttctaacccttatatacttggggaaagtattaaaattacaaatgtaccatcaattttgcttagggcccgtccttgctaactacgtctgcgcctagggctcactcagcacagaagtccaaaaatatatttaaatttcttttaaaaatatgcatatttttttttctataattttcaaagttattatatattttttaaataaagagcccaataattttaattttttttaaggcataccaaatctcaaggccagctttaattttgctatttactttataaatattatatttacaaaattgtaatatatatatatataggttacaaacttttttttttataaatattagttacaaaagttaatatctgtagtaaaaaaaaaggattctgcattcttttttaaaatcttaactacttttgaaaattttcctaaaaaatgccattgttatagagaagtac

SEQ ID NO: 407280 - DNA, 368 bp, Cannabis indica
catgatgctggtagcgttaatctgtatatatatattatgtgtttaccgaaaattttattaggaaactgattaattagaacttaaagaaaatataaaattataaatagtagacaaatgtatacaatactataaataataatccctagtccacgagtccattgaattagccttgccggcgagtgtttaagtgctacaaatgtatacagtactatgaatgataactctgaatttctttcgtttctattgaagaagaagaaagttcttaggaattttgacaaagattcagtaagtaaaattattcaccctttcaatatgaacaaattggggtacttatacgaacatgcgtgggtgagggcgtaccctttacc

SEQ ID NO: 407281 - DNA, 931 bp, Cannabis indica
acgcaacctcaaaaaccttttgtgagtgagcttagtcaacgtattataggagaatcaaagtaaataaactataaaaataaccatagagaaagaagaaaaaaatgtatttatagcctccatcttccacacctacggaacacaacaacgcgagaacacctgaaaaataaccattaatttcggcgagatagagcaagaacagtgaaatcgatgtcaaataaataaatcatgataaaacaaccgtaaaacaatactaaaacaagtaaaaaaaaaacaaaaaaaaaaggattaaaaaaaactaatcatcttctgcacaacctcaacaccagatgcaatagatgctatatttgcaagctcaattctggaaaataaaaataaaaaaagcacactcttattttttttttaaaaaaaaaaacgtcactgaaaatttcaaaaactaaagaaaaaaaaatgaaaacaagataaagaagaagaactggacaagaaataaaataaaaactgttggagattattttaccaagatctagatttacttccatgtatgttgtttaacatcctaaatatgaatttataaaacaatggaatttaaacacatataaagttcaagaaaccttacattagctgcagcgaaattaaatgactcattccactcagatctctaacccttgttccattctgtcgcagagtattatcaagatctaagcctgattctccttcaagtgttggattcttcatagtcttgcacactattattgagtacttactttctatgtgtgggtatgtactcaatcataaagagggacaaactgtgaagaagaaaatagggagaaggaatcgaaaattagagaaagaaagagaagactcaaatttgactgaaagactaatgattctaagctcttagttttgactccatcactatctattataggaatcc

SEQ ID NO: 407282 - DNA, 1195 bp, Cannabis indica
ctaaagaatcaaaaattgtgttataatgtgcaacacatattctacaaatacggatggccatgcattacacagagaaactaataagaacagtaattttatagcttatcaatttttcctgctaatgtttctgtttttttaaactattttataacctgcagctggaccgaaaaccatctaagtgtgtagtgtttgcggatgatccaagaggcataactgctgcccacaattgtaccatgatggctgttgcattaatcggcgcttaccctgcgtgagtaatcttgaattaacaaaacaatttcaatctagggtagttgcttttttaaaaatatatatatttctcatttagctttgtttaataagttgtgatcatagttttaagtcattatctggtagagttcaggagatgtgataagagcaaatcgggtatatcaaaacaatgattgtttagttgttttcttaggttgctcatgagttgaatgctgctgtcatttacaggtatgatctagaacaggctgatcttgcagtagctagtttcaatgaactttcagtgatcaacctaaggagattatttgccaataagggggccactttcatggaccttcaaaaacaaatagttgagaaatctccacctaaaaggaaagctgactattgatacccttttctgattctttttctttagtatctctctctctctctctctctaccccttgtaatcctagttgttgatcttcatttttattctcttttccttaattatttatagttaattcttcaattttagctgtatgcgtttaccaaattagatgtatacaattcttattgtcagtgattgaaagaagtaaaaaaaggttaaagtattacaagttacaactactaattatattattataaaagttctcaaataagttcaccttgtcttacttttactaaaaaaaaacagttggcgtcgcccggactcgaaccggagaccttcagtgtgttagactgacgtgataaccaactacaccacgacaccttttggttctttaaattgtaattaccattaaaaccttattaaaacaacacatcatagttgcattcactaaaattaggtaatttactgaaaaaagatgagtgcgtgagtgaattagttatactttgtgataggggaatgctaattaactccatattacaatctcttagttaatttctacgt

SEQ ID NO: 407283 - DNA, 650 bp, Cannabis indica
aattacatttcttgtttttatttcaaatgtcaatatatacaagtcacttcatcatattagcttaagcagcctctagtattaaatcaaataaccttgacttttttttttggatattttcataaataccaaaaataaacaaaaattttacaaaaatacaaatctacaattttttttctttattacatttttgcggctacatgaaagtaatgtggaataactctatttttctaataaaaaatacaaataaaaaacctaaaaaaaaaaacaaagttcttaaaaaaagttgaattttagttactttgtgtaattttttttttttccaataaaaaccaactaatacatttttcattttattatttaaaattcgaccataaatagtaaacattttattaaacagtcaacttgaatagtgttaattaaaaaaaaaaaactattaacactccaaccacacatagtgttctgcattttttttattttcctaaatttagttacatatataagctttaaaataatattaaaaaaatccaaataaataattagttagaaacacaagaaaatcttgtttagtctcaaaaactgtgtttaattttttttgtgtgtgaatgaatgattgggtgacagtataggacaaaagaattaatttttaatgt

SEQ ID NO: 407284 - DNA, 592 bp, Cannabis indica
cataaaaaaaaacaaattacacaactaaaaatacatataaatcaaaataaaaaattaagaatataattaaatatacatgcattacacataatattaacctagttttatatatataatcattcttatgatgttcctcataatttttttgaataaaaatttaatgctttaaaggttgtattattaaaagtcaatagcgaaattaattttaaagagggttatttgcggcaaaacctcttaaagtgggcaggtttttgcaactaacctcctaatctaaaattttggtggtaaaactacctaaaccactagtccgttagcagttagccttttccatccatttttggctgttaactgccatggtggaatgtccacgtgtacacagtgtacacgtgacacaattttattagtccacgtaataaatatttaaaattgaaataaaaaatcatttattttaaaaaaaaaaaaaattaaattttctttaaaaattaaaaattaaaattaaaaaacaattttacaaaataaaattaaaaaaaaacccctaattacttctcctttctttctttcttcttctttcttcttcttcttctccttcttc

SEQ ID NO: 407285 - DNA, 671 bp, Cannabis indica
ttggaaagatttattctgcaagatcaaagaaaaagacaaattatatattttttatataattaattcagattacattttattatcattatccaaacataattaaacaaacaataattgtacatatataaatattaatttgtataaatatagttcaaacgttttagaatagagaagtacgaaaagtatatgtgaatttttaaaatgatcacccataaccagtggccttctgaagagagagtttctctcatctttatttttgtcttactgtagcttgtgctaaataatggataggagtagttatagagaagttacaatccactaaagcctatataagtgattctaattaggattatttttagaaaaaaaaaattataatctaattaggaatgattaggaatgtacatttagccacgtctatttagaaggtattacaattttttaattatccatagtgattaacaacacttatcttaaagtgttgctattgtttatttgtttttattttaataatataagtttaaaaatatgagacttaattagtaacacttattttttaagtgtgtcaaattattaaaataaataaattaacaacactttttttattaagtgttgttgaataagtgttgctaattataaattttgtagtagtgaatcattctgaaattgtatta

SEQ ID NO: 407286 - DNA, 595 bp, Cannabis indica
atgttatgtcaaatgataaataagttatcctaacaaaatatagaaaagatttaaattaaaaaatagaacttgtacttttaaagttaaatatttaattcaaataatgtcttttaattttcaaaacaataaaaaacaattttacaaaaaatgagcttactaaattaaatcgttaatgatgaagttattgatggtgcaaataattagtttagatgtgtttagtaattttggtataaaattatagttgttaatttgtttagtattttttgttgggtcgagatacaaaatgatcttaaatttaaagattaagttagtaaatgtcattttttttaaaaaaaaaaattaagaaaatgatcaaatataataaattagctaataaagattataaaaatatttttactacatattattttttttaaggaaatatacaataattaaattaagctatataatatttttattgcatattattatattgttacaaaaatgaataaatatattcgatcattaaatatatacaacaatattaaatatatcgtatcactgaaaattaatatatcgtagtaataaaattatataccacaaaaaattataacaa

SEQ ID NO: 407287 - DNA, 511 bp, Cannabis indica
gaatagaaggaagaaagaaaaaatagtagaaccgtataattagtaattttttaaactttataaagagtaattaaaagaaaaatctaaaaatgtaaaaaatataaaaaaaaagagagagcaagtataaatgtttaatattagtaaaaaaagttacttagtgtaaatttctcgtatgcatatggtagggaagtccataacttggagaatatcttgtttttggtacctacatataaaaaaaaataaaactatatctagatatattggattaagaaaaaaaaaaaattggtaaaaattaaaattcatagaaaaatagaatcattttccatgaataatgaaatttgactccgaacattttaatgattaagctagggtatatggcatgtttacttaaaggaaatggaaattaatggtatggtattgattcccatataattgtttaaaagggaaatgttctccccctatttttacagggaatgtctttaccttttcttacttaatttattttaatttt

SEQ ID NO: 407288 - DNA, 245 bp, Cannabis indica
tttctctttagttttcttgaattttctatttgaaaagactatgcaataatgtattattttattattcttttctttaattgaaaagccagctgccaataaaaggacacctatttttcaaactttaaattccaatactaccctttccttaatgcataattcaatgaatgacttaaggttaaaatagtccaatactataatctctcttaaactcaatactcaaacttaacatatactataactctaat

SEQ ID NO: 407289 - DNA, 332 bp, Cannabis indica
gctcatgaatgaagtttagcaagtaatattctacaagagtttatactgtgtattgtgttaagttttcacggttgttccagtattgtgttaacttttacctaaaatctagtatttttataaaaaatcctattccacaattctctcgttctaaagggaaatttacacagtatactaacttttaccaattttttacaaaaatactgccaagcggtattttttatttttttactatattttttttataagtttcatactgcagtatactgtgttaattttcactggtgttctactgatattttttagttgttctactgttattttgagttgttatg

SEQ ID NO: 407290 - DNA, 762 bp, Cannabis indica
atattaatttgaataaattacataacatttcttagtggagatggaaattcctccaaccaagaacaatcagtatccactgtaagaacaaacttagctatagagtgagcataagtattagcaataaaaatattattgaaaggcaacgaagaaagatcaatccaaattaattaatgatgttgatcaatatcatcaatgttaggtgtattaatatatagattattgttattggatactagtagtgcttagtatctttctagagatgtcattttgtgattgattattgatatttttttaaaacgttattatataaaattatataagacttgatacttaattagactaatagtaatattgacacataaaagaatactaagcaatactcgtaacttttagtatttctctaatatataatactgcttaattgaaaagtaaattattgagtataattacatgcaattatataaaaccaatagactgttgcaattaaaaatgagttattccttgaataacaaatgttgttataaaggttaacataattaaataactaggcgtgtaaatgtgtagtggaaatacgtttataacagataaaaaataaggctaattaagaagtttttcccctgaattttaacatgtaccaaattatgttctttgaacttttaatgttgttaaaaatgctctctgaactattgagattgttgaatttaaagacttttatccaattttagtaaaaaaattctaacatggatgaaagttcaggggcat

SEQ ID NO: 407291 - DNA, 322 bp, Cannabis indica
tacccaaaaattataaattaggccaacaaatttttgtttagttaaatgtgtattttgtgataattaattaattaatgggtacgtacgtaattgacaaaatcaatttaattaaactatattataatgctgtgaaaattaatgagttcagataataagcaaaatttgtggaaagaaaatattaattcaaatgaatcctttgaattctttttaatgggatatatatttatatttatatattatacacataaaaaataaatgagaaaacaaatcaagctagctacatctataaattttgcccatcttaatttatttatttatttat

SEQ ID NO: 407292 - DNA, 548 bp, Cannabis indica
aatatatactttttagtcaactatatatacacatggagcttgtatctcaataaagtaccactaaggagtaattaggagtgtaccaaattatatttagaaagaaaagacaaattgattggttatacttataacttaaaaaagagaaatatatatatatatatatatatacatatatttatataattattattaggataaagaagttcacatcaacctggatcatactttatttaggattaatatgaataattgattaatattttttcaaataaaaactggattttaattttttattatttatatattattttaattttttttgttacttttatataattttttttatttattttataaaataccgtaaaaaaactttgagtataaaaatataaattttttatttaaaataataatatatgtaattttttagactaattagcaatcacccgaattttgatatatatgtactaaattatgcccttgagcttttttgatcgttaaaaattctccctgaactattaatattgttaaatttaaggacttttgtc

SEQ ID NO: 407293 - DNA, 564 bp, Cannabis indica
ttttttttttttttgggtttttttaaaaatatcacatatttagcttttgatttttagtattattatttttttttcttttttttcaattttttaaaattaagatatttatctaataactaacttataaatatatacataaacatcattttaatttgatagtgtaggtttttttctcctctcagtttttattcttatgccataccatattaatcaacatctctaggtaaatgttttatttattcttttttttttcggtgcatcaatagtttgcaatttttatgagtacttaatttttaacattatttttcctgtgaattttggaatttttattttttctttatcaaatatcgagaatatttttattaatcatttactatttcttctccactatgagatagatacatatatatatactagaagaaaattacgtgcaagacacgtatatttagttttatgttatgtggtctataatttaattaagaaagattcaataaataatcatataatttaaaatgatttaaaaactaattttaattagtgtgtggggttatttgaaaatcaata

SEQ ID NO: 407294 - DNA, 476 bp, Cannabis indica
tataaaattattttagaaaaaaaagttagaaaattaaaactaaaaaaatgttatgtttacttaagcaaatgtaaattttagataaaataataaattcaaacttgttcctctaaaatttagtttttacaaatatattaaaaaaaaaatcgcttaattaattttgaaaatgtaatttcttttttattttcttaattattcaaaatatttttcttaagatccaaataaattttttaagatttactaaaaaaaaaaatattgaatctttctcattcttattttttttaagggtacaattcgatagtcatcaaagtttaggaggcaatattactaatttataaagacacgacagtatttaaacggaataatgagatggaacctaacagaatgattaaatttctacgaatgaaaaagtttaggggaaatttttaacaggttgtattttttagggggcggaattagtattgtcaaaaattcaa

SEQ ID NO: 407295 - DNA, 528 bp, Cannabis indica
ctaagtctacaacattgaaccctgacccagaacccctgctgtcgaacccagacccaaaagccccgccgtcgaacccagacctagaaccccagtcacaagcccttcttgttgtcttctctcacagtctttctctctctaagtcttatcatctctacccccgaaatcctcgagctcaacttgttggttttttgtgccttaactaaaactctatttcaatataatcttgaatattcatttatcaataaacaaatagaattagtttattacttgtttaatatattgattggttcacatgtttgtttcgtgatcatttgtttgatttataaattcatctatattcttatcacattgttattcatgattactgttttctatacagtagaaagtaatcgagattatgtgattaaacataatcccacgatttaatcagtacgggattttcactgatatgttaaataatgtagtttacttacacttaaatagtgttatatcttttttaagacattggtaaagtaagcttggattgga

SEQ ID NO: 407296 - DNA, 477 bp, Cannabis indica
caagggaatagcagctctaagcaaacaagtattattgcatgcatgttaccaactagtactataatttttttacttttagttacaataaatctagtgattaaaagtgaaaaagttatgactaattataaaatttttatttatatgttttgattaaaaaattcgtagttaaggtattaataaaaaaaaattctaattttttgttactaaatgtgtttttagtcacaatacttgttgtgactaaaaataaaatagtggtaacttatcaaaatactatgttttaattaatcgtaagtaattttttattatgactaaaaattacatttaactacaaaaaattaatgttgtgataactaaaaaaattatcaataaaagtacatgaagagtattactatatatgtattagttaggggtgggcataccgatccaatccaacttttttttcctcatccgatccaatccaattagtaattggaattt

SEQ ID NO: 407297 - DNA, 1121 bp, Cannabis indica
ataaaatttaaattatatgttaaagtcctacacttctctgttataaattatagtatagtttgcattaagcatagaaattataattgttacacaaatcatataagtatattcatccaagatgagtgctaaagaaactctcttttacactttcttcttaattaagtgacatgtgtaaccttctaaattatgtttaaaaatagttacaattatacccttatttaatttttattaatgataattaaaatgagtcatctcatttaattgttttattaattttttaaaactaataattaatttatttatatttacttgtttatttgtttttcagacaataaattattcttttaatttcttttataataaataaatattggcctttataattaatggaaaaataattcttttcataaattttgcaccaatttttttaatatatattttttttgcttcgtatcattctttaaaaaaaaaaattgtgtttttttatttacattttcttaaattgttctcaaatttttctttaatcaaatatgtatacgtatgttaaatcaattagtttttttgcctattcatgaaaagaattttttttacttaaaaaaataaaataaaagtaaatccatctaacacatacaattaactaggcataatcatatttaatttattttttcttctttgttttttttttttatatatatatattataacaaatataaaataaaaaataatttaaagaataatacaatatgaaaaaaaaaacactgatttaaaacttgttaaaaaaaaagaagaattactatttttcatttttctaacataaaatggtacatatatattagaaaaaagaattttaataaaatgcatagtcgtgcatattatttagtaaaaaaaaagtaagaaattaataaaatagtctaaaaaataaataaaataaacaagtaaatgagatgacacattttaattattgataaaaagtaaaaagaatataattgtaactatactcaaatataccttaaaaagttacacatgtcactcatttataaagagagtgcaatataaagtgtccttagcattcctcattcatccaatatcgaaatctatgtttattttactataacataatc

SEQ ID NO: 407298 - DNA, 540 bp, Cannabis indica
aatagtgatgcatttctatgatattcatattgtagctggatagcgattatggtcactacagtatcatgacagttgtggaaaatatctaggtccatacttttattagattttttaaccgctaactaccaatgccaataagaacagtgaagaagtacatggttcaagatcaacttaaggcccattggccattagagcaatgcgggcatctccaatcatggctttaaaagtccttaattttttttttttgttttttttttttttttttttttcctattttgaagccaaaaaatcatctccaatgaggttttaactttattattaaaaaatatagaaaaaaatatgaaaaaaatcattataaataaaggggaataccataaagaaattttaaaactgtgcgtgtgtttttttataaattaaaacactaaaataaaaataaatgattttaattaatagggaaattacctcatatattatttttttaattttttttttcaaatttacggtttaggtttctaaggtggttgcagcgctagttgcaat

SEQ ID NO: 407299 - DNA, 853 bp, Cannabis indica
ggtagtgatctttcaataatgcactatttcattaagtatgtttttttatggagaagggagaatacaaaagccctagtgtttattcaggaccactacctatttatagactcattatataatgagttttgggtatttataatttggccctcaataatttataaattaacttatggtatctacatattatttccatgacaatttaatacccttttgatatccataacataattagtcacttaatttgtatcacactttataatagcatatatacattatacatatgttcccacaataggattttaatccaacaatctctcacttgggcaacatgtgttaccttataaatgtatttaaccttatgagctcaaaatttgttattatgtaaaagtattcacaacaatatctcgtccattaactatacccatataggatcaaagcagttttcgtcatatcattcatcatgactaaaccaaagtgaggccagacttaaacatgacaaaacaaagtgaatgaattgaaaagtttatttctctgataaaaaactaaccaaatacataaatatcttagacaaacataaagaaaaaaaatactaactcccactaaatcatgatatccttaagcaatactacacccatatgggcagtgtacccatgaaagaccttgggtggcaatccttttgtgagcggatccgctatcatgaagtttgtcccaatgtgctctatggatatttgtccactctacactctttctttttacaactaagaaattttatgtcaatatgctttgacttggatgagctcctattgttattggaatacaacactgctgatttattatcacaaaatatcttgag

SEQ ID NO: 407300 - DNA, 624 bp, Cannabis indica
atcaagaagagaaccggggacttttaaaattttcaacaaaagagtcaagataaaaagactattcaatgttggagacttggtgctaaggtgagtatttacaaatacgagagatgcatctgcaggagtgttcaacctgaactgggagggtccatatgtcatcgaagcagtagttggaattagagtttacaaattggctcgactcaatggctcgctaataaagtactactggaacgtggaaaatttgcgaccctactaccaataaataaatgatgtaactcacattactgatgtacaattttaacttcaatcatgaataaagagaatcatttctataatttaagtaattacaaagttttactctttaaaattacttaaggggcatttatgtatgattaaatagaattcatctagaaatacatggtataatgcaaacccaccatttcaaattttttttttttgtaaatttaaaggttcttgactaaacctctttgatgaaagaggggtcgaaatgttataacttccagaccaaacttttttgacgagagatgggtcaaattgttatagcatcctaattaaacctttttgacgaagaagggatcaaacaactataatttttgattaaaa

SEQ ID NO: 407301 - DNA, 881 bp, Cannabis indica
tgtaacctcataataacctaatattttatttctttataaagctttaatttagattaattttattttaaaattaaattaatttttttgtaatttgttactaaacaaggttcttttagcaattaattttctagcacttaaattattttaatatttgtagcaaaactagttacattttttgtatctattcgtgttagaaattatcttaaagttggttatattaaaaaataaaattcttgaaaattgagcttagggtcctatttttactattttgtaaaatatagggtctatttcgtcatttaataaaatagagggtccaattataacttttgcaagacacaaggtccaaaatagtatttatccatagttatttaccgcttaaccaatttattttagaaggggtagaagtctattttttgtaaaaaaaaaagaaggtgctattgtaaatatcattatcaaatataaggctgttcatcgaaactggaaaaccgtggtttaaatccggaccgcgacaatctaaaccgctgtagaccgtaaccggggaaaccgtttttggtggtccggttaatccgaactgtttaccgcgtaatagttcggttgcggttcgtaataaattattaacggttaaaccggaccagactgtttataataaataattgatttatatatatattatatatgactatatgtataatgtatgtataattttaaatttttttgtgtgtcgggtattttattgcatgaattttaaattttatttgatgtttgacttttgagaatttttttatattgttgtttatatgttatagatctattacttatcatgttaaatatatactttgaaaaataaaatttaaaacttggtaaaaatagtacaattactt

SEQ ID NO: 407302 - DNA, 820 bp, Cannabis indica
cattagttttcaaaaattattttttaaggttacctaaatgtattttaattaggctaattagtaatttttcccctcgaactttgacatgtactaaatcgtgccccttaacttttttagccgttaaaaatcccccgaactattgagattgtaaatttaggacttttgtctaatttagtaaaaaattctaacatggatgaaagttcaaggggcatgatttagtacatatcaaagtttgaggggcatgatttggtagatatcaaagtctggggagcatggtttagtacataaacaatcactgaaacagtaaaattgaatgaaattagacaaaagtccttaaatttaacaatctcaatagttcggggggaatttttaacggccaaaaaagttcagggggcacgatttagtacatgtcaaagttcgggggaaaaaattactaattagcctttaaattataatctaccataatacaactgaaaaaaaactaattaattactcagatgtatacaaataagcttttagagagtaataaccaatatatatttcaaattatatgatataaaaattaatttttttttatataaatgtaactaattagtttcttatcaacattattaataagctaaatattacttataaaaatgcagaagtaaattaaaaaaaattggaaaatgtacgaaaaatgtaactttggttaatgtggaatttcagtaatagtagtaacgttattattgtaaattatatatatgcaaaaagtatatattattataaacttcccaaataaaattatatgggaataaaaagaaaaaagataaatttcatg

SEQ ID NO: 407303 - DNA, 529 bp, Cannabis indica
tgctagtcttattttctcctataacgctagggcatatatataatgggagtgccaaattagtgagagtatttttgaacaaaaataattctccaaaatattatgttgaaagttgtatttaacacatactaaaaatattatgtcaatttagtatagatgacactatatcaaattttacacacaataaatattatatgttaattatagttttgtaatttaactattttaataataataattttatattattaataatctttaatgatattttatttaggctaattagaaattttattcctgaactttgacatgtacgtaccaaatcaggtagttaaaaatgttcttgaactattgaaattgttggatttaaggacttttgttcaattttagtaaaaaagtctaacatagatgaaagtttagggggcatgatttagtacattttaaagttcgagaggcatgatttgatatatatatatataaaagtctggggagcatagtttagtatataaacaatcactgaattagtaaaatt

SEQ ID NO: 407304 - DNA, 976 bp, Cannabis indica
aaaaaatacctacaattccaaactgatatgcctgaaatgaaaataattccacatttccattttttttttttttaaattttcctgtgttttctaaagtaacctttttagttactattaagagttagtcccacattgctaatgtgtggaaataaattgtgatatataagatgaatgggctattcttctcattgccaattggttttgggataaaaccccatgattctcaacttgatatcagagccatatcccttgcgggaaagtcttatacagatagtgaccatgtccactctgatatggttcaagattgatgagcaaaaaatagtcatcatcaaatggtagagaattgagccatatataagaacatgggctactccactcattgccaattggttttgagatggaacctcatgattcttaacatggtatcagagccacttgtgatctgttgtgagcctaaattgccgccggtccaaaaagtcgtttgtgatctgttgtgagccaaagtgccgccggtccaaacagatacttccgatgtctcccctttaacctccatttgggacctttcggccaatgtgtgctaatttcaagtgttggggtctttgacctgtttcaaaatctacaaatttcccgacgtgtgcacccacaaatttcctgatatttggcctgtgggattctttcaaatgtcaccctgtggtctcttaaaggtcgttccttatacccacactttccaggcctaaacgtgaggagggtgtattaagagttagtcccacattgctaatgtgtggaaataaatttgggatatatataagatgaatgggctattcctcctattgccaattggttttgggatggaacctcattcaccttatccccaaattctaacagttactaataatgccgataagaaactaattagttacttttacatttaaaaaaaaaaaaaaaaacttttaaatttttatatcatatagtttga

SEQ ID NO: 407305 - DNA, 531 bp, Cannabis indica
ggttcggtcccagatgttggtaataacctattctccttttatttttattaatcgaagttgcgaaatcaagaacaagctcttgaatgcaaggaataaaagtactagagtttttttttagtgttgaattttcggatccccttcccagctcatggttctcacttcaggagacgcaaccatcgcgaagatatctcaatcatctccttaacaatttttacttaacaatttttcggggtaaataaatgtatatcaacataacaaaaatgaatttaaatatcactttaaataaaaagatataaaaaaaatactcaacatttattttaataattatttatggactcctcaatttattttatttttttaaaagaaaaagcaacatcatttattatttccaaaaaatgcaactaagcatttattattaataagcaactaataaaaaagagaaatgctaaaaggcatcctaacactttttgtgtcaatatttttattggtctaattaagcatccggtctcatataatttaatataaaagctt

SEQ ID NO: 407306 - DNA, 560 bp, Cannabis indica
agagaagagagagagagaaatggtttgaaatgagagagttttagttagtatttagaattagctgttaggaaagataggaagaagaagaaaaaagcagaaggttgagaagtgtgggtcccactggaaaaggtgacagagaaagggtaaatatgtaaatcatcattctaagatgcggacccaccattggtttctgtacaataggtcacatcacatcatacccccgtacctctcctctgtagtcctgaatgttgcccactctctactctctagtctctacgctattcttcccttctctcttttttaagaaattgcgtagatatatattgactaaaaaaaaattagcgcggtcactataaattaaagaacaatttgcggcgaaaaccccttatgttttgatttttatacacttaacccccttatctttatttttggtggcaaaacccccttatgttttaatttttatacacttaacccccttatcttttttttgtggcaaaatccccttatgttttaatttttatacacttaacccccttatcttttttttggtggcaaaaccc

SEQ ID NO: 407307 - DNA, 1123 bp, Cannabis indica
gtgaatggaagtaggatgtgtagctatcggcaatcagatatatcatacaccccaaatgagctgggaatctggggctcagattctcggtcatttactttgagtctgactttcatctccttcccttttcccattgcctcgtaccctccttcaggggaggtctttgagaagtgcagggccaagaagaaaaacactagtttcgagaacccgattacatatcccaacaaccctttctacgatgcaaatcccataaaggaggctgtaggctgttcctagtgtggggagttgttagtttcttgggggagagctaggcctgctcccttatacgaacaatcttccttgcataggggtttatttcatcaaaaatcatgtcgagtctcgtggcagaaagcttttggctttcactaagaaaggcagaaagcgcgcatgagctgggacattaaattttgacttataaataccaaagggcgaagtattattgggttcgtgagagttatgttgaaattttataaggcagtcttcggctttcgcgaaagaaagttaaagtctcctaaaagttcaaacctaaactctatttgataggatccagggagaaagcatcacgaggagtaggatagacttcaagcagtccttccaagtccagcaagaaagtttgaagacttatcgtacccccaatgatctttcttgcacaaaaaacaacgtgcatgtgagagtcatgttgaatttttatgtaacaagctttgacttccgagaaggaaggttcaagttgtataaaaaattcaaacttaaacttctcttgaaaagacgaaacggagagcataacgaggagtaagatagactttaagcagtccttccaagtccaagaaggagggttgaagaattatcataccccagtgatctttccttcccgaaaaacaacgtgcatgcgagagtcatgttgaatttttatgtaacaagcttcaacttccaggaaggaaggctaaagttgtataaaaattcaagcttagactttccttgaaaagatcgacgttaaagcataacaaggagtgggatacacttaaggtagtccttccaagtccgggaaggagggttgaagatgtatcgtacccccagtgatctttcctgc

SEQ ID NO: 407308 - DNA, 1273 bp, Cannabis indica
aatttcgggttcatacaatctagtcccagcggtttatctgggtgcatctgaaacactgcatctttaacctcttcatcttcaatgggccgaagaaggagctcattatgctcatcacgaacagcaggggtcccacaatctaaaacctcatcccacctagaaggttcaacagtaaataagttggtgtaaaagtcgaccatcacattatccaagccattgtcccaatgtctcatgttcccattcacatcctttagacgaaaaatttgattattacgtcttctagttgatgactttgagtgaaaaaaacttgctattttgatctcccccttttaaccaaagctgttttgatctttgtttccaaaatatttctctttgattcaacacagcggagaactgattacaatgtaaggaaggtatacacataacttaccacctacaactaattctaactaacactcactatattcgtgcttaagaacagtgactaggtagtaacaactcagaacactaacaacatgaactcctctaacaatagtttaatgttaatacaactcggtattaaaaagtatgcatatttatttacgtgtaaaaatggttttaaaggtgtcaaagagatatgtgcctgacaaaaatcttccttcactaatttggaacgatgttagagtgacgaggagaatgatttctgatactagccctcatagaattgtaaccatttacacaactggttttagtaaacaagctagctgggactacgatgacggtacatttttgtcatcatacatacatacataccaatgatctttataagcgttatagcagtatcttgattttttatcattgtcatgttgggattttatgccctaaataaaacctatttcaatataatctgatttgttatcaatagaagattagaaatcatttatggttacatgtagttttcatgtttatggtttaaagtatacaatttatgttaagtccagaagatatagttattcacaattacaatgatgtcaacacagtggaaggtaattgtgattatatgcttcaaaagataatgtcccatgattcatcagtgcactggatttacagtgatgtgatagtcagcaataaagcttacttacaccttggataagtgttatgttctttccagaatattgacaaagtatgctagtatcagatgtatggattatacattggattgggaccgatattgatcttggtaaagatattataatctaccgttgtatctttgtaagtcaatatcactggttgatct

SEQ ID NO: 407309 - DNA, 377 bp, Cannabis indica
attattaaaatgagttgcctttataaaagttttgggtacagataaaactctccaaataaaattatatgggaggaaagctaaaaacctaatttttataaaaactaaaaataaggaaattaagggacacatgacatttgcactcagcaaattaagaaatatataaataggggattattgcagtaggaattgagtattttaactattaatagggaaacctatttttttttttactttttagtttactagtgaatctttcacgagcaaactattcacgaccttatatataaatattgagaaaaaatattactcatactcaacactactacaaaataatagatattatatcgctattactataattaagtattaactttcac

SEQ ID NO: 407310 - DNA, 561 bp, Cannabis indica
atataagaaattaaaaatataaaaaaatacaatataattagtgattaactgttagttgtaaaaaaaatagtgaaaaagtgaaagtccaaattcgacctcatataagaaaattggctaacctatttatgaaaaaagataagttgagaaaagcacaacaagaaaatataggcttatgggtcgtatgaggtcacccttttaaaatattggtacagtatagcacgacccatattttttatgagccaacacgacatgatcgatattattactggcttttcaaaatatgaatcaaactggcccgcgacatgcacatatctacagctatgatcacaacattggttctaatagaataaaaaagttgtttgtaaaaaagaaatgtaccattattgtcataggttagctaatagagttgcacactatttaactaagttaactctttccaaaaaaaaatcatatatttggtagcttggttattatatgcatgccttgattgaggtagtatgaataatttacactcaatatgagttttaattttttttacttaaatatggtagctttaagttt

SEQ ID NO: 407311 - DNA, 669 bp, Cannabis indica
aattagatatggggttaaaataagtttgactcgatattaaattgtaccaatagtgaaactaggcagcgtcctttaacatttcttttagacatgggctctaatggggtagagttataattggcaacatacacttttgtgtaatgcataaataagcataaagcccggaaaaaaaaagtgactttaataacaaaggtacaaaaagaaaagcaaataaagaatgagaaaagcttattaggggcactactagcattattatcatggtgacagagaattcagagttaggtaaaggctccataccataaagactaaagctttttaaatgaaagaatttctaccttcttcaactactaagcttaaatttacacctaggaataaaatgtcatgttttaatggggtttctagtttatgaatgaaatcacaagtactttggtttggttgagttgtatcacaaaaacattttcttaaaaagttataaagtacacaaaacaagctcacaatgtttatatatatctatctacttcttaccaacctaaaaactataataactctaaattgagataagaaagaaaaaacagctacaattacatatagaattgccaactaactagattgagtgggcccaacgtttccccaacataggtaaagttgtgataatcataccattttatt

SEQ ID NO: 407312 - DNA, 518 bp, Cannabis indica
agaggttagggattctagggatggggtttgctcaagctcacgtcagagagtgacgagggtagatcgtagacctgagagtagggatgcatatttcccccacgggggatggggccccgcggctaatggggcggggattccccgtctaaatggggaacggggcggggattactttttgtccccgaatgttaaacgggacgaggacggggacccgtttagtatattatcttatatttctagtaatattttataatttataattaatgtttgtatttttttagtatatcagtatttttttttatgaattttatgttgtgttttggataataattagtttattgaataataattaatgtgtaatattttaattcttatatattttaatatttttgtatattaaaatttttattataaactttatttttctattaggggattccccgccccgtccccgctctcattaggggattccccgtcccatccccaatggggaataagcggggatggggattaaaatcgtt

SEQ ID NO: 407313 - DNA, 609 bp, Cannabis indica
cccaagcctacaaccccaggaccactatacaatgcttggcccttaccacaaaaaggccctacacacagtttctattgccctttacaacttttttttggcaatacaatcaactgactccaataagcctgaattgctatcaatacagaattaattagagtgatccgacctgcaaatgagagatttcttgaactccaacttttaattctagccgtcattttttcaaccagcagctcacattccttacctgaaatcttcccagaacaaataggtatccccagataagtaaatggcagagcttgtttagagaaccccgatgcttcaatcaagttcttcacactcccttcattcatgttactgcaataaattgcagttttgctagcattcggttgaagcccagaagtgaaagaaaaaagtttaagagcttgaagcatataagtgatgctctgtgtatctccataacaaaagagaaggacatcatctgcaaaaaccaaatgattcaattgaagtgaggcacatctatcatggaataggaagtcctttttctcacctattttcttcataagtctagataagtattccattcccaagacaaataacagaggagacatg

SEQ ID NO: 407314 - DNA, 576 bp, Cannabis indica
aaatattatatattgaattcactttttttatttttttttaattttttattttttggggatgggaatatttgaatttgggtcctcttatttttgagaaaaagtagtgtaactactaagccaataacaagagcccaatactaaaaaattaaggggaaactttcaattatataccaaatactaaaattatttatacacataccaataaaattttaaatataaatattatgtatacttttacacttaatataaaataatacatgtacatattctaatttttttcttttcgcatgacagtctttttcattgatattttatttctcaattatgtgaagatcagtcacttttttattttattttctttgttttctttgtttttttcttgtagttattattcatactaaaaaaaaaaaaaaagttaactattatattttagatattaacatggatattattttcaagatgatcatctgataatatatttaaaattaaaagtaatatttaagttacttttgtattttattatcaaataagagtaactaaatattaaaattaaatatatatattgttggaaattat

SEQ ID NO: 407315 - DNA, 565 bp, Cannabis indica
cattttttttttaagctacattatagtttaaacttttttataattatattttttaatcaattttttaattatattaaattataaaattataattttttttgtttttaaaatagtacaaattttaatttaattacaacataaatatttaaaactaaatattaaatattttgataattattattaaatattattatttaattatattactttatcaatataataatatttaattataatttagataatcatatatctaaatataatgtttaaagtgagattagttttgttttatttttttaaagcattagattatttattttttaacaatatttggtttggtaggcgaatcatcaaagagaattaattagtggtatgacttttgtttggtcctattatccgtgatgagtaggtataatataggagtttttacaaaaatactcgattttgggtaaaaatttacaattttactatcatatagaattttctacaaaaatattatatttttataaaataaccgtaaaataacaaaatataacaattaaaacaacagttgaacaactaaaaa

SEQ ID NO: 407316 - DNA, 621 bp, Cannabis indica
atatatatatatatatatatttttttttttttcattcttactaaaaattgatttcaaatttctgtatagattctaagtgttagtatgctatttagtctttaagtttttttgtttgtttttttttaaaaaattgctcttagtttcttttaaatagcctttcgttaccaaaagaataggattatttttgaaatacctaaaaacaataaaacaaaattatgtttttacggaattttgagtttttttttttacattttttatagactatttttttttcttttctttacaaactatatattgttggcaagttgttctataaaaaattattatttatagtataacattgcaataacataaaataaccttaaaataatataaaattgtaaaaatataaataagaaaaattgtgaaaaatgtaaaaaaaaaaaatctaattttttaggcgaactgagtaaattttaaaatgtagtacatattattggagtttttgcaccacatagagaaatttctaaactttttactttttttactatggggcaaatgtatttaccatgtttttttttttcaaaaattaactgtgtaagttttatactgtgtatgttaagtttttacgtattgttttta

SEQ ID NO: 407317 - DNA, 558 bp, Cannabis indica
ttatagtctttgtaattgtttttattgtctatttattagggagcattttagatagctaaatgtatcgattttgcttctatttgcaggagctatttttttttttattatcctattttttttatttattatattggcttacattaaagttaatagtaggcattttgctaatattttgaaaattctcaattatttaaaattgtaagaaataaaatttaaaataaaactgcatataacataaaattgacttgtgtactactcactatatgaatcctatatttggtatcatcaatatttaaatatttatgaaataggcaggtttcttactataattataatatacctcatataaaaaaattaacttaaaaattctctatatacaaaaaataaaaaatgtccctaagcacaaaagtgatgtccctatacccttatataaaggaaaatttgttaaaatatacttaaaaatttagactattcttttaatatactacttttaaaataatactctaaatattctccaaacaccctaaaaccccaaaattacctttacaattcaaaaac

SEQ ID NO: 407318 - DNA, 1218 bp, Cannabis indica
gcttttttttaataatccaaaacaagccaaacttgagtatgtgcgtgtatgttaggtaaattgagctttgtaaaaactttgtgtgttagttctaaccaaaccaaaagctgataaaagtactacttttttgagtacacaacatatcatcatgaatgggttatatgggttgaagtaaatatgtaataagagagtttaaccctttaaaatcaaaaccattgaatcatgtgtttttgtaccccaaatatttccgtactagtaagaatctacctaattatataaaccaatacatgtgacactctttgcactcaaccaaggtttgactaagtctactcatagttttacattgtaataatgatcaaactatgctaaattttatttatttttgcttacagacaagaatgtgaagttgaagctcaatttttttttgttagatgaattatctcatagtattattgtaggataggacccttatttgataggtatatagcataatatatagaggggttagagaatagagagtgcttggatttttctaacatttggtcacaagaaagaatgtctagttgatttgatgcttaatataggtaaggagaagaggccaaacaactcacagaagaattcaatatagccttagctggagccatacctataatcatttttcatcagaaattgaaattaaaatacacaacaaaacaatgctattgagacatcatactttaattaattaattcattaataaaaagttttaattataattaaaaaattaatcccaaaagatcttccgacaagaataaagcaactatgtaatcttgtcatgagtgaaaagatttcaaatgtattaattcactaagaaactaatttaattcattagaataatcaaaagaatagtgagattattatattattaaagaaaataaataaggaagatataaaagaagaaggaaaattagggggagttaggttttctttatttgtgtaaatatgtgtatagtatatgtatgtgtgtatgaaaatgattttgcaccttcaagaagctttgtttgaatgttccaagtaaaataatcttgtcacctatatatatctaccttttgacattattaaccaaccgcattaaattatgtagtcacatttctctctctcatttttttctctatgaaaattgaaacatggtgtattttgtcactatcatgtttataattggggagttttcatttttat

SEQ ID NO: 407319 - DNA, 1231 bp, Cannabis indica
aaaggagaataggttattgtcaattatggggccgaacctctataatctatgcgtgatgtttatagttcttgcatgctattttctttatcttgaacttttgcaattgtcatttttattgactatataatatttagtttgcatacattattaatatggagctctttaacataatttgttataaaatttaaccatgcactgttttaatgtacacaagaaactgaaattgaaatttaatttcaggaagatataattttttcttacaatatatgaatattttgtaggggggcgtgggaaactccgtagctagaaaatgaagtaaattgggttaatcataataagagatgtatctatttaaaattagatatttgagcaagtaaaattagtcccacattgtaaaactagaaagaactaataacctttatttaagttgagcttgaaaactattattgccgagcctagtagcgtgggcctgtgaccaagcggggcattaaaatggttggatgcatggcagccggcgtggaccaaagtgggtgcaggggttgtgggccggcacacttcccaatgctcaaactctcccaacaagtcccacatccattccaaacacctggggaggattacaaatggcccttcgggcctggactaatccaataccacttggtgttgacccaggctgtgccgttgtctgttggagtcgagatatgtgtcttattgaagaaaggagtattcattgcctcactttggttctagatctaacatgcacacaaccacttttttggtattcattctacaactattttttattgactaaaatccatttaaactaaaacttacatatataaacagcatactttttgtaaagaaaaaccattaccatttatttagacacatacacaaaaatagttagacatttcaacaaaatacaccgaaaatgtaaactaatttcttctctggattctacgatacgattttgacgagcactccgctttgatctttttaccaaataacgccattgttctccttttattatttcaactatttacaaacagcccaacccgaataaaccgcctaaacccaaactgaataaaccgattaaaaatacaacccgaaataatagaatgaaaatccaaaccgcccaataaatatattgaattaacccgaataaaccgatttatatatgttttaataaaagtgtatatactatattacataaattacatttatcagttaaact

SEQ ID NO: 407320 - DNA, 615 bp, Cannabis indica
atttagagtggtagccatctctacccttccatctcactttcagcccctcttgtctccattcctcccgtctccattcctcccatctacagcccttcttgccatgcagaacttcttcttaaccttcctatggcgcagtctaaggagaaagagacactctctgagtttcttcatctcttggtcaaatcatctccatctctttcaaacttctttttgctactattgatatagtttcaagctctgatttgtaagttattcttttcttcttcttctccttctccttcttcttcttcttttttcttctttcaaattacatcaatataaaaattttaatttaaaagttttataagaatattgttgtagtgtgattctttattgttgattctacccatttgcccacaaattttgtgaaattttttcttcttctgtaagttgagtttttttatttatatgtatataaggtcataccttccatgtgtttgacaaaatgcctaacatagttaatattttttattagcctaaagaaatagggcatcttcaattgtgctattttttttcatctttaagttaagtttcttcatgatattattattgtttttattttgttagaactgaatt

SEQ ID NO: 407321 - DNA, 714 bp, Cannabis indica
accttaaaacaaagttttcatgccactcgagggggactaaggcataccgcacggacagatgtaaaacaggaccaaaagtaaaaacaaagtcaaaaaagatatgcatcaatatgatcatatatatataaaatatacctgacccaaagggcaaggtccaaagaaaaaatatagcatcaaaaatgatcatatatataaaatatcctggcccaaagggcaaggtaaaaaaaaatatatataatacaaagggcccagggacaggccatattaatcgtctccccttagaaaataaagcagctatgtaattaaaattatctgaagaaaggaaaaatagctgtaaaagaaaaataaaaagagaatcataatgaaatgggctggactcagcggcctagtcaatacgaggaggaaggcgaggaccccgacgtgcttcaagcatagcatcaagcttcttcttcttttcccagaatttagcaagggcctcctcaggcttgggatagaagtcgacttgatgctttggctatttgactgccaggccatataaacgccatcattgaagcgcttgacgcagtgcttgcaggagacgggggtcaggagctcatctcttttagccttcttcaaggcctggtctctgaagtccttcagctccttcaactccacggctaagttggccttagactgcaagtccgcctggtggaactcttctagggacttcacctt

SEQ ID NO: 407322 - DNA, 718 bp, Cannabis indica
aaataattgaagtttaaaatatgggaaagtaaaaaaaaaccaataaataaatttgataaaacttctaataataattatcaccgaaaagtcgttggaaaagtttttactgtcggaaaagtcatcgtcataggaaaatttgccaagtcaccagaaaagtcactagagttgtcatcgtcgtcagaaaagtcactagagttgtcatcgtcgtcagaaaattcactggagttttcatcgtcgtcaaaaaagtcaccggagttagatgtctcagatctaaattaaaataaaactggttctacaaaataatgaataaaaataaataacacataataactcaaaccggttataattaaagtagatctagttctataacattatgaataaaaacaaataacacaaaataactcaaagcaattataattaaaatagaattggttctataacagtgttataatgaataaaaataaataacacgaaataactcaaaccgtttataattaaaataaaactggttctataacataataaataaaaacaagtaacacaaaataactcaaaccacttataattaaaataaaactaattttataacataatgaataaagtttataacacagaataactaaaaccaattataattaagatagaatcagttctataacataaaataaaagaaaataacacagagtaactcaaaatgattataattaaaaaaaaaaaa

SEQ ID NO: 407323 - DNA, 683 bp, Cannabis indica
acaataaaaaaaggtaaaaaatatatataaatttttttttttaaaacgtaaaaatataacttttttacaagaaaaatagcgtcttatataattattcttattttaaaagacttgaaaaatgaaaatataatattttactaaaacgtaattattattattagattagtttaagtaaggaaccatgatatgcagcgctaacaaatattcatagaacgtgtttatagttagtaaaatcttctttttttttgtttttttttttttttttttttctctttgagaatgtatagattttgctttttagaagtatgccattaatattttctttttaatttttttcaagaaaattattattgttaaaaaaatacaaaataaataaataaataaggtccatagtgcatccgattcgccccaagcagtattttttttttttttggatccaatctaatcctcacaatagttccaattcaatccaatccaatccgcaaaagtgcatatcggatcggttattttggattggttactttttaatattaaattatttaatatttatgaaaaatatatattttttttcacataactagcaacaaaataaaataaattatagttgtcttatatcttcaacaacacattaaaataaataaaatagtaaataataaaaggaagaaaaaaaattgtatgtataa

SEQ ID NO: 407324 - DNA, 746 bp, Cannabis indica
aattgtgcctcctaaatttttattcatgctagactgtttggaatagcttttaggaaaaactaaaacagctttttgaaaaagctgtgataaaaatgtatttggtaagcaatcaaaatacaactttttgaaatttttttggagaagctactgctaaaagctaaagctgctccaacccaactttgaaaaaagtgtttaaaaaactataataaatttttttatactaaaatcatatttacttatttattatataattaaaaaataaaaaaataaataaaaataaactaattataataatataaataattataaaatctcttattttttaaaaataatttatatttaattttaattttaattttaatctcttatttatgatgatataatatttaattttattggcatgtgcataatgcctaataaatatatatatctggatattattatatgggtatattattatattattataaatattattattattattattataattattaacgttattattattattattattattataattattattattattatcattattattattattattactattattattgttactgttgttatgcatatacgacgtatatacgcacgaaccgaacacctatttttgtggaatgggaatcactccacttcaattcaaaacgatattttgcttgggtttaaacacgataaaaattagatttgagttctatttttcgggcaccagaaacagagaacgaacg

SEQ ID NO: 407325 - DNA, 1112 bp, Cannabis indica
gcatccacgcatagaacttggaattgcactctcagtcatatagaacgctctatatgttccacgatatagatacgctataaattatccattgttataatcccaataatcaatgatcctctatagatgatctacattgcatagggataaaattaccgttacaccctttcaatgtattttatccttaaaacacttgccacctataaatgatattttagtgaaataatataatcactaaaatgagatctcaatcatttatctctatttagcaagctcgactactacaaaaagggctttttgcttcaaattttaagtgacatataaagtatttgcttcagttggtccaaccgacgttataaccatagacacaaatactgtttttttgcatcagctatgaaccgacgctaattgattttttgcttcggttatgaaccgaagcaaaaattcagtgcaccgacgctaatcgttttttttgcttcggttataaactgaagcaaaaatattttaaaaaaataaaaaaaaactgaaaccaaataaatacaatatcacatcaatcctttaatatacctaagaatttttattattagctataagaactcacaatggtttaaatatatcacttcacatttgcaatcaaaccaaaacagacataaaaggaacaccctctaacatatagctcaccatcttcgaattgtagaaactaacttggctaacatccatggatgctgttttcttcaaattagaccatggggtgtaaacaacctcaatattgttcactttgttacctgcaaagaaaactcaagtcagaacaaatatacatgatatacatattggtgtgtcctatcttctaacattatcaatagctaaatagtaaattcatatgaagacaatgtagtattctatctcaatgcctctaataaaagttcttctaaactcaatgtcacaagtatgagtgtcaaggcattttgtagtagtgcttgaaggaaataatcgtttcacttctaaatacctatagaagctatagattccatatctataattagcactcacactcaattatactatcataagtagacttaactaacaaatcagagaacatgtataatactcttgag

SEQ ID NO: 407326 - DNA, 359 bp, Cannabis indica
ctattatagctcacttaatatacatgtattttaaacacttttttattttttatctatattttacctttataaatattatacattaactattgagacatttctaatacaccatacactatattagttttaataacaacactcattaaagatatactactcaatattaggggtgttcacaaagtatccgatccaatccaatccaatccgcaaaatgcggatatccgcacttgtgcggattggattggattgaaaaatctaaaatccgcacttgtgcggattggatgttgtttgacctcaaaaagtaaccgatccaatccaatccgcacttaagtatatatatatttaaaaaattataatat

SEQ ID NO: 407327 - DNA, 727 bp, Cannabis indica
aaaaagttattgcatagtacaatattagagacaaagttcaagactacgagtcactatagtaaaatctaaattgtattcactaccttttttttaagtttttcttaataaaaaatgtcatattgtgcaattaaatttgcatgttatgtcaaaactttttcttttttcttgtctttccctagaatttaggtgatcaataatttatgaggcaatgaggcccaatccatcaaaacatcggatgatcagcttaatactgctaggagcaagagcaaacatgttagtgtttgcattgtagttccttaggtctttgcatactcttccgttctcaaaccaacatgccaaaaattagaaggctctcaaagcgagaccacccaaacatgacaccgctggctgatcttatagccgactcaagtgactgaaaacatacaaaatagcatcagtaactatagccaaaatgcttaggggctttaatcatctatcatatctgtgtcctcggccattataatctccatgtccctcatatctctcttcaaaacattgccaagtctagcaatcgcttcagtctgttgttgtaagacctgtaccacaaacataatacatcattatattatcaaacattataaatcacagaccagaaggacaatacatttcgactggcattattatatagggtaaataccattttggaccctctcttttacaaaagttaccaattggacctgtgttttgt

SEQ ID NO: 407328 - DNA, 686 bp, Cannabis indica
taaagtttaattataatccgatgtaaaagtgctatgacaaaactgtttatattttttgtatttgttcgtattaggaattgtcttcaagttgattgtattaaaaaaaaagttgtcaaaaattaaacttagggacttatttttaccattttaaaaaatacagagtctattttgtcatttaacaaaatacagggtccaatctataacttttgcaaaacacaaggtccaaagtggtatttacccataacatattaatataggatattcacaaaaatgtggtaaatgtaaacttagttcttataaatatttggtaaaaaaaataatgccatcaaaatatagatttttcagtttttttttcattcttctttatggtaaccagttactagtatcaaattagtttttcaaaaattgatggggtattcgcggtgtaggtggtgcaggttataacctgtttttcaaatcaaaatgtatatgtgagatcttaaaactgcaaaaactatactataaaaatataatgtggtgcagtgcgatacggtttaagcggtttacactactatcatcacgatcaaatattataataaaaatttaaaaagcaatctaataaagttttaacaatacaaaaaaaaaattactaaatcttaacattataacatgcatattaatgaactgtctctaaaaaataatgtaat

SEQ ID NO: 407329 - DNA, 628 bp, Cannabis indica
gttaggggcatagagattttagaaaatccctcgacgaaatgtcgataataccctgctaaaccgagaaaacttcgaacctccgtcacagacttgggcctcggccaattcttcactgattctatcttgtttggatcaaccataattccattctttccaacaatatgacccagaaaggacacctcagacaaccagaattcgcactttttgaacttggcatacaacttgtgatccctaagtcgctgtaataccattcgaagatgatgctcgtgctcctcttctgactgagagtatacaagaatgtcatcgataaacactataacgcagttatcgaggaaatccttgaataccctattcatgagatccataaaggccgcaggagcattagtcaatccgaatgacattaccagaaactcatagtgcccatatctggttctaaaagcagtcttcggtatgtcctcctcccgaattctgagttgatgataaccagaccgtaaatcaatcttcgaaaacactgtctttccctgaagctgatcgaacagatcatcgatcctaggcaacgggtacttgttcttaatcgtcagctgttggaattatattttaccaagaacttagatctactcacaagtat

SEQ ID NO: 407330 - DNA, 636 bp, Cannabis indica
tcattctcaaaatgatataccaaacacatagagtaaagtgaaatgaactttatttatttatagcttcacaagcattatttaaatatgtcaatacatagacaatcatctcacaaaacaatataagcatgactatgccataatcacttcctcatcatctatggtattaatctcatttttcattggatccttacgatgcctacaatctcttgcgtagtgcccagattttccacacacaaaacaatggcctctcacttctttgaattggctattgtcttttcttggacccagatattttccaccacttttattattgttgttgcctttatgatgcttgtttgagaccacattggccttagaaacctcatctttagattctttcacacttcccttatctctcaatctcgattcctcttcgattcggatatgtttttggatctcttccaatgaataatccttatttttatggaggattcttttcctatagcccttccaagttggtggcaactttgccacaatggtaccaacttggaatgcctcgggaagctcaattttgagaacctttaacttgttcacaatgatttgtaactcatggatttgaggaagaagatctttagcatcactaaaagaaaattcaaa

SEQ ID NO: 407331 - DNA, 782 bp, Cannabis indica
tctatctggacatagaaataaaataatggtttccatcgagaatggcttaatagagataaatggaagaactcttatttcagtaattatattagtttactgaaatatcatttataggaagctaagtagttttaaggataaaatacattaaggggtgaaacgataaatttgtccctactcgatgtaaatcatctatagaggatttttgattattgggattagaatgatggttaaatttttcatagtgtatctatatcgtgaaacatatagagtgttctatataattgagagtgcaattccaaatctatagtagtgcaaggataaattaataagttaggaaatttatatctgcttattggaagctcagttatatatgcccatggtccccatactagttgagacaatactgcttgtaagactcagttaattgattttaattaatcaattataatatctaaaattagactatgtctcatttatgaattttcactaagctagggcttaattgtgaagaaaaaaggttttagggtttatttattagttaagagactttcttaagtctaattaataaatatattcaataataatttttatttgataattaattttaattattaagtaaatagttttgacattttaaggattgaaattggaaaatatagtatttgtgagaaaaaaggataaatagttgtataaaatggtaaaattctaatttagtggggcctactatgcggcctgccacttaaggtaatttttgcccaatttttatcatttttttaatgtca

SEQ ID NO: 407332 - DNA, 641 bp, Cannabis indica
aatctaaccagatattttgtcaactttcaaatttttgttattttatttaaattaaattataaaatcagataaataatatttatttatcattttattttattagatatttaattatattttttaaaataacataaattttagaaaaattagttcgcatttttgaatagatatttaggtttattaaaaacctaatttttcaaatttataggtttaattttaaattaattatttaatttaatttattattttcgaaaataataatttatttgtaatatcccgataagtctaatggtgaataattaggatttatattaatattatgtgttaatcaggtaataagtgggattatgatcttactaaactattttagtataacatttaaattttactataagtgagtaaataagcgtaatttataaattacggaaatttatatagcatgtgtgaatgtaatatgagctatatgtggaatataaatatttttaggttcagcgaccctaaagactcgataagtggatatataagcgtaattttttaattacggagatttatttgaaatacgtggacataatatgagttatttgtgaaataaaaatattttcaggttcgacgaccttggagacccaattagaggccaaaaa

SEQ ID NO: 407333 - DNA, 574 bp, Cannabis indica
ttttttttatggtaattcaattatatatgaagttttttgtttttatgaatcttaaatttagattctctttttaatgttttatatggttttttttttaagaaaatcatattttcagtttgattggttagataatgctatattttgtggcatttattttttatgtcatatttagcataaccttaataatttttcccatattattgaaaatagccttctaatattttctaccaaatttatattaaagtttaaaaaggcaaacatgatattatcttgtggtgaagtgagaagtccataattttattttaggctaattaggatttttttcccccgaactttgacatgtaccaaatcatgccccctgaacttttttggccattaaaaaattccccatgaactattgaaattgttagatttaaggacttttgactaatttcattcaattttattgtttcaatgattgtttatgtactaactaaaccatgccttacagactttgatatctaccaaatcatgctcctcaacctttaatatgtactaaatcatgccccctgaacttcaatccatgttagaattt

SEQ ID NO: 407334 - DNA, 656 bp, Cannabis indica
aatagtataacccttgtataatttttaaagtgattattattaattatcaataatttgtttaatttaaataataaaattgtaaaacttttttttttttttgagaaaataaaattgtaaaactttaaattccactattatgtaaaaatgcttttatacatgtaaatgacattatgtaaggtggtattaatatgattgtgccactttgacaagtctaaaggaacaagccagaaaaaaataaaaataaagacgtcacaataaacgacaaagaaaccactaaattatacggagccaataccgatgcactagccacgtggcagattatgactagctgacgtaatttcctatcaattttttattgtggcccacgtgtgacgcaaccgacgaagagagtgcggagcctactatagtactatttctgttttagtacttattattattaattattgtgtcttttgtttcttctattactattgtttttatctaccaaataaatgtggttactttttctcaaaataataataataataaatatggtatttttttttttctaattctaaaaaaataaataaaataaaataataataataaatgataagaatttttttatttttacatttcaaaatattttttttatatatatttttacgaaaatctac

SEQ ID NO: 407335 - DNA, 798 bp, Cannabis indica
agcagaggatgagagagaaagactgtatacacatagcttggagaaagaccggatacacatagaagagaaagattgtctgcacatagagagccttgatctctacatagaccctattctcctcatcatcagatcccatttcttgaagccgagatctctttcccagcctcaagaaatttctcaacactggagagaggctgacgcaaagatctcttggcacaggttagggtcttaggttggttggattctctaatagaaaccacgccaacttccttcccagatccacctgaaaccatgccaatcttcctctagaattcttcatcagcttgaggaggatctttgagatcgctcacaagatctataccttttgggatttgttgtgaggattggccatggaaggctacggggttcccctagtttggattggtcggaagctcctcaaccctagaatccatcgttttcagctccagttgaggcttgaagtctgtaggaacaaatggaaaatggttggtgcatctgggtattatgagtctggaagtataaacttctgaactcagaagagacattttggcaggaaggaagtaatccattctgaaaatggatttcactaaagaagccagaggtttatgaaagatgacaagcttgagccccctttttatacacgaagtttagtgacaagaaagccaaagattgagaaatctaatggttgggaattgtgcagaatatgaataggcaattcataatgatcttcgaaaccatacaaccgccacaatcaaaggaggcatcctttccaagaaagga

SEQ ID NO: 407336 - DNA, 1049 bp, Cannabis indica
gagttataacttttgattttcctatctcgtcagataggttttaattcaaaaattatagctgtttgatccattcttcgtcaaaaggtttgatcaagatgttataacgattcgaccgctctctcgtcaaaaatatttggtcagggagttataacatttcgaatccactttcgtcaaagaggtttaggcgagaacctttgaatttcaaaaaaatttgaaatggcgggtttgcatcataccatgtattttcaaatgaattccggttaatcatacataaatgccccttaggtaatttttaaagaataaaactttataattacttaatataaatgattctctttattcataactgaagtgtaaagtttacatcagtaatgcgagttacatcatttatttattggtagtagggtcacaaatgttctacgttccaatagtttattattagcgagtcgttgagtcgagccaatttataaattccaactccaactactacttcgatgacatatggaccctcccaattcgggttgaacactcttgcagatgcatctctcgtatttgcaaagactcgtcttagcaccaagtctccaacatttaatagtcttttcttgacttttttgttgaagtatcttgtaactcggtgttggtatgctgcgttggtgatttgcaactcagtttatttttcctcaagtagatccaaggacaattttaaaagctcctggttttcttcttgattataaaactctcttctgtgagtcaatatgttcacttcaacaggcagcattgcttccgagccaaatgctagcgagaaaggagtgtgtaccgtagcaatctactcagtagttatgtgggcccagagcacctgaggtagctcgtcaacccatttgcctttggaagcatctagcttcttcttgatagtatcctttagggttttattaacagcttccacttgtccatttgcttgaggtctagatactgacgagaagcttttgacaattttattcctctcgccgaattcagtgaacaagtcgcccatcaaattgggttctattatc

SEQ ID NO: 407337 - DNA, 735 bp, Cannabis indica
gttttcaaaattcttgttttttgtaactttgtattctgaaaactgttatcaaaaaacaaggccaaacaagccaaattattttcaaaaaataattttctgtttttaaaaacaaaaaacagtttcttaaaaataacgccaaattacagtacaccacatattgaaatttttaatttttttttacttttttactatagggcagaatttttttttttagatattgtgtattttttatactgtgtgttatgttaagttttgactgttgttccacggttgtttttttttatttttccactgttgttttaattgttctgtattcttgttttacagttgttatataaaaaaaagtatttttgtaaaaaaaaaaattgtgtgatagtaaattataaatttttacctaaaatataatatttttgtaaaaaactccaatttatgcgggctataaactctttgttggataatattgtagaaggcgcaaaaataatgggtaagttgaaaaatatctcttttttttattagctaacaaaaaatatcattattttaaattcaattgggggctgacattaattattatcattaagtaacacaggaacatatgctgaggggctaattttacttttgaatattatatattgggggttatttttttttcaagaatatattttgggggagaagaatatacatatatgtatattaaggtgatgttacatgtaacgcacgtataattaatttttttaa

SEQ ID NO: 407338 - DNA, 532 bp, Cannabis indica
ttctatgcctctctctacattatcagttttatttttttttaattttctttatatgggaaaattgttttccacttctgtattttttttttttaaaaaaaattacttcacatagtattgattttgtatctacaattaagtgttattatatattatttatttgtatgtgttattatatattatttatttgtgtttataatatacatattagagtaggagctttgagactaatactctctttttatgtttgcttaaatctttataagtttgtgctatgcaaaatcaatagtggatatcaaagcgcaaaattaagaccatgtcgactataattaatgatattttatggagttgataaatttattgatgatattactataatttataatatactataataattgtagtatatttttctaaaaactataaatttactactttgataatgtttgtggatgaagcatgtgtataaaggtatattttgaaataattaatatgccatctctgctttaattttttcttagttttaaaatatata

SEQ ID NO: 407339 - DNA, 1608 bp, Cannabis indica
caatgtaggacaatgtccacaatatatttcttactgtattagtaagtagtataactgaacgaaaaaaactgttttgattgaactttcaaatgaagaacatattgttgcttgtgtggcttaaaacaaatcccaggtctcgtggtgttacgccatatatgctttcgtagttcaaactattcagttgaattttacaaactttagttatgtattgaaataatagatggagaaagatcagtgattcatttagatgcagtggttaggcttataatttgctctcatgggtatttctaaggatttgttagagttttgttagtctcgaaattacgtgtaattaaagatgaaattctggtttatagagcaactgcacttttattgcttctctaaatttattactttcaagttgatttaagcagtaagatcttctgtagcttcttaagacatttgaaatatttttcgcagcttgttcgagagcttagaaaaggtcgagcatttggtggatggtctgagggtgctttaagatttccaccaacttataaatacgagatcaattctaacaagtacattggtgatgaaccgaaagctgggagacgaactccagcatggtatattatctgcttttattgtgctctttttcgaattcaattttaagtgatctttctgccaataatgaatcaggtttttacttcggtttttgtttttccttccctgtttttcgaaagactaaagtgcatatactttgccattaataatttgggaagtgatcaaattaagtttgaaccttcttctatcaggtgtgatcgcattctttcttatggtaaaggattgaggcaattgagctatagacgggcagaacttaaactttctgatcatcgccctgtgacagcgacgtacttggttgaagttgaggtgttttcttctcgaaagctacaacgtgccctcacatttactaatgcagagattgagaatgatgatattgtaacagacatggatactaaagttggaatgagcagtttacatttgatacaggtgagtagttttgttacattagaagttccaaaatataggcttgtattgtgcatgttagagtttgtcttcacattccacttctatacatactctactatttttgctcttgcctgcctatgaggatacaccgaaaaatagtttatatgtcccattttcgcttgtagcgaataagacgagctcgagcttctcctatcaacctcgacacttcttcgtatgttttcccttgatccatgtcaagcctcctcaccgaacaacaggcgtacatgtaggtaaaaggatttcctttttggcttatttcgagtaagctaatgaacacagttgaaaaagcaaagaaatggaaacctacattgcttatgttgtgtccaaaatcctaagcacagttattcctttctttcaaccataggtttaggcaatttcgaagcttgcataccataactcaaagagaagtgctaccgtcaacctcctgttacaacctctacgcctgaaaacacatgtcggaatttttttttcaaatttttttttcacgggagtgttcgttatgcttacaacattattcttgaaaatttttgaaaaatttcgaat

SEQ ID NO: 407340 - DNA, 568 bp, Cannabis indica
ttcttttttcctgtttttttttttcttttggaatcttgcatcatgtagtcataaatactattagaaaattctacaatgcaccacattaaaatagatatatagatgcaatcctatctgttttagcatccgaaataattttttagtcaaattttttcttatggttatatacgttatagttatttaagacaacctgcaaaattttaaaaaatttggaaaagtttaacacgccgaaaactatgttcaaacaatgtattgcacgggtgactattttattttatatgcgtgtaaaatcaactgtttgaacattgttttctatattgtaaattattccaaatttctctaaattttgtagaatatcttaaatagatataacgtacatgaatatatataaaaaaaattagactcaaatttttttttgaatgtcgaaataagttaagggtgcatcattgtagaatcacccaatactatgttggactttatgttttgtaaaagtgattaattggatcttctattttattaaatgacaaaataaaccttgtattttctaaaatagtaaaaataggaccct

SEQ ID NO: 407341 - DNA, 629 bp, Cannabis indica
ttgttgtttttcagttgctcaactatttcctctaccacaagttttcatagtccatgaagtcgaatttttttccccatcttccagcattgtcccttgcattgtatgttattgagttgttgagtcttctgttgttgctgcattgtattccattgattctattgcatttgtctgtgcaactaatgtgttactattttccaagaacgatggattgatggttgttgttgatgacgttcacacacaatggatatgttgtgaagtcaggttcctttagtttttacatggttttgcagttaaaaattctacatagtccatgagtcattcttattcagatttctgattgtattttttttagggcctcctttttataagttttttcgtcccttttttgagcttatctgccactatttataattacatagcggacagttaataacaaagttgaccgaaataattttacagcaatcatccctaaaatcgtaggatttgattacatattatgtagtgtaaatgcagtttatgatttgaaaatcgtataattgtgatttttccacttttactgggtcaaaaatatcatgtattaaacacgtctttgattgttgtgtctctatagaaacttgattatagtgatc

SEQ ID NO: 407342 - DNA, 566 bp, Cannabis indica
ctgctcttcctcagcctcatgttcaggatctgaagattcctgagcatactgttttgcccttgcacctcctttcaacttagcttcccgcttaagttgaattagctcattctccggatgagcttgttcaggccagccagcatcagacttcctcttcttccccgccacggacttaggagaaaagtcctcagggtaaagcccatacttcaccagattatcatcggaggtcaactggatgatattcctctctccctccggaaaccgagcaagtttttgagctctatctctaagagcaagagtgaggggaggacggtgatatgctggaatctattgaaaccgagtctgggtgatgcttggatccttcaccatgatgtactcatcaacaaaatgccttattttgctgatggccttgtcatccgtgtcgctcaacaacttgaagcctggctgagagaagtagaggtaccccgaccttccttgcttgggggtagacttcaggtcgaagaaccaggagacctcgtgggggaaggagcatcccatccttgggaagcgtaaaggacgaagagagcgga

SEQ ID NO: 407343 - DNA, 1006 bp, Cannabis indica
atggaggcttgaagcagggacgttacaaatggtatcagagccttgaccaagccggaagtgtggttgatggggatgtcagaccccgtaacggagggtgattgtaatagtcagtagtcacgtgatccataaggagaaatacggggtaagctgtacaatctcacattgcatggggaaagtcaagtgggatgattctgagactgtataggtatgggactacacagttaaagagggcttaaatggatcgatggggactacctatattaacaaggtgcatcttgtttttcggtagcccatcacgaaagaactccacggttaagtgtgcttgacctgggttaattgcaagatgggtgacctcctgggaagtttttccaggaagcgtgcgagtgaggacaaagcacgttgaaaatactcgtgttgccctgtagggccagtcgttagtccatgaagcagcaagaatgacgtactcgagtataagagccatcatttcatgggtgtaagagtccaatagaggcttgaagcgaggacgttacatcagtaggggagaccctttgaagaccgtgaagccaagtcgtgaactccgcaagggtgattcatttcattgtatttgtttattttagtcagtgaggtttctctagaatgcttttgaatgctgagatgaatggtagctttttggggttcaaagtgaattggcagtgccttcctatttcacatattatgttcgctgacgacactatgatttttttgtggagttaatgagggtaatgcagttacagtgaagactatcttggatacatatcatttgtggtcgggtcaaattattaacaagtgaaagactaagggtactctttatgtcttgcaagatgatgtcattgctatcctgggctatggtgagttgattggtaggggtaaattcctcgaaaatcattttttcctatcaaatagtaaggtggttaatttttgttttgttgtggacaaggttaaacaacgaattcaaagcttgagttgc

SEQ ID NO: 407344 - DNA, 791 bp, Cannabis indica
accggcgcatttcatctacgcgctggtaaaaattcctttaccgaccaagattcccagacatgttttgccggcgtagtattgcgccgacaaagttttaccagcgcctttagtgtacttttgccagtgcaaaaatgcgccggcaaaagtaggttttcttgtagtgagtggacttggccaggaaggacgctgatgaagcgagggttcaactcggagccgtccaaatggaactgggtgaagtcaacaaaaagcttcctgctactgagaagaaagtggccgagctggccaaggatttggacgcttctgaacaacttgaggctaccatgacctccttgtccaaataagtgaccgacctccaggaagaaagggaggttcttcgagctgttttccacaggttggaagcagaaaagaagtcaaaggaggaggagcttaacgatgaggaagagaggggcttaacagccggtctcgagattttttatgacttttggaaggctaaccctcaggcgaatttcaattacttgggtgaggccaaagacatgtatcttgaatactatgcttcccaagtggcctatggagagtttgaggcaaccacttctacctccggtctgaacgttgacatgccccctgcccagacaatagatcctccagctcttaccggcccaaaagacccgtaaaagaaccctagaactccaaccgtctgaacacttatctttttatctttcttttttttttatttctccggccataaggccttttttaagacatcgcgatcggccaagcggtctttaaacttg

SEQ ID NO: 407345 - DNA, 519 bp, Cannabis indica
cgatactaaagtcagaatagagtcttgggattgtttgactacagtcaaatgcaggattttttcttggaaattttgcaagttgttgcttacttgccctctattaggaggaacttgatttctgtatctattttggataaactaggttatagtcttcttttggaattggaaatctgattttgtatcgtgactctatgagggttggtaatggaagttcatgtggaactttagatataagcttgatttatatgatgttgtttctgctacttctccctcttgcctttcttcttcttcttctcttaatattgttgttggttccaaacgtgcaagattagaattgaaatcttccatgctttggcataaacgtttgggccatatttctaaagatagaatggagagattggtgaaagatggtgtacttcaagatctcgatttctctgaattcactgcctgtgttgattgtataaaagggaaagttaactgataaggttagaaagagtaagtcagataagtgcacagatg

SEQ ID NO: 407346 - DNA, 550 bp, Cannabis indica
gggggttgagcttcatattgtaattacggaggatcttgtagcattcatctagatcctccacatgcccgcagcctttttggacttgactagcatgtcatccacatacacctccatattacgaccaataagatctttagacattttgttcacaagcctctgataggtagcccctgcatttttcagccataagggcatgactttgtagcagtataggcctaggtctagcatgaagcttgtgtgctcttgatctggtgggtgcatcttgatttggttgtaacctaagtatgcatccatgaagcttaggatctcatggccaattgtagcatctaccaactggtcaatccttggaagcagaaagtagtcctttggacatgttttattcaggttggtgaaatctatgcacaccttccactttttgtttggtttgggcaccaacacggggttagatacctaaagtggataaaatgcttcggtgataaagttaggggccctcatccttttgacttcatctcttagggcttgggtgcgctctttatccagcaacctcctt

SEQ ID NO: 407347 - DNA, 752 bp, Cannabis indica
tctagctaactattgtgatccaatttttaatctgaagatatttatattgtataccattttataaaatatataggattaagttgtggttcagtagtggtcataggcatagaggaattcaagtttgaatccttctctctcaatgtcaggaaaattaaatttatcatttcacactataaaagggcatccacttttattagaatttaaaagtgcatattaatcatatgacatcaaaagaaaatctataaggtccaaaagaaaaaataataataaaagcatcacattatttttagccaagtaaaacaaatataatgtaaatgaattaataaattttttagtcttttcttccaatgatctgaaaggtaattaaaatagaattacaatgacataatattaaaaaatctcatattgctaatacgtagaaagataatagaataaataagatgaatgagttactcttccattaccaattaattttgagatggaacctcattcaccttaatcacaaattcaaacacttaatagtactacaaacacaatatacattactacttactgatttaagatgaatgaattgaccctctactgcaatatacatgaaaaaattaattattaataaatttcgtatatatattttacaattgcaacacaactaaaacttgtaacatgaaattcaaaaataaataaataaaactcatccagcaccctcaaaacataacatgaaacttatctcagaattaattttgatctttgac

SEQ ID NO: 407348 - DNA, 642 bp, Cannabis indica
caaaaacataataaattggttagaagcaacaattcaattaaaggttcagaaaaaaaaaaaggagtaaactataactttatatccaaaaaaaaggtaaactaaagaattgtggtaattacctttgtttaagtttgtagtcagcaaaacaattctgcgaaaaatgaatgaataaaaaacaaatactttttaatagagtaatatctatagttctatacaattttcacacacaaattttgtatcagagtttctaatcactcatgaaaagcagagcactccagattcaaatcaatatttaaggccaaagttgcagcattgaaactgaacaccagcaatcataagaaaattactcataatagtacaatactacaagaaaaagataaccaataaaggaagaaatgaaaacataaaagcttaagagagtacctctgaatcttatagtaagaggcttcttgaaaaacaatagtaatagaataggctccatgaaataagaatggaatgactaactcctaggaatgtcagtcgggccggccggcccgccacaaacccggcccggcccgactccttcttttggcttagtgggccaagcccgacccgagataatcgggccgggttaggcccgaccggtttttttttttttttttt

SEQ ID NO: 407349 - DNA, 519 bp, Cannabis indica
cctataatctacccatcggacccaagccaattaacccatcaggccataatcggaccatcggaccgaacatcggtccgatcatcttccccaaatccattttcaccattttcaccattttcagtccattttcacggatccgataaccattatcacaacaaaattcttaaatctaaccaataatatttcataaacaatcccaaacaaaataaatctttaaaccctttcgaaaaaaaaacaaaaaaaaccacatacctttgacatggtcggcgttgagcgttcggccggggttcagagttggtcggggttgagcgttcggccggggttcagttcgacgaaggaatgctcgggctcggggtcggggttgagggttggttcgttgagtgatggttcggctggctgcgtttttgagagagggggttcggctgagagatgaagagagaggaagagagaggctgattcaaatgaggggggtagtttaggaaaattggaaaagtggtcatacataaccaattttaataa

SEQ ID NO: 407350 - DNA, 858 bp, Cannabis indica
gagaaaagggagacgatgagtttgtacccaaaattgagcaaatcggaagtcctccttggaaacattctgtaaggaagttggggaatgcaatagaataagttgattaaagaagtgccatggttcacctgaggaaattatttgcttatcacctacacaagccaaagttaaaagaaaaatatcagaatgcatctctgacactacaacttcaaaacgacatttattgctccagaactctcccacttttttttgataaaagtcttcgggttaacagtatttgagaggcatcgagcaacaataaaaaatttgggaggctgatttggatcttgaagatcggtttcagaaagggaatgaacattcctttctttctcagacaaacagaaagtggaagttcatatcttcttaagatggattccgatacaaatatcagagaaggagaaagagaaaagaaaacgaagatacaaatcatacagactattgtgatatttatatcgtaattcaggccacaacatggaggaaagtggatcgactggagatggggcactgggacggaaagagatggaatagtgggtagttaaccatagtcatggaagaagtggagaacaggggaggaggtcgaagacgagaacccagaaaaaccaggaagataaccgctaataactgcaacagagcaaaacctagtatgtaaaaaagtaacagaagttttccataggtgtaacatccaaaacttatctttaattggggcataggtgtcactaaccttagaaaatagttctgcaaaaaaagtaccttagaaaatagagcttttgtcataaatcccttttacatcatttccaattaatagtacaaattttgtgccaa

SEQ ID NO: 407351 - DNA, 606 bp, Cannabis indica
tcgtagggttgtggttgacccggaaaatccacaagaggtggatccagcactgcaaaacccgcgaaacacaagggtttcgccagctattaatcccagacaaccgtcaaccgcgggtcatggtgtgacgactcatttggatgaaattgcgcctggtgtgcaagagactgggaatactagtttagcagccaaccagggtattcataacacagctgttgcgcccgctaccaatgttcaaacgaccattggagatgacactgagatccaaaacctccatgctgctcttggactcatgtagggtcataccaacaccctacatcatgatcaggaggaactccgcactgcgataaatctcgcgttcaaagagccactactagaaaattaggttttagtgacagacattgagtaactctaaaagtgtacagtgacacttcaacacgcgtcactaatgaggctgactggaaaggcagtttttagtgacaatccacacgtgtcactgaaactttttgcattcattttctgcgcgtcactataggcatatagtgtcaggttttgtcagacagaaaaggtaacagccacacacatgaagtgtcactatatcctattttt

SEQ ID NO: 407352 - DNA, 905 bp, Cannabis indica
ttaattattttttttctgtagtataaatttatatatatttgataaaaatgatttttagtatcattaaattatatttttatgaattgtaaaaaaaattatagtttctaagaaacttaggttgatattgttgattaataatataaatataaatataaaatattatttaaacaaaataaaaaataaaaaatttcaatattatttattttaaatattttttctttcaaaaaaatatttttatttttgtaatatataataattaattaaataaatttttagaaaaaatattttttgttttttaactgcttatcaaagacttttttgtcacaacttttttgagaagtagcttttaacttttccaaaagctgtgccaaatccataagaagatccgaccactagacacgtggtttatctagaccaagaaccttcttagctaaagaatgagcaataagattcttggaccttttacaatgagataaagaaatactagtaaaagactttcaaacatgagcaatatcattaagtattgttgacctcgcttttagccaacgacaatgaatcttatttagtaagcgataagtgatttatagcaattgatatatagtaaagcaatgtaaagacacaagaattttatagaggttcagtcccgagcagttcggtaatagcctaatcctcgttatttgtattgactcaagaacaatgacaaaggttccttttcttatagctcttacaacaatatctctgaatatgaattcttagataatatctctagggtaaaatctctcgacctctttgtccagtgaacatgcatcactatttatagggctatgaacttggagaggaagtatttctcttctcgttacaatggatataagctgaaagattgcataataaatgcagaatacact

SEQ ID NO: 407353 - DNA, 471 bp, Cannabis indica
agaattttacttgacaaaatgaaaccatgtgatatgtttggccactaatagaagaatattcatctttggacaaggacatttaacttccctaactgctttacctaactgtcagttatgacagttaggatcgggtcctgaaacaaaggctataaatagccaactgctgaagcattcgagcagcaatgctttgggaaatatttgagagctagattagtgtatgataaagagagttttggtgagatgagttgttgtgtaattgaagctttgcttcatgagtgaatgtgtcaaagaacactttgtaaacaacttgtaatcttctcttctagcatcaataaagacaaagccattggggctgttctggccgaggagtaggcaagtgattcttaatcacttgttcgaacctcgtaaattcattgtgtttgatttctttcttttacttctattgcttttaattgattaactattcttgct

SEQ ID NO: 407354 - DNA, 670 bp, Cannabis indica
attggatggatccaatccaatccaaaaaaaaaccagttaaagcatctaatggatggaaccgatccaatccaatacattcattggatcggatcggatgactcaattcaattggattagatcagatggcaaaatctaatatccaataaataattggattggatcggatgggtccaaatccattggatgttatccaatgaacacccctaactaaaatatagtttttaaatacaagttgtcactaatttacttttaattaatcacaacaagtattgtgactaaaaacacatttagtcacatcaaattgtaatttttgtgactaatacctttaaccacggacattttagtcacaatatacaaatgataatttataattagtcacaactttttacttttaatttgtgactaaaagtaagatattttatagtgtgaaagaaaatgtcagaaaaaattgagccttgcacaaaaacgggcatttctttttgctatgagactcttttgttagaaaaaataataataaaccaagatcagtttgtatataacatagaacacaataataatatataataattagatatgcgtacctgattgatccatagccattaccacaatttaatattgcaatactatcaactaagtcttattccctagatctctaaatcagaagcagttt

SEQ ID NO: 407355 - DNA, 609 bp, Cannabis indica
cgtgtattagtactgaactaatcgcatattctgacactgctaaatatatggacaggactttgccggtcatgggctttgataagatcggaggttgtcccaaaagcatttttaaggcttgaaaagcctcctcccattttcggtccagtggaaatttttgttgccttttagaatctgaaaaaactccttgcacttatcaaaagatcgcgatataaagcgatttaaagcagcgactttacctgtgaggctttggacctcttttggcttggttggggatggcatttccaccaatgccctgatcttcgcgagattggcctctattcctcgctggttaaccatgaacccaaggaaattcccggagccaactccaaagacgcatttcagagggtttagccgcatcttatatcgtcgcaatatatcgagcattgcctgtaaatgggcaatatgatcctttgcatgttgagattttacgagcatatcgtcaacatatacctccatggtgtttccaatgagatctgcgaacatcatgtttaccaacctctagataagtcgcacctgcgtttatcaaaccaaaggcattacttgtaaaagtatagtcctcgatcagtaatg

SEQ ID NO: 407356 - DNA, 559 bp, Cannabis indica
taataaagaactattggaacgtgtagtatttacgaccctactacctgtaaactgatgttgtaacttctatttctgatgtaatattttgaacttcaggtattaataaagttgaatcatttttcaagtaattataaagtgtcatcctttaaaagtagttgaggggcatatgtgtatgataaaccggaatctatctagaagtacgtgatatattgcaaacccactactttagaattttttaaaaaattttaaaattttttaatgtttttgattaaagaacctttcccacgagaaaggaaaatcaaaagtaacagttgtaaatgaaaaataactcataagaacaacattaagctacatgcaaagctgaacactaacgactcgcattttataggaaagtgttacacgagacaccaagatgctttgaaaaactacttaaacctaatatatgaatagaaggcctaactattcatatgaggaatcaaaaatatacaaagtgatgaatcattaaaagtgtatttaagtttgcttaaaatagattacaactgtttatgcgaagcagaat

SEQ ID NO: 407357 - DNA, 574 bp, Cannabis indica
attattatatgttttttaaaataagccaaaaacgttaaggttgcatattgtattattattactataatttgagttttatggagttatttttgtattttttatagaattaaaaaaaagtgagagaattaaggagaaaagagaaaaataatttttaaataattttatatgaattaaaaattaaaaaaattaaaaaattaaagagagaaaagaaaattaactttaaagcaattttagagcatcatgtcaccgttttatgtctctgctttatatatattgattgttatttatgtatgtatatataaacaaaatttaccattaattatatttgatttaagttttaatatttttttttggtatttaatttttattttctaacttttataaaatattttatatttttatagaaaattaaaataataataaaatatcaatttgtagagttatactttttttatagaaaaattattaaaaaaatagtaaaatattaatttgtaaatttatgctttaataaaatattaaaattgagagaattaaggagagaagagaaaaatagttttggagtgattttagaatg

SEQ ID NO: 407358 - DNA, 687 bp, Cannabis indica
tgtgtgtagtttaagcagggccgattctaaggtatatggacctaaggcgaaattaaattttagaggccctatatatatagtttaactattatgaaaataatagttctagtgcttagtgtaatggtaaaaattttagaaactctctctatggttcaatccttcataactacacattaaatatttttttaaaacattaaaaagtagagatgggaaattgatcccatgatcttttaatttaaataagaccttttactactacaccaattaattttgttatatttctttttatttaatattttatctatatattaatattttttttctacaatttcggagccctaaatgttcgggacccgaggcacacgcctaacccgtctaccctcagagccggccctgaatttaagtgtttcccaattattttcagttatattattataatagttcaactcaaccaagtggatatagaatacaaattttaattaatcaccttgcaataatatttttatatgagggagaggagaaccagaatgtttctcttagggagctgctatttaaatatatatatttatatatatatatactagatgatcgttacgtgccaaactacgtactattaattttatttaatattttaattttttattttaattaataattaaaatagtataattatttgaacgatttgtt

SEQ ID NO: 407359 - DNA, 515 bp, Cannabis indica
agaaaagttttctagagttaaaaaagcgcttgattgccgctctagtgttaactcttccttcagataaagaaaagttcgtggtttattgtgatgcctcgagacaaggtctcaactgtgttcttatgcaagctagaaaggtaatagcctatgcttcttagcagttaaaggagtacgagcagaggtaccctactcacgatctagaactcacagctgtggtatttgccctaaagatttggcggcattacctatatggaaagaaatgtgtgatatagactgatcataaaagtttgaaatacttcttcatccagagagacctgaatatgagacagagacgctggctagagttggtgaaggattatgattgtgagatcctttatcaccgtggtaaagccaacgtggttgtcgatgccttaagtagaaaggggcagagtcagatgaatactgtgaagccaatctcccaacagttagcaaatgagatgacccgagctaaaattgagttggttgtagggtagtta

SEQ ID NO: 407360 - DNA, 536 bp, Cannabis indica
atgtgtcaggttgaattattttctttcaaatttcaaaatatcataactaattcaataaaaatccaaattaagcactgtaaaagtctaaatttattattttttttatctaatttccaaaaaaatagttttagaacaaaactaaaaatatttttttaaaaaaatcataatttacatacattcatcaaataagcacatcaaccaacatgaacacatccagagcatcacaatcattgttttaaatctatatttcatgaaagtaaatcattactatggctctaaggccagttgttgggattattttaccaagatttagatttactaccatgtatggtttttaacatcctaaaaatgagttatctaaaacaatggaatttaaatacacataaagttaagaaaccttacattgactgcagcagaataatatgactccttccactcagatctctaaccctttttcctttcttttgcagagtattatcaagatctgacccgattctccttcaggtgttagattcttcacagtcttacacactatg

SEQ ID NO: 407361 - DNA, 516 bp, Cannabis indica
caattccaagtaggtttgattttcgaccttcagattcatcatcaataggtgcgagtttatgcaactaccatggtgcattttcacactatagagttcatttgcaaaggcattgacaaggagtgggtcgggtgtgggttattcatattggtactacaaatatcaataaacaaaagtaagcttttggttcaataaattcatacacaagttcagaaaataacaagtaattacatatgtttataaaaataccagaattttaacatattttattttctaaggttttcaacaaactgatacggtgtcccgtttaggcgagagtcaaagcataatccattgaatagagttgtcaatttatctaaaatgataagcattctagtaaccttttattcgatcgaaaagagaatccgacgttgtcccgtttaggcgagagtcaaggtcattcctatttcatgagtccccaccattgtgtcatacttttgaaagtcttactaatagtcgccaccattagggtgatttata

SEQ ID NO: 407362 - DNA, 725 bp, Cannabis indica
gacctagactcataagggccaaatagttaagacatcttatttgaggcctcatgacaatttaatctaatctgcacgatccaatccaatccgcaaagtgcgaattgaattggatgttgattgactgtaaaataaccaatccaatccacaatattatatattttaaaaatatatatacaattaatattttaatataaaaatagtaatttaaaattctaatatacatatgatataaatatattttcaaaatcaaatgtatattccattataatttataaggaaaatataattttttaaaaataacatctttatacatactattttttttcttgctttgaatttgttatttttattttatttatttaatgcgttaattgcggcaaaacctcaaatactttcactttgcttgcatttaactcccaaaacccaactgttagcaatttacagtttctatccatttgaagtattaaatacatactaaagaatctcatctaatgataatgtgttatgtatatagtttatcacaagaatgtatgtatgtagggtgttcataaaatagccgatctaatccaatccgcacgatttaatccaatctaatccgcaaaatgcagatatccgcactttgcggattggattggattggaaaatccaaaatccgcacttgtgcagattggatgttaattaacatgtaaaagtaatcgatcaaatccaattcacacatatttata

SEQ ID NO: 407363 - DNA, 542 bp, Cannabis indica
gttaaaaggtgttatttggtgaatattgtggcctgtgtatctgaatatttttatggtggaggagaatcgaatttgtgttgctattctgtgattatactggtgataattgggctgtggaaagaaaaatttgtggctgaattctattaaacagaggacaaaatgccgaaaattaagaggtgtgctcataagcctcctgaaagagatgctcgagaggctaaaaaatttgtctcacaagctgctgaaaagaaataccttgattcagttcgccacaaagaattctatgtagagcgaggaatgataataggagatgaggactttggcagcatgccgccatggctgatagagaacattaagaagaggaattggctgcaattgtgcgaagatccggcatctgcagtttgtcaagtagtaaaggaattctacgcgaattttctggcgcatgaattgccagctgagattacagtgcgagaagttaaagtgaaattttctgacaaagacatcaatcattactacttgcttaaaaatgtgacttgtgagttctc

SEQ ID NO: 407364 - DNA, 516 bp, Cannabis indica
aagcgacgtccccttgactcagtaaaggtcgaagcctgaggtgaacaaactgctaacgagtggcatgattcgagatgtctactacccggaatggctagctaatccggtcttggtgccgaagcctaacggaagctagcgggtttgtatagacttcactgatctaaacaaagcttgcccaaaggattgtttccctttgcctaggatcgactagatggtggatgccacatccggattcaaactactgtccttcatggacgcatatgccagttacaaccaaattaaaatgcacgcggcggatcaagagtgcactagcttcaggaccgataagagggtatactgctacctagtcatgcctttcagactaaaaaacgctggcgcaacttatcaaagaatggtgagccgaatgttcaagggcctcctggagcgaaatatggaggtatacgtggacgacatgccagtcaaatcaaaagcatacactagccatgcagacgacttagaagaatgctttgaagtggt

SEQ ID NO: 407365 - DNA, 552 bp, Cannabis indica
aggcgtaatcatcatcatcatcatcttacatcccctttttaataaaattttgagagcatttatcattattaagttgcatgctaagtaacgatctcctctctttgtctcgtgtcttgagtgtcatttattttcttttgtgtgagttgtgttttgagtcaattttctttgttgtctgtcttttattcctctttgagtcatcactcgaggacgagtaatgttttaagtttgggggtgtgataactcttgaataaagagttatttgtcatgttcttttagcttaatttatgtgtgtatttaacttatatttagttcttttcctctcattttgtgagaatatatgttaatttgtgtttttatgttcttttgggtaattggagttgttagggggaattataaagttttatttgggtcttggtaaagaaaatggcttaatagagaaagtgcaaggttttgctgaagttttgcaggaactttgctgcagcaaaagtagcagggctaattgttgaaactaatgtacaaaaagaaaaaagatgtggcaattcattaattgag

SEQ ID NO: 407366 - DNA, 725 bp, Cannabis indica
ttgagttcaaagttcaatcgcaaatttttcatggtttgttgttgcgggaggtttagcagcctaatgatgttggattgtgggttataattcgtggtgttaggattaggtttaacattgaggagtttacattgataactggtttagattgtgaaggtgattgtagtgtgttggattttaagcaagatgttaatagtctttgtttcaaatattggccaacttcatcctctatcactaaagaatctattagggaatgttttaccacaaagaggtgaggtgattctgatgaggatgttgttaaattgacagttctttattttgtagaatggtttttgcttagtggtactaagcataaaaatgttcatcggtccattttaaatgttgtagacagtgggaggtacgatgaatttgcttggggacggagttcttttgaatttactatttcgtcgttgaagggtaagcttgatagttgggatgaaagtgttagaaaggcgaagagttcaggaaagaggctgagtattttttacactttgattggttgtcctcatgtatttcaagtttggttttatgagtgttgtaagtacatgaagcgtaagtattgccaaaaaaaatattctcgtattccaaagattattcaatggacttgtaccagccagctgactttcaaaattttgatgactactatttttgatgtctccaaagacaagatatttctgtttgttgttttt

SEQ ID NO: 407367 - DNA, 949 bp, Cannabis indica
atttatttctatttcatagtaaatttaattaattaagaaaatatatttaagttagtaaaatttaatttttttaattaattttagaccaacttaaattagatttatttttcttaaatactaaattagaattaataattaagttgaattcattctaaattatttttatttaatgaatttaattaaattagaaaattatatttaagctggaaaatttttcaattttagatcaaattaaattagaataaattttataatatattttgttttattttaagaatcatttcccacataatttcgaattgcatttatttatttaaatgtagatattttgtaaatttttaaattttgaaaattagatgaaagttaataattaatttattaattaattttagatcaacttaaatcaagtaatttttattgatgatttatttaaaataaatagactaaaatatattgttttaattagaaaattagtaattagtttatgaattatcaagatagatattttctaggtagactttttggtatttttctagatatatttaattaggctaattatgatttttgtcccctgaactttgacatgtaccaaatcatgccccctgaacttttaaggtcattaaaaatacccactgaactattgagattgttggattaaaagatttttgtctaatttcattcaattttactatttcagtgattgtttaagtactaaacaatattccccgaactttgatatatatatcaaatcatgcccctcgaatacatgtcaaagttcagggggtaaaaattcctaattagccatttaattaaataagaaaattaaacatttaagttgattatgttctgaacacttaaatattttgatatttttcttaagagatttaattaaataggaaattatatttatgttaaaagttaattttatttaattttggaccaacataaa

SEQ ID NO: 407368 - DNA, 741 bp, Cannabis indica
ttaatggtgaattttaattttgaacatgctttgttgttttgttgcctgggttatgtttattggggtaaaatatgcatgtctagaaggtttggtaaggttttcgaattttttggggttttctgatgtaaactggttaattggttttacagggctgtaaaaccagttaaccggatcagctgctgggttccccaaattttttgtgttgtcgattcgtgttaattttagagctttgattggttaattccctattagtttagggtattgccatgttaactttcagtagatagattttttgtttaaaacctaagtccctggttgtgatttgacgtgtcacttatccatgttatgaacgatgtgatttaggggcctgtaattcgccgagcaattattccacttaggttggccgacacacctaaattcgaaaacaatgtaagattagtataatgttatgcatatgtatatacatgtttaatgtacatattgtttatgcctgttagagtacattgatagtagtgtcagtatacatagagttgtactagatactaataaatgtatgtttggctagaataccgatcgatgctatcacatcaatatggttagagtatgattagcatattgagtataggctggtattatggtcgatagtattgtcgtatgaacgttctagactctgtaccgtgtgggacatgtggatagggttatggttaggtgtatgggcgctataacgccccgatttcccga

SEQ ID NO: 407369 - DNA, 601 bp, Cannabis indica
ttgaatatgtaaataaaacatatataacgatgtgtaacgcagaattaacataaacatatcgaaatgtatatgcaataaaataatcgaaataccttcagtcatttaatagtttgagcttcaatccctgcgataacttcagaattggagttcgagcttcctcaatctctaaactttctttagatggaattttactgttatgaacagaatgagtaaagaactcgagtaccgaaaacttatatttacaggcgagataatccatcaagtatctgtgtcacattgattgtcagaatattttgacaattatgtgtttgtaaagccacagtgtaattagatttgtgtgtaattggaggtaattacacaatttgacatgtttgtctgaccatataattacactgtaactatgtaattggaagtaattaagtggttccaattacactctccaattctcatagcctcccatgagaattgaatgtaattacactgtggaattactaaaaactttccatattaaacattagctattaaaaaataattttttctcatgtaattagtaactattttgccaaacaagatattagaaattcatatgtaattaccacct

SEQ ID NO: 407370 - DNA, 674 bp, Cannabis indica
acaattgagaaagcactatacatttttttgtataaagaaaaaaactttgcaaagcaaccacaaaaagcattagtacacacaattttgtctgtctttaaaaaatggggccaaactaaaggcttttggaattgctttatgggacaacaatggagaggtctatatcattatcatacacaaaattatattaccaattgcacttaaattaaacgcatttttccaatttatgtttttgtaagttacctatactctgttccttctcaaagaaagaaaatatttgagtagagcctacgttcaattgagatctaaatatgtttgaaaatataatgtgaagtgaagtgaacactattggtatttgtgtgttgaacatgggtccttgtcgtacttaggccgtattaaggataagcttttgaattttcaaaagagaagaagaaaaatcaactttaacatatatggaatttgttttttttttttgttgttgaaagtaaacatagaattttattaatttgttaaatgagtcaaaagagaagactatgagtaactatgttagcaaatcgtttaaaaaaaataaaaaaacattgtttgaagatgcaaaaagtttacaacaatcatctataataaccccaaaagaaaaaagcataagtaataaatttggaatagcttagattgctaccaaa

SEQ ID NO: 407371 - DNA, 717 bp, Cannabis indica
tatatggattaaaatagaataaatattgtgcaaaaataacttagtggttgtacagttaaagggaccattctctagttacaattttgtcactttatttcaaccacttattcttctttcaataataccatgttttccaattcaatcttataaatgccaaaactatttgtttaataatataattagttatcaaataaaatcgtcatttatataggtggcgtttggtaacacttttttaatcagttttctgtttttaaaagtagaaaagcgaaaatatttttcaaaaacatgttctataaaactgtttttacttttcatttttataattaaaaataaaaattttaaaaacaaaaaaaatcactttcaatatttttttaaacagatttttttcttaatcaatattttggattattaccagacccggacccaaatcccctccctacggccctggcgctaaacccgacttttgacttgaacccaaatccgactccgaacctagacccgacttaaataaaaccaaaaaataaaaataaaataaactttacagaacacacttctgtttttaaaattgaaaaacaagtggttaaagaactcatttttgtttttcaaaaataatttttttaaaaacaaaaattttactgttattttgtgattaaaaaattaaaaaacaaaagtgttaccaaacggcaccataatatattaattagagcatacaaagtc

SEQ ID NO: 407372 - DNA, 1312 bp, Cannabis indica
ataagctgaatggatctaacttcccaaaatggaaagagaacattaacattgctctcataggtgaaagtgccttgtttgtgttaactgaaccgtctcctgaacagccgggtgacaatgcaaccaaagctgttaaagagaagtacgagcgttggcagaatgctaacaacaaagctcgatacttcatgctttccagcatggttgacaccttgaaaacaaggtttgcaaacactgtcacggctgcagaaatcatgacgaagttaactgagctattcggaatggcatcaattcagtctcgctttgatgcgacaaagaaatttatcaatgcacggatggaaccccatcagaatgtgcgtgatcaccttctccagatggcaagttatttccaagaagcccagaatcatggagctgaaatggatcagacaactcaagtgagtcttatcttgaatagtctgactccagcttttctgccctatacatcaaattatgtcatgaataagaaggaacaagactttcacacgttagtcaatgaccttcagacatatgaaaatttgattggaggacccaagaagaaagggagtaaacctcataattctggaaatggtaatgggacgattaaagctgaggcaaacattgcctctacttccagacctaagacaaagaagaagtggaaaaatagcaagaagcctgttcaagctgtgaaaacagttaaaaagaaaaaggctgctactcctggtgatacactaaaaggaaagtgtttctactgcaatgaaaaaggccattggaaaccccaatgtcctaaacttcttgcaaagaaacaaggtatttcttttcctataaactgatgagttttagtgaattattatccatttggattattaattctggacctactaaccatgtttatttgttttttcttcttattacagcccaagctgcttgaactcggatgctatcttagcgagttgaatcggaaagttggacaaaggaatggagatcgtccaagataaagatgaagctcgttttttatttttttgaattaattgtttcagtttcagaacagtttggatttcaattattagtttggaattttattccctattttttttttcatattgttgcaaacaattcctttatttttagaagattttataataaagttttctattttggaaataaattgcaatttctgagttgagcttcatttactttatcctgtgtaaccaatacaaattatatttatatgtttgtatgtgtatgtgtttttttattattgatacaaattctatagtatcttaaactcttcaaagagtta

SEQ ID NO: 407373 - DNA, 967 bp, Cannabis indica
gtgttaattagaattgaagacagcgaattaaacgctaatcttgtggagttaccattggtcgagttcgatattatactcggaatggactttttgtccaaatattctgctagtattgattgtaaacggaaaatggtaactttccaaccgaagaatgaggaaccatttgtctttgttggttcagttcaaggttctcgtgttccaagaattttagcgttgaaagctagggatttattacgcaatgggcgtgtgggattcctagcggttgtagttgattccagtaaacccgtgttacttagacctgaagatgttaaagtggttaaggaattcctggacgtgtttcctgaggaattaccagggtcgccacctcaacgtgagatagattttattattgaccttatatctggggcagaacatgtttctaaagcgccttaccgaatggcacctgcagaactaaaagaactaaagatacaacttcaagtaatgttgaatttagggttcacccgaccaagtgtgtcaccttggggggctctggttctgtttgtaaagaagaaggatggaactcttcggatgtgtattgattaccgggagctgaacaagttaaccattaaaaataaatatcctttgcctagaattgatgatttgtttgatccgcttcaaggtaagacggtattctctaaaattgacttgagatctgggtatcatcaattgagaatccgggaagaggatattccgaagatagcctttcgtactaggtacgatcattatgagttcctagttatgtcatttgggttaacaaatgctccggcagcctttatggatcccatgaatagagtattcaaggatttcctcgataattttgtaattgtatttatcgatgatattcttgtgtactctcggtcagaagcagacatgaacagcatcttcgaatggttctgcaacgacttagagatcataaactctatgcaaa

SEQ ID NO: 407374 - DNA, 591 bp, Cannabis indica
aagaacgagcagtagccctgaaagacgaagttgaaaagttgcgcaaaaacaatttcatcattgaagctttctacccggcttgggtcgcgaatcccgtactcgtgcctaagccgaacaagaaatggcgagtctgtattgacttcacagacctcaacaaagcgtgccctaaagactgtttcccacttccaagaatcgatcagctcgtcgatgcaacagccgggcacgaaatattaagcttcatggatgcttattcgggctacaatcaaatcaagatgcatccaccagaccaagaacatacaagtttccggacagatatgggtctctactgctacaaagtcatgccattcggtcttaaaaacgccggagctacataccaaagactggtcaacaaaatgtttaaagatcagatcggcagaaatatggaagtgtacgtggatgatatgctcgtcaaatccagaaaggctggggggcacatagacgacctggacgaatgtttcaaagtcctcaaaaaatacaacatgaaatttaatccccaaaaatgctccttcggagtcagctcaggaaagttctaggcttcatcgtcaacgcttg

SEQ ID NO: 407375 - DNA, 676 bp, Cannabis indica
caaacaaactcctaataatcaaaactcatatatatatgcttttgaattattactttgtgttcatcaatcaattaatcttttctgtaatccttttctgagtttctgaagatctgatatggctgaattggttggaggagctcttctctctgctttgctcaatccattggtgaagaagttaactactgaggttaaggacttcttcaaaggaaaagatgccattctcaagctgttgaaggagttcaaaactttgctgtcctcggctgatctgctgctcattgatgctgaggagaagctcatcaaagacccaagagtaaggaagtggcttgatgatctcaaggatgtaatttatgatgcagacgacttggtttacaagatcgacactgaagcatggcgaaacgaacttgaaggtggtggtgcttatgaatctcatagcggctgcagttgtactagtaaggtactaataaatcaattacctttacgataaaatataaggatagtttaacaattaaacatattttttataaatatattgagcgaatttaatgcaattcttcactttttctctatcaattgacctattgcatgcatgcataatatttgtcaggcactcatgagactcatctcaacaaatcctttaacttcttttgataaggccataaaacctgagataaaagag

SEQ ID NO: 407376 - DNA, 628 bp, Cannabis indica
tcaatcttcgacaagaactcatcactgacaaacttgtcctgaaggtacagcacatgacgagctcgagccgctgggtcgatcacaaccttcttccctttctcttgaatacccttagcaggcctcttggaggagtctgcgacaggagtaacaaccgcatcgcttttcctcttctgggaggtaataggagaggtcgctgttgtcccaggcttcagtttgcggttgagcataggagcggactttaggaaagtcatttctgcgattacaaaaggaaaaaataagggttaatactaataaggataaaattctaacaccctaattttgcgtatgcgataaaatacctgatgatggtcgaggagtttgcttggatagacgtttatcaattcgctcttgttgcttttcagaaggttccttatacaccgtctctctccaaagactcgcgttctcagtgatcagtttgtgtttgcgcagtttagcagttgtacacaacaatcgccagtcgcgatcttgtacaggaaggctcccaagaacttcagctgtctctctgcgagtcgcgtcgagtgtgggacgagacggtctatctgcaaaaaccaaaaggaaagagcgaatcagattaaaacctcaaagtaac

SEQ ID NO: 407377 - DNA, 600 bp, Cannabis indica
ctatttataggtaaccattaggtctaggttaaaaattattggacattaaaataatgaaaatattacttggaaaatccaaataagtgatcgaccaaggtttagtgggccccactttagtattttgcaattttaccaattttcatttctattttctcaaaaatgccaaatttttcaattttaaccatttaaatgccaaaattaattatttaataactaaaattaattattaaataatattgtcacttattatatttattaattagacttaataaagtcttccaattaataaacaaaacctagaatctcttttcttcacaagtttgcccttgcttagtgaaaattcataaactagacatagtctaatcttagaattataattgattaattaaaataaattaactgagtcttacaagcagtatggtctcaactagaatggggaccatgggcctatatttctgagcttccaataagctgatcaagaatttaccaagtaaattcactagcttattaatttcttgttgcatccagtgttggaacttagaattgcaatagaacgctctatatgttctgccatatagatacgctatcacatttaaccat

SEQ ID NO: 407378 - DNA, 977 bp, Cannabis indica
  modified_base (948)..(948): a, c, t, g, unknown or other
aaaagagagaaaacaaggaaaaatggatatttgggctgaaatgaatagatgtgtaagtgatatttcggtaaataaaaactcattaaagataaaattgttactcacaccttatgaaagtatttttgtaaatagagtgtcaatttgtatttttcatgtaaaaatttgttaaaatattcctattatattaataaaataatggaataataaaagtataaaatttggtgtaatttttagcattgtgattggaattgaaaaaaaaaattagtgctaaaataatagtttttttagtgttgatttaataccaaattttaattttaccattgaagatggccttacaaatgaaaaataaacacaagatacctttttatgttattgttatgattatggttgggtgtatggacgcctgattataatccgagttatagttatgttattgttatgcttttcttactgagtctgtcgactcacagatattgtttgcatgtgtaggtaaggacaaggctaaggttgagcaaccgtgagagcgagcagatgaagattgtgttagactttatgccctaaataaaactcgatttcaatgtaatctctatcatttaaatatcaataaagagacaacagtattttcatcacttatttaatgtgtcatttggttcatgttatcatttatatgcttatttgatttataaattcatccgaacccttatcacattaatattcttgtttattgtgtcgttagcacagtggaaagtaatcaagtttgtgtgattaaatatatattcctagatttatcagtacacagggtttaactgatatgataatctacaacatagtttacttgcaccttggataagtgctatgtcctttccagggcattggtgaaagtaaaacttgggttggatgcatggagtatgcattggaagggaccgatattgaactttgaatagatangttaaatttatcgtaatatctattcaact

SEQ ID NO: 407379 - DNA, 675 bp, Cannabis indica
ttttaaaaaaaattaaatataaaagagagtagaatataagaaagtgtcataatagggttatatcaagtttcatactgttttaaaaaaaatagtataaatatgaacagtataacataaattgaagagttttattctaagaaatagcaagtaaaaaaatgattacaaaggagtaaagggaaaatctcttttatacacattaggtcgagcaaaaataaatccaaaaaaggagggaagttcatagaggctaacaaatttagttaggacaaaaactaaaaactaatagacctaaaactaacaagttaatacaccccctcaaggcactacaagaaaagccacttttgccggcgcgacaaatgcgccggcaaaagtaccctaactgcgtcggcaaagcttatctgggaagcttggtcggtaaaggagtttttaccggcgcgtagagtaattgcgccggtaaaacttgcttttactggcgagaaatcacgccggtgaaaagtaagcaccggtgttaaaaaatgcccttatccgctatgaacctgatttgataagcttttgccggcgcaatagtgcgccagcaaaactattggcgccaaccctcagattggcgccaataatttttgccacattttaccggcgcactattacgccggcaaaagtattaatttttatttttaaaaa

SEQ ID NO: 407380 - DNA, 695 bp, Cannabis indica
gttaatccaacatacttgttagtaaatctagatcctggtaaaataaatttccaacagatcatgttcccaaccatttacattattagattctcaaaataaaagttagtaagaatcatcttctctaagaaactttaacgagtgaatcaaagaaactaataacatgaagaagagttaataattactcaagatttaggccgattaaccattgatcatcagtataatatgaattaggtctttatagtaaatgatatttttgataaagacatctcaattttatatcaatcaatgtcatatataatctctattatatataacacattcacttagatgtcatactacatcagtaatctgaattgagattacttgtatcgaataacgagcatcagcgaattgcctaacaaccattaattaaagattccataactttaatttattgctgactatttaattcatggctaagtgattttaattctcatgaatgaataagaattatttttgatgtttatatataaattatttaatattaaatattaataatgtaacattcaagcacatacgaaaatgttcaactcttatttataatcagaattgcctttataggttttcatgaaataaatcctaacaaaaaaaatctctgggtacctcaataatgtccactaatactgtgatgacatttctagccaaccaatcgagtt

SEQ ID NO: 407381 - DNA, 501 bp, Cannabis indica
aatttagttttagtcataacaagcattgcaactaaaagtacatttactcacaaaaaattataatttttgtgactaatacttttatccacagaccttttagtcacaacataggaatcatgatttataattagtcacaattttttcacttttagtcacaagttttgttgtcactgttgaccaagattttcggcaaccaatttaataatatatgtataaaaaagctgtaggaagtttaatgcatgagatttttacgtggttggggcattaacgagccttagtccacgagtctttcttatttatgagagtatttattacagagaatgttcttggtagatttctctcttaattgatctctttaattcttatgagcccagaactctcgacccctagaactgaatcacttgtctctttgtgtagtttcagtaggggcacgtattcccaacagatcaaaaatggaaatacatgaactctactgtgaatatcttagtggttaggtggata

SEQ ID NO: 407382 - DNA, 1166 bp, Cannabis indica
ctacccccgtaccgccccattaagagcggatatccgcgagtacccgaactcgcgagtataattgctatccctaaatttaaatgtcttttaatatgcaacccacctctacattttgttttatttttaattgattagttattgcattgagattttgtttttgaaggtatgatattgagatttagagaatgtgagaattatagaggtgagtgaattaattgactttatattcattcattttcagacaatctctgcattaaaataaaaaataaaaagcatatcccaatatcccattataataatgagtatttgcataaactaaaatgtaagtaaaagaagtccactcattcaaaaccaaaaataataatgatattggtcagtcaacatcatatatgcttcaatcacaatatcattaaattaattagtcaaaaaatataccttatagatcgacgattcataaattattttattattcatagactaatcactagaatagaatatgaggtagacataagttatgactttatattgccattgattttttgattaggataaaaaaaaatgctgcaataattttaattaagctaacaatatataggatttagtctgtcatagctgttaaaaactctaaaacaaagttgtcattttcggttgagtagtcttaaattaaaccctacctaacaaataaaataatttttccatatagaattaataaactaataaatatagtgtatgacaaacataccaggcaaaaacaagtgatggtgcataattgaatattttatgaagctctgatttcatcaaatataaatttctatacataatattttctttaatttattgcaaattaattaatataatttatgcaaaaccatgtatacataaatcataaaatattcatatgaactctaacatgttttgcagtaagctctgaatatttttattctttgcttattgactttgagcccagcttgcataatataaaaaatttgggaataaaaggttggtagcttaaaattaaattcaaaggcctgttgataattgatttagcttttaattcacttctaaccgttgtagtaatatttaatggcatatttatataatactctaattgttggttttttttttagtaatttacagtgtaaatactaaatttaatttttaattac

SEQ ID NO: 407383 - DNA, 504 bp, Cannabis indica
ttttattgaaatataaattatagcaaacctgaagttcatgaatggggttgttttaatatgatcaattatacgcaataaattataaaattatttgactaaattttattgaagaacaagaaaattcttcttattgttaatttataatgctcaaagaataatgtgcatatattttgcacatagaaaaagtgaaagtatattttaatatttttttaatttaaaagtaacatatgcataattcatttagtttttcttttatacttgtttgtgaaattgtttatcgaaattttcaaaaactaaataaatagaacttagaaaagaaataacagattaaataacaaatgcgagatttttatgtggttcaggcgttaactatccttagtccatgagttcattttattaggcacttcgttcggtgaatattaatacaaatctatatgcaatggaccaaaactttttatctctctcgtttgtcttgaagaagaagaagcttcataggaatttttt

SEQ ID NO: 407384 - DNA, 2267 bp, Cannabis indica
cctctctctctctctctctctctctctctctcacacacacacacacacatacacacatacacacgagatttgccaactttggttctcacattgtaatcttagtagagttacttcaaattctagtattatctctagtatcaatacaaccaaaagaggagtaggtcattactctctatctaaggggatcgaacctttataaaatcttgtctctcatttacttttgtgttcttattgtgtaacacgtggcaagaaataacattaaatacgactccgctgctggttggtcaaatttgaggtcaacgatggtcatatatcaaaatatatataggcagttcagttagccaaaattactgagttcagctacaatttctaattcacccaaattttctaaagtttaccttaattatttaatatcatcgtaattgaaatcaaagagtgttttctttaaacataatgattgtaattaagagattattctttaattttggatgagttgaatctaaattaatgattgtaattttgtatttattttttaatatttccaaatgtgaaatatttacttaacaaccatcttagttgtttttttttattattttattagaacacaaatatatttgtaattttgaaaatttagtatagtaaaagtatagaaagaaaaataagtgacaataaaaataataaaaaaaaaaattaaaattttcattctttttgactattttcataaaaacattacatcataccactagctaacaaactggataggttgaccgaagtgaagagcccaactacaaaacttggattcttgtaagcttcttctctcccatctctagtttgggaccaaaactaacgaaaaagaccacaccaattcaactatatatatataaccccattctgaggtctaaaataagacccatcttttttactcaaccatgcttatagttgacttgactggaaatcattgtgatgtattaactagtagtactgctacaaataataatggttagattaatccatagtccgactcatgtttttatgaacacagagttcaagtacatcatccctaacccatatttaatttcatattaaggcccaagtttattgacttttatgtcatcctaatccaataggcaatgtcatgtctggttctcacaatgctctcttacgtataaaaggtggcttttttagttaaagtcgatcttttatataattaagatataaatgaaacataacgacaactaattgtccattattgaataagattctaatattctacactaccaactacactcaaatatttatttatgaatttgtgcattttcttatcatataatagcatagcaaaattgatcaaaatatacacattggcatttgcaattgaagtaaccatatatataaccgtttgactacgaaaacctatggaaagagtgtagattttctgttaattaaaaagttacataacttaaggcaaaaggaaaaattacttaatttctcaatttatttcttttgaatgtaaggacttcgaacaacatgtgcaaaaaagcaaataatttagctacacaattatattcacacatttactcttatagcaagtatcacccaatttttttgtatggggaaaatattcagtaaaaaagataaaagaaagaaagaaaatgattattggggtgtgtgtgatcattcggaggatggagaagagtccgtcgttaatattatttggagagccacctaaaacgacgccgtctgcaatggtctccaccaatcctcatctgaaccttctcaaactcggatgctccacagggtatggtgatccgacccggatgattgaagccatggactttttcagcctccttcaacagatccccaaacaaggggtgattgaagtatatgacaggcaccaagtacatctgagtctggtgcagtgactcacccacgtacacagccaggtgacctttaggtatcccttgctgttgattcggactatcaaccgggtcatgggtcaaggggacataatcacccgacttgggtgaagaagaacaaaggtgtttagctcctcttcgaaaagagcgagcaaaggtgagaactttggctatgggattgctatgcacgtttggcatcataactaaaaaactgttttttgtttttaaaaacagaaaattatttttaaaaacaatttggcttgtttggccttgtttttttaaaaacagttttcagaaaacaaagttacaaaaaacaagaattttgaaaacaacaaaatgttgttttctgtt

SEQ ID NO: 407385 - DNA, 512 bp, Cannabis indica
acttgttccactccacttacgccgataacaccattttatcagctttttgaagtcatttctccactactcatactacgaaaataccagatttaaggagcaaatgttcactataaataggagtcaatacaatgtaaaaaaagaatcagattttagtagtgttattataccaaaattttatctttttctttccttcttctttattttactttattaattttggtgtaaagacaatgccttttctaggctaatttctttggcaagactcaagtgtaagttcatgcaatttttattcttctaatatattgattctctttgttcttcattttcacatttgttatattaaatttctcttcttcttaattgcactttaaatttaatagtaccttttatataagttcagtcatgcttttcttatgtaagttaggctattaattattagagtgtttattatattatatgatttttactgcattctgccggtggtattttgtcgatttaaattatataatatg

SEQ ID NO: 407386 - DNA, 556 bp, Cannabis indica
ataatctacaatgtagtttacatccatcatggataagtgttatgtcctttctagggtattggttaaagtaagcttggactggatgtatggagtatgcatcgaaagggaccgatattgaaattttataagatataataaacttaccttaatatctatctaattcaatatcacctagttgatgttagatcaaatgatctcaatccatagatggttaggatctagttcagttgtattaattatgttcttcaatctattcgtcaaagtcaaccaatagatcttctcgtgacatatagattaaggacatggtagttcaattgagtggaagcgctaatcatagatacggaatctatagcttctatttagacatagaagtgaaatgataatttccttcgagcttggctgaatagagataaatggttgattactcatttcagtaattatattagtttactaaaatattacatataggtagctaagtgttttaaagataaaatacattgaagggtgtaacaataaatttgtccctacttgatgtagatcatctatagaggatcat

SEQ ID NO: 407387 - DNA, 916 bp, Cannabis indica
catcactcatcaaacatgctgaagctacaaaactcatcacgggatgcaaggttgccccgtagtgcacctcctatatctcatctgcttttttgccgacgatagctatgtgtactgcaaagcttccgaggaggaagcaaatcgtgttctcactctcttgcgcacctttgaagaagcttcggggcagaaggttaatctccataaatcgtctgctttctttagttcaaatacaaggttggacataaggagacgaatttgtagtttgatgcaagttcaagaagctggggcagatagtctttacttgggcctcccgagtattgttggtaggaataaaatgctgtttggggttcctaaaagaaaagatgagaaagcgaatcaccagctgggaaggcaaatttctatctcgggcgggtaaggaggtcctcattaaatctgtggttcaatctctcccttcatacgcaatgaatgttttccttttcccgatcggcacttgtaaagaacttgagagattaatggctagcttctggtggaaatcaaacaaatccaacagcaatggaagtgggattgtttggatgaactgggatagaatgacaaggaataaagctgagggtggcatgggatttagaaatttgagagattttaatcttgccatgctaggaaagcaaggttggagactcatgtttagacaagactctttggtcagcaaggtgtttaaagcaagatactactctcagagtgacttcttatctgctgaattgggttccaacccaagctttatttggagtagcatttatgctgctaaagacacagttaagctggggttgaggaaaggtatcggatctggtctctctgtgggaatcacctctgacccgtggctaccaacacttgatagagcctcccctataccggttgtccctgg

SEQ ID NO: 407388 - DNA, 789 bp, Cannabis indica
acaacaacacatttatgagatggataggtttggatctctcaattcactaacttataacttcactttctatgcagttaaaacagaggattcgtacacgcgtgcaaaggaagagattgaacggctaactctaatgttcaaggaagaatttgagatgagttccaatcaagaaggagagacgccacaacctggaagatatcgtaacaaccccaacattattaaagaccccaaagttgtgagaataaagggtacgggaaatcaaagggaaggaccgaacggggagcagatcccaagaaactcaagacattgtcgcatttgtcactcatcaggccatgattatcgacggtgcccaaaccgtcaacagaacactccaacgcgtatttcccggaaccgccttcctccacacaagaatcatactatggtcattcatataactagctatttttaattgttgatgttttaaggtttatgactttaattattgcttcaaaaactctagatttatatacttcatgttatgtttgccgtgtttaaggtaattatctcaacaaatctcaaaattataattaatgaacaaataaattattttagcccaaaaaaattcaatcttataaggtcaaaatttccatagtaattaattttttttatacacaataataaaaataaaaataatacaccaacgtaaaactcaatatataccaacacataatttcataatttataacaaattattcttaacaatgtactacgaaacaaaaatgaacgtactctgtacgtgatattttgtactcg

SEQ ID NO: 407389 - DNA, 722 bp, Cannabis indica
acttattataagtataagaaaaacagtcgggcatgtacaatataaaatatataaatcttattttcaatattgtaaattattttaaatagtattaaataattataatatacataattataaagaaaaaaattaaactaaaaaattttgtaagtaccaaaataaataatgttaacctaaaaaccaaatctaaagtaaagagggtttgtctattattaatttccaaatagaaaaaggcaaactttgcaaaagtgatgagaattaattagtaaaagataatgtaaagcaaatcttatattaaccaatacaactgatttaatggtatacgtgtttaacagtgaaatcctatatgttcttggtcggtgctttaaaaacagtattatatgtaatagagaatgagattgcatgtataattaattgaataaattgatctagaaatttccattgaaaattgacctattaattcttacaataatatccattcaaaatacaaattcttgaggtcatttttagcctcaatacaaattctccaacaaacacttggcaacatatctaggggttgaaaactaacaatacatcatgaatgaccctacactattattaaataataaaatatgtttattaaaattcgaaataaacaattttgtaaaattaattaaacagttttataaaaataaacaagttaattttttttattaaaatataaatgtgtattatctatttta

SEQ ID NO: 407390 - DNA, 915 bp, Cannabis indica
aaaaaaattagatatttataaatcatttatgtaaaatatgtttctttgtggccatcaggctatgtaagtacgacgtcgtcacctggcaaaattatgcgctgaagtctcagaaaattagttccaagggatacattatatcttgtgctgggttaattttcaaaaccttttattggatgccagaagctgaaataaaaaaaaatgtcaaaattgaaaatgaaaaaaagtaaatagaggggtttttcttctctttttcaacgttcattagttgtgacaatagggcctgggcccaaagcccaaagaaggctggatagtggatcatataaaggagaagcacagctggggcgaacccctttaccatgttgatgggctcggttgacttgcccagtttgatctaatatgttgaaactccactaccaacaagtgtggttggtgcataattaggtggactcatttgatactaaaatccaccacatgcatgtatattattaaaaaattaggattattacattacattagaacaagcaattgaaaacgcagcaaagccaactaaaagaaaaatgactttactcatcattataactaactagtgatagtggagcagggtagtgagtagtgagaatcactgcagcaatagctatagtgcctctgagaaagaatgtttctagttttgtaaaggtctgcttctatgcatgcactcacattgtcacatcccttttcaaacactgtaacggtatcgtttttagcttccttccatttacaaaacaacaaaaactaaagtcactttaaattttattttgttcatttttgtggatgaccctattcaattaaattaccattttcttgttgtccctttttctttatggcttttcctaaaatattagttttgtgtatgagtccctctctctctctctctct

SEQ ID NO: 407391 - DNA, 509 bp, Cannabis indica
atttttttatgttttgctaaaatgtaattttaattgtgatgtaaaatgtgtgataaatttgaccaagtttaaaaattgttattaattttagcatagaaaataatttaaggtaaatttaactcataaatactatattttttaagtacttttttatcgttcatttatattatttattaattttttttaccctttttaattatttttattaaaaaaattaaaaaaaatctaaataaattttaataaaggatatttttataacttaaaaataatttatttttattccaaagtaaacaccaataatattttttttctatagaaaagagaatatgatatttttttcccaatagttaaaatacaaaatattaatacaataatggtccacatggtaaaaaaaattgtcaacataatgatgctattatgcatttttgtgtttctatattttgatgggtaattttctcataaatcgtaataaagagagaagaattccactcaaaataataataataata

SEQ ID NO: 407392 - DNA, 556 bp, Cannabis indica
aaaaaagctatattataaaatgataaaaagttaaaaaatataagaataattatataaaacactaattttataaaaaaatttatatttatacatttaattttttttttatatttttacggtattctataaaaatacaagaaaataacaaaaaaaaatcacatgaaagtaatgcgaaaataacatcaaaacaacatacaaattaatatacaaataacaaaaaatcaacaataaaataacaggagtacaacataaaaatatataaaaagactgtattttatgtaaataaaatctaaaaactgtaaaaatatttaaaattccgtacataacatatttttgtaatttttttattgtctttgtatttttttgaaattattctaaaaatacatagccaaatgtaaaattatttatagttaaaattacatgaaatatagaatttataaaaaaaagttacaaaaatatggtatttataggtttgtcactcttctatggtattttttcacatttaagattttttatggtatttgatatgacagatttttgtaaacctaatatccaa

SEQ ID NO: 407393 - DNA, 671 bp, Cannabis indica
caatttcgaatccctacatatcaatataaaatataatttttatatttgaacctaaatatcaaatttttgagattttataatatttaattattttaatagtttattattgaatttttttgatattttgaagtttgaatataaaaattggttatttgatattcaaattatggattagattttaaaattttgttaacttcttaaaatttaaaattatttaataataagattagatattttaatattagatatatattaaattaaatgatattattattcttttaatttaaaatattatattaaaattatcttacattataaattaaataattataaatttgaatttaacgtagatattttatagatatcctaaccataatatttttaaatttataaattagttattttgtgatatattttattatttataaattataactttaaaaataatatttatgactatattatattattttacttataaaaaatttataataatattttataaattcaaataacctttgtagaaatttgaaaaaaggttaatatgagatattttgacatataatttttaaaattatcatttatttattatttttttctcaaaataataattgcctaaccatatctatttgaaaattagtttatttgattattttaattttattaaatta

SEQ ID NO: 407394 - DNA, 689 bp, Cannabis indica
tcataatgaacatatttcatgaaaaaacctcagtcaaattctcaacagaaatcaaactaaaatggccgtcctaaaactaccaaaatcggatggcctgaaactcctgtccgagtttggaaatcccatgtctaaaaataacggtcattacaactatccccccgttaaaaggatttcatccccgaaatataacctgaataactctggatattgagtcctcatttcagactctaactcccaggtggcctcttccaccttgttattcttccatagtaccttgattaagaagatagtcttgttccgtagaactttgtccttcctatccaggatttgaactggctgttcctcataggatagatctggtgccaactctagtgtatcataactcaagacatgagttggattagatacatactttctcagcattgatacgtgaaaaacattatgcactgctgataatgctggaggtaaagctaatcgatacgctacttgtccaaccttttcgagtatttcaaatggcgctatgaatctaggacttaacttgcccctctttccaaagcatttaacacttttcattggtgaaatccataggaaaacatgttctcctacctaaaactctatgtctcggcgcttaagatcagcataactcttttgcctactttgggaagtaagcatccatgccttgatctttt

SEQ ID NO: 407395 - DNA, 722 bp, Cannabis indica
agaggaaggaatccaagaaggcacaattcaaagtttagaggtcactcaagatccaagtctagacctaaggagacaagaatgtcaccactgtggcaaagttggtcatctgatcaagaattgctgggaaatcaagaacaagaaaaagaaacaaaggatgaagaagagaagtcaaatgactcaaatgctgtagtagatgagacatatagctcagatggtgatctctttgctgtgataaatgactgctacactagtcagaaaagtggtgatgcctgcaacattctgcagcaaaagaactgtgatgaatggatcttggacagtgggtgtacataccacatgagtcctaacaaggattggttcattgattatgaggaaattaatggaggaagtgtagttatgggaaatgatcacaagtgtcaagtaactggaattggatctattgccattagaagtttcgatggtactgtgaagactctcaccaaagtcaggcacataccagacttaaagagaaacctaatatctcttggaacccttgatgatgagggatgtgaatacaaaacaagtaatggagttatgagaataactagaggttctatgctgatattaaaaggcaccaaaaggcatggattgtatttcttgaatggccaaacaatcatgcctgcctatgctgcaacagtaaacaaacatgtgtctgaaactcaactttggcatgctcgaatgggaca

SEQ ID NO: 407396 - DNA, 539 bp, Cannabis indica
ctgtcttcatatatatgttagttcgataatcatctattgtgaattttctaatatgtttatacctctttatgacgacgcacagggcacctaagaattctgcattagcaaaggaccaccatgacagacagcagggcagcgttttctattccttgacaccatctctcaaactcaagggtgagattctcaggccaattttgtcaacaaggaaccaaaatctagaagcaagatacagaaaaatggaaaaaatatatatgtataaaataatgcacacctctttctgatttgagcaagaaaaagagacaaagaatgaaattgagaagaaaagctgaggagaaaaagggtggaagatcgcacctttaaggctccaatccgacggcgttttggagttcccaatcgtcaagacctgccatcccttgatcttcacgagctttctaagcgaatcagaggcataatcagagacggagacgatgatccacctctccatccaaaaattcgcataaggtgaacccttatcagtgattggagtaatcgaattccaa

SEQ ID NO: 407397 - DNA, 596 bp, Cannabis indica
agacagttagcacgagtaggccccaaaatcgcatgtctttaaccttagtcacgaacagtggcaacaagttcttgttggattatattttaccaggatctagatttactaccatatatgttatttaacatcctaaatatgaaactctaaaataatgtaaataaacacatataaagttttaaaaccttacaatgggtgcaacagaattaaatgactcattccactcagatctctaacccttgtatcatttctgtagcagagtatcaccaagatctaagcccaaaactccttccttgtgtttgaatttttcacagtcttacacactatgattgaggaccaacttgttatgtgtgggcatgtacttaatcactaatggctgaattttggtttgtgaagaagaggctatggtgtttcgaattgaagaagaagaaggaagaggtctcctcaaacccagagagaaaactagatttttagctttggagacattcgttggataatgagaccatagccttcctattatactattcttcaatagggttagggttgaattattaggaataaaaaattgataaaaatagagtgaaaaagccacctaatgg

SEQ ID NO: 407398 - DNA, 548 bp, Cannabis indica
agcaaattaaggctgaacatcagggactggcagggttgttatagcctttaaccgtacctgagtggaaatgagaggatatcacgatggactttgtggttggattacctagaaccatgagtttatttgattctatttgggttgtggtaaaagtctgcccattttctaccagttaaaacatccttttcagtggatcagtacgtagatttatacgtcaaggaaatagtaagactgcatggtgtaccaaaatccatagtttcagatagagattcgaaatttacctctaagttttggcaaagtttacaacgagctatgggtaccaaactgaagttcagtacagctttccatccttagatagatggacagtccgaaaggacgattcagatattggaagatatgttacgagcctgtgttatagattttgagggttcctggagtatgtacctaccgctaatagaattcttgtacaataacagttatcagagtacgatagagatgcctccctatgaactgttatatggaaggaagtgtagatctcccatccactggga

SEQ ID NO: 407399 - DNA, 869 bp, Cannabis indica
ataatttaatttaaataaaaaaataacaaaatttaaaagctagcataatatcctatttccattcaaaatatcatgattaaactaagctaattgtaaatttaaataaggtcaatttatttaaaaaatagaatatttaaaacatgaaaaaatgaagaaaatcgaaaaaattgtaagatgtacgaatggtatgcattgcataccatccgcgagcggaatgggagtttctggctgaggaacctcgatgctggagggtgcaagcaacctctccgcgcgcgtacgaggatattcagacagcatatgggcgagaaattcagacacttcgtgtctgaacacgcatttttcacgtgcatccgcgcgcgcatggggtgtgtcaccactcctatcttttttcgaaacttcaaaaaatcataactaattcaaataaaatcaaaattaagttctctaaaaaagtgaattgcgtaatgtttcctaaaatatccaaaaaaaataattccagaacgaaaatcaattatttttcataaaaatttaacaaacatcaatcaatcatcaaataacacacaaatcaacatgaaaccatccaaatcacacacaaatcgttttaagttcaaatttcttgaaagtaaatcagttaccatggatttgataccagttgttggaattatttctccttctgctcagatctctaacctttgtattctttctgtagtagagtatcaccaagatctgagcccgaatgttcttctcttgaatctggattcttcacaaccttacacactatgattgagataccacttgatgtgtgtgggcactcactcactcactatagcctcagtttagaagagacgaagagagagagagtgagagaaggt

SEQ ID NO: 407400 - DNA, 598 bp, Cannabis indica
aattccaacttctaattttttctcttttgtcctaaatctgatcaataacataaaaaggatatacttaattatatatgcaacatatattttcttagccatgtccttaggtctcaacgttgaattttgtagatccccatgtttatactatatgtacatacatatataaacatgatcaatcaatcattatataattataatataatacattttattttatatttagtgttctaaaaagaaaaacaaaccaaataccctataagattggagagtgtgtgtggtgaatcttattgaatccatactatataaaactatatattccacgtgcaattctatggaacaccacactcccaaaaacttagctctcttcttaattatttctctctaatattttcatggcttcttctcatacattagagcaaatatgtattgagcaaccaaccatacttgaaaaatctcccaaaattactactcaaaacaagtccactactaagcaagtagtggaacgtgctcagtggctccgagcagcagttctcggagccaatgatgggttgctctcaacagcctcgctattgcttggtgttggtgcagtcaaggatga

SEQ ID NO: 407401 - DNA, 672 bp, Cannabis indica
agaggttaaacccccaaattacgaggggtacaacgaggctgggcagccagtcgatgctgatggagatgtcctggtcgagggcgttgactacgtcagtgaggagcttcatgcggcggttcctcatagaaggcagggtggcttgggcgccaggtgggtaagtcctccgtccaagattacggagaggcgccttcgaactcttgaccaggataggtacctgggcgagctggactgctacattcttgcccacaataatcgtgccacaaaccctgacaaggggatgtgcgcctggtcgggggcacatggtcagcaaggagcgctgatgcccttgcacaagtacttcaaggatgtggcagacttcttcggtctctgctcgacccaaatcactcctaagggcattaagtatatgtctgccctcttcgtcctttacgcttcccaaggatgtggtactccttcttttcacgaggttgcctggttcttcgatttgaagtccacccccaaataagagaggtcggggtacttctatttctctcaaccaggtttcaagtggttgaccagcacggatgacaaggccatcagcaaaatagggttttttgctgatgagtacttcatggtgaaggatccgagcattacccagactttgtttcagcagattctgacatatcatcgtcctcc

SEQ ID NO: 407402 - DNA, 761 bp, Cannabis indica
gtcattttttttaaacacaattttgatgtcatttattaataacttaacttttactgtttcaaattattttactaataaataaattgggagcttctacctgcactaaaaaatggtgcactgactttattgttttggcaatttgaaaaaaaaaaaaattaatctaattttttttatcatatttaaatttttgacatgttaaattattttaaaaattttttaaattatacaaaatattttaataactataatgtaaactgctataaaaataattaaactaaaaaattctccgtattcaagagtgtaccataaaattttcttaaaaaaactataacagaataaaaaaaaataggaatatgtaactgatttattctgattgcataaaattttgttaaagtaataatattgttgtgtaaaagaaattatatgtaacttatcaatttagaaatattaattattgagaaaaatatcttctttatacaattttggaagaatgatatttatcgaaaacaaaaaaaaaaacaaaagtgtgcaacaacaagcattgttttcgcggctatattgactaattatcaattattggaagcatgatcaattttgtcgggtttttgtttccattattttagcagatcaattttatagaaaaggataataatatctagatgatccaatcatctgttgccatgtcagcttcatatatatttttccaagttaaattcgttaaaagaaaacgaaaataaaagaaaagtaataaaaatttggaa

SEQ ID NO: 407403 - DNA, 804 bp, Cannabis indica
aaattatgtaattccaaattttacatattcttcattgatgagtgagctcgagtttaaggtgttaatcctaaccttatcaagacgatgttttgaacctcgaaataatgagacacaaaccttgaaaggtgtggcttcaagccgtgaggctcaaaactgagccacatgaaaaagttcacgtgtgcatgggcaatgcatgcggccatgcacgtcaaaggagttgaagggaggagagcttagttttgggttcaggttgcattgatggccaccgaagagtttgattaatcctataacaccctaactagcatagacgtgttaacgtgattttaaacatactgtgcagctcgttgctaatcacgaggttaataaaaatcgtgattaattaaaatttacttatttaattaaaagcttataatattacatacaaaatatttcgggatctcgtttacaaaatactttacaaaagtttgctattcatttacaaaatatttgtcgcccagcgactaacaacaaaagccctgatgtcctgaggatcgtacgctccaggcctaaccgccccgatatgtacaatcttcatttgctcgttctcacggttcctcaactttagccttgcccttacctacacataaacatagcactgtgagtcgacagactcagtaagaaaagcataaatcatataacatacatatatctcggattatgatcagacgcccatacccctgaccataaccctaatccccgtgtcccacacggtactgagtcttgaacgttcgtacgacggtacctttgacatagtaacagcctata

SEQ ID NO: 407404 - DNA, 555 bp, Cannabis indica
gacaataagtactatgttgattacgaaataagtagagaattaatatcaagagattgcacttttgctgaactagtgctgataatgatggatgaactacaatgcaatcgtgaaacaactcaaatacaactgaaacacttaactcaacaaaatgtagtagctaggcaaacaccggtaacaacattgttggagttcttgtgtacacaaatgcaataatggacatataatagcagagaaaagaggcacaaaagtgcacgacaggattgaccccatcctcctaaaaaaaactcatagacaactatgtatactcgttgcaattaactgtaagttaaaattatatgtagcatcagttatactaaagcagttttttatagagttttttcgatgtttgtaagttgctttatataattttgcacaaaaaatgatatgcctatactaaatgcatcaaaatatatacaagtgaagccaacaaatgaaaacttatttgaggtgctatatgaagacaaaacacattgtaaacttgaaggaccgaacattcacatgcaatagatttcaaaa

SEQ ID NO: 407405 - DNA, 597 bp, Cannabis indica
tgatatttcatctaaaaaaatattttaatttaggaattattttataacaaatcagcataaaaatatttgatgaggcacctaatattttatggaaagtatagtaaatttttaggtaattaaataattacaaaaatatcttcaatcaattatatctatctttatatataataattagctcgatactaaactgaaaaggaaataaaacatagaataatattgaaaatactccttttaattaaatatactcgacttgtattttatactgctgcatatttacaacttttatatgcaaggaaagggagaaagaaagcaatataattggttcgtacagtaacaaaaaaatattatctaaggtctacacacattcatctgatcacagctaatgattttttcaatcaactttcaattttactgattcaaaatccttaattttaacaaaagatgcaaaatcagatttgaaaggtataaattttccaaaatgtttatggtgatactgaaagtcctaattattacaagttcaatttgatgattcttaacagattaattctatgttatgaactagaaattaaaaacgatgaacacagaatttacaagctt

SEQ ID NO: 407406 - DNA, 904 bp, Cannabis indica
tttataacaaatacaagagtgagatattaagaaactaagaaaaagggaaactaaggaaaagaggaatgttgattacaattcatggtaataaataaaagatttggacatccacataattattaatatttataacaataatatatatcattctaattttgtcataaaaagctaattatttcatataattacaaaaaaacaaaatcattttttttgcgtattcatgtatttcacagtactaatattcctcctaatattgcgactcacatatataacctattcctaattaatatctaattatatatttgctttttcaaatccctaattatctgtattcctaaatagtgggtaatcccaaccaaattaacaattaataataacaatgggtcaatatatttatatatatatatatatattttttatcaacatttaaaatatatatatcagagtcatgatcatctaatctgacggattaggtaattgggaacttcatttttgagaaatcgaagggttaggtaattggggattcatggagaatagaggagaggttagttaggtgattgaagaatgaaatatctgtaaaaaaagaagtaaaataaatatttagaaacccttaatttatgcgactgcattatgtttaatttatgcgactgcattgtttttaagagactttcccggacaaattttcagcaactattattctagtcgcttttattgaaatgcttctagaaaacgtcgattcttgtagtgcctatataacctaattaacagtaataagccttttcaacatttaaaaacctacagatctagtaaagcattgttatttttgtgaccaagttttagaatttcataacccttttcatcattgatgagatgagaaaagggttacgaaattctgaaacttggt

SEQ ID NO: 407407 - DNA, 598 bp, Cannabis indica
gaagtaatccatatgcggagttgaaaaaaaaataaaatatgaatttcaaatagacttgtcatatgaggaacaatttgtacagatttttgaacagaaaagagaaagtgttgcagaaccaagaaaatatcactagttatagtgttgtgaaagaacaataagattgaaaggcgatttgggagttaaagtcgcagttgcgagagttgtatcccaagcttttcaggtaaattttgaggacgaaattcctataaggggtagatagttgtaatatcccgaaaaataaattatatttaaatagacatattttattaaatatatgattattttggtgacgaagtaagattatgatcttacttgggataattattgagaatttatttaataatatattgggcccggcgattttggttagaaatgtcacgacatttatggaagaattattttgagaatattccggactaggttagaaattttagaatgtcggtttaattgaattagcaaaattaccaaaataccctaagattaattttttttaattaaaaggattagaatgggtaaaatggtcatttaacctcattctttgtcttttgtgtttctttat

SEQ ID NO: 407408 - DNA, 656 bp, Cannabis indica
agatgcttttggcaccatagaagctattaagcggagtcagctcgacccaatgatctaagtatatattagatatgaaagaatgtcatctctatatagtgttgctggtttaactatcaaactaccactgtcctttaatttgtttgggcggagagttagagttgtaaaatcatgttccacttttgtagcaattttattgtacacatacattgctcttaagggaatataagtaattaaattacctttgctacttcaacttcgaataccttgttctttttggccagaacctctatgcatatggtatcttgtttatttttcaaacttatgtttatatcaccaactttagccgtagatcaagtaacaatacatggtgcaacaacttttttttctctctcaagatatttcaacaccagactgtcattttaataattttcaatttcttatatatactaagattcttcttcacaatctgcttaagtcctaattttttatgtcatgttcgtcatatgtcaaatttcattctcatgtaacgtttggttacatatcttatataaaataaggggcttcttcacgtcctgcttaagagttcgtttggtacgttgtattacaccgtattgtattgtataatattacattgaattgtattttatgcaatattt

SEQ ID NO: 407409 - DNA, 283 bp, Cannabis indica
aaagaagatgcaaatacattttaagtttagattattaattctttatttatattaaaataaagtaataataacaaagatagatttataagttgttttagattttttcttttaacaaatatattttacttttaaaagttataaatttttaaatttttattattattaattaatagtttaaaaaaagtatgaataaaaaattaaaaaaaataagaaaagaaatagatgtgtttagaagaattttagaccatcacgtcaccacctcatacttctcttatatatatat

SEQ ID NO: 407410 - DNA, 365 bp, Cannabis indica
aggcaaacatcatatcgacaaagatctgcttcaactcctatacgaggatcatccttatctctgtgctagcccatcttcgtcaagtaatgtatctttcaaagtctagctttgaagactaggaaataagtagcgaacatacgccttcctcagagcccaagatgctacatcatttctataccaaccagattcaaggtgaaggacaaggtcatttcatcagggaactcaagaaagcgtggtttacaatctgcttgagggtcgtccttattggaaattattttaccaaaatcttagatctactcacaagtatgttgattaacacccgaaatatgaacttctaaaacgattataaattaaacacatataaa

SEQ ID NO: 407411 - DNA, 410 bp, Cannabis indica
aaaaaaaaaaaaaactccaatttcaatgtaatatttatcttttaaatatcaataaagaaacaaaagtattttcatcacttatatgtgtgtcatttggttcatgttatcatttacttgtttatttgatttataaattcatccaaacccatatcacatttatattcttgtttattttgtcgtcagcacattggaaagtaatcaagataaagtgattaaatatatattcctagatttatcagtacatagggtttaactgatatgtgaatctacaacatagtttacttgcaccttggataagtgctatgttctttccaggacattggttaaagtaaagcttgggttggatgcatagagtatgcatcggaagggactgatattgaactttgaattagatatgttaaacttaccgt

SEQ ID NO: 407412 - DNA, 754 bp, Cannabis indica
gtgacacgtggacactgacctggcacatacggtcattcacctgcgaagttccacactagtgacgtaaatgtattttttaccgactaaaaaattacgactttagtatttatctgctactcggacataaaacttaaatatttatttcgtacaattactacaaaaataattttaaaaactataaaaaaagaaaggtaaaaaaatatttttcccttttatttttattttcttttaatctccccttatcatcttatcttatttttcatcttcttctattgatggatctaatgagttatttttgactatccatagacggtaatcctaaaatgtgactatcggccttctaaaagccctataattggtccttgctcgtgcttcctctctcatcgctctctctcatcgttaatggggacaaccctaaacaaaacctgaaaaccctccaatcgtcgaaccacatccaaggtcggccctgaaactaattgggccctgagtagtaacaaagttattggggcattttctaaaagaaaatgtgctattttcaaaaaaaaaaaattaaaaaaagtatgtgtattttttatttttttttatttttggcccctagataggtggacctaggccagcgcctagcctgtcttagctcaagcccgaccctaaccacaccctcacctcttattatcttgccactagcagcgttcatggatgccacttcaacaactttaccaccactttcgctaaaaattaagagcaaaaaaaaaaa

SEQ ID NO: 407413 - DNA, 678 bp, Cannabis indica
atattacccccgtatttatgattataactctcaaattgatgtttctatcttgttgtttctttacagcactttcttaactagtggaattgtctcatttcatagtacttcctttttttagtccaaaacctagacaagatattttttccgtataataaatttgtctaaagtttaatatcgtcacagctcagaatatgagtcgagtttaatacatattttctcagtatggagacataaaatacattatatacttcagacaacacaagtgttaaggctagctaataggttacctagcctatttaccctagtaaataggtatccaatatttatctcgtaccacatttattaaggtacctaaccagtggtacatttaattatcacttctaaataaacacctcgttagggaagatattattctaagataatctaacctttattgaatatgctcacagcatgtttctaatattccattgatcttctcaagttacccacctttcaagaataaaacatcatactatttttgctttaatcttcatggttctcaataaccttctataattcttaacatcatagccaaagatatcaaccttggaatttcacaagattagactattatttcgtatgaatttcatatcctcatttattgtataaattgtccatactgataaacagcatattaac

SEQ ID NO: 407414 - DNA, 517 bp, Cannabis indica
tttctttgtgccacctcatttcatctgacgtatgtcgtgacataaaaagtctttgtagacgtggagtaattggaaagtaatgcatttttttcaccggtacattctttttcttctttcctttatgtttgtaccttgaaaatccacaagtagggcattctgtagcatctttatattctttccaaaatagagtacaatcatttttacatacatgaattgtctcataacccaatccaagagtgcgtaacattcgcttagcttcgtaatgagactttggcagcttatgatcagtcggaaaagcttgacaaagtaattcaagtatcatatcgaaacatttgtcactcattttattaagcaccttgatatgcatcattttcaccaaaaatgttaaagaagaaaattgtgaacaccctggatataattctttctctacttcgtcaaataattctttaaaatttgtaggttcattgtaataagtttcctcccctccaatttcatcattttgattagtttcaaaatt

SEQ ID NO: 407415 - DNA, 817 bp, Cannabis indica
caacgttgaatacttcaacatgaattaataatcgactgtttttttaatactcgtgcaatcatgtacattaatttgtatttttctcaatatgggatgtattctaatacaattttagatgtattttaatacaatttcagatgctagtgcctatttttgatttatgaatttcatatctaaatttgttatttgtttttattttcgtttataaaagaatctgatgggttttagtgtctaataaactttttgttttgtttatttctggctttgatgaagatgttgggttttcatctatcgttgatttgcctatttttctcaatctcaccgaaattaatgagtgtttttcgggtgttcggtgctgtcggtcaggttctgtgcgtggggaacgaagatggagtcattgatattgatttagtgtgtctacagcaataaaaaaaaaaaaggctcaaccagtataaaagtaatttttactgtgtgatagtatttttgtaaacaatagtccaatacttagtattttttgttaagttttttttttttttttttttttgaaataatgttatctatcacgatttaattactaagaggatagacatatcaaatattttataaataccaacaaatattttttagtaagtagaactatagccattacattttttttaaaatttttattgagtaatgctaaaagaacactcaaattatacacatttttacaaggagtaagttgaaaaataccatttttattaatcaattaattaaatttacctctaattttatatttaattgaaacatacctctttttatatgtattgtacccaaa

SEQ ID NO: 407416 - DNA, 496 bp, Cannabis indica
gcagaagggatgagaacttgctcgacttaccaaaccctaggaaccccaagaaaacccagatctaaacacacacacacagtattttaggtttaaatgaatagaaaaacaagtaataggaaagaaatcaccagtatttgtttcagagttccaaccccaaaattagggctacgtctctgtcaagctcgtctcagagattagcttgatatccactatgattcaaaggcaaaatacagacttttggagcttcctgtcacaagatctttgatcaggtaaactcagttttagtttgtacaagttttcatttgtttttcttgtgattttcttctcgatctaactctgtttgttgttgttgtgcatgtactcatcccttctgcctcctcaccatgagatctgcattctcgaggttggatcttggagctgaagtcttcaaaactagggttttctcttactttctctctctctgtaatttctgatctgattttctgtgttagatctt

SEQ ID NO: 407417 - DNA, 509 bp, Cannabis indica
tactatgtttggtaagagggatgtatggattgatggagagggatgaaaggagtggaagaaagtgggagaaaggaagagaaaggagaggtggagggatactgttagagaatttttatattgttgatgtgtggaatgataataaaatatataagatgaatatgctacttctttcattgtcaattaatgttgagatgaaacttcattcatcttatcacaaattctaaaatggtatcagagcaaaaaaaaataaacaaaaaaaacctctaacgactatccgactcaaaaaaaaaaaataataaaaaactcgatcaaagtagagcaaaaaaaaaaagaaccaccaataaaaaaaacttacccaagagccaaagtaaaaaaaaaaaaaagaccagttgtgattcgggaataataagccaccaaaaatccaaaatacagatccaaaaagtaaagttaaagacccattatgatgagtgatagtgagccaaaaaagagccgcttatgatcgagatgtc

SEQ ID NO: 407418 - DNA, 620 bp, Cannabis indica
gttacctttatttgtagtaataaatttataaaatatttattactaacttgtaaaattgattggtatataaaattttatttggttctttttatttgagttgaaagtttaattttttttattaaatacattagaaactaactaattacctatttaatatttgctaatatgtttttcaaatactaaaatattcactatagttataaaagtaaaaaaaaaaaagaaataaataattaaataagacatatatgacattaacataacaataacaaaacttctcaaaaaaaattaaaaaaaataataaaaacataaaacaaatagcataataaaagtcaaaaaagaaaaaaaaagaaaacctgacaaagaaattctcaattagaaaaaatatggaaaattgatgtgttgtcagttgagtcaattcattccaaaaagaaaacataaaacttttatttccatatacacgacatagaatgattaaaaatgcccgctattctttcatattaataaagtaaagtgtatttttataaataatttataaaatgcgtatccccaagtaattttctcaataaataattgttattaattgaataagcccagttctaattgggcctaaataaaattac

SEQ ID NO: 407419 - DNA, 716 bp, Cannabis indica
tgataagattttctcggagctctaagggccatgtggggtttggagagacgtggcccctaacttcaccatgttgttcttttcagggcttttgaggctacaaatggtttgttagaagtattttacttctctctgggtcaagtggcagtatcttggggaacattcaagatgagaatgtgaccactagtttcatattttagaatatgtttgatagtattactaactagtttatgtacaactacaagtaatattataaatgataaccaaagaccatttttctttacaaaaaaaaaaaaaagaaaaaccaaagaccacagttcagacacaaaagtttttaacatgtaaaacatttgtgaatgtctctttttaaagggtagaatcaaacaaagtatgtagtttccatcttttttcctatgatctgcttctgctcccattgttatggaaaatgttccaatttttcttgagcaaaatatgtgtttacaaataggacacgtgcaggcagataagtggggcacctcacaagtaaaaaaataaaagtaaaaataaaaatcataacttcaatttttttttttgtaaaagaaaaatcatgactttattaaatgctgtattctgtatccattcataaaaaaaaaactaaaaaagtttcaattgtaaaatacatacaataataataggaatttttacatattgttaaaaattctttattactcattaaatat

SEQ ID NO: 407420 - DNA, 807 bp, Cannabis indica
atactctctctctctctctcccacctcacacctctctctctccaaaagagaatttggtgtttttcccaatctctattacagtgtctcatgagttgagaatacactataattagaaaagtttattcgtcctaccaaatctataagcccactctgatcatgagtattgatgctaatctggaagatctgatgtggattcttcatcaaaccataaagttgtggattgaatgatcaaacaaatatacaaaaagattcatggatcccgtgataggcatcaaaggtaaaattcttattccaagtagttagatttaatttatatcatattgtgttgagattcaaggtttatggttcatatcagattcaactaatttttttttaaaaaactaaatcttatttctctcttccgctgtgactctgatatgaaccctaaaaattaacaaatggtatcagagccatctccacgattacataaattaaacattatgttgggtaatatgcatttatgtatatgttgatatattatgaacaaattatttttttttgtgcatgtaaatcattaattatatagtaaatttgggttaagaattttatattttttattaaaaaaatatgtataccataattttggtaaagaaattttacattgtaatataaattttatttgtaaattttttgttatacaatgtagggtgtacgttgattagtttggttggtttatgctacattttattcaactcaacataaaaattgggttacaaaaatataagtgcaacccgtccaattaaaaaaaaagaacaattaaaaatgctt

SEQ ID NO: 407421 - DNA, 724 bp, Cannabis indica
tctctctctttcggccacccttagaacagctagggtttgggggttttttctgcatttcctgcaagattcttcaaggatttggagtgcttaagttctaggttagcttttaactttgtctctttgagtttcttgaattgtaagtaagtaaaagttgcatgctttgaggttttgcttgatgtagctactgtatgtgtttattgttgtttcctaaagcttaattatgttcagatgaatggattagaacaggttttgtttcatgttagttagatttaaccaagtttgagttttgaactcaaacttggagctctaatggtggattttgattctctgtttgggtggatgttttgttgctttgaaaatgttctctagggtgtatagataaggtctggaaagtttgaattggtttgggattgatttggtcgagttatgaaatttttagtgattcctgcaccgaaccgaaattccggttcagagaggcctataggaaccggaattccagttggcttccaggatttcctcccagaactggaatttcggttggggaaccgatctaccagttggggcagatttgggaaccctggtttttctcattttgtgttgtttagggtattgtcatgttattcatcgatagggaaacttttagtttcaagtttaagtccccgggaagtgatttagcgtatcgcttatcagtattgtgattgatgtaatttaggagcctgtaatt

SEQ ID NO: 407422 - DNA, 742 bp, Cannabis indica
ctatggccggccactattgcatgatttgaccatttatttatcaatttttaatgccaagtaatccaaacttaaacctagaaggattcctataaatagatagcgatggactcaaactaatagcctaagttacactagccttcactcaaaaacagagtcttctatctctctcaaattcgaatccttctctctctatctctctctctttctctcttcaatattagaaccttatagtgatagagtgcatgcccacgcatagcaagttggtactcaatcatagtgtgtaagactgtgaagaatccaatcaattgaaggagaatcaagctcagatcttggtgatactctgctacagaaagaataaaagggatagagatcttagtggaagtagtcatttaattccgctgcaaccaatgcaaggtttcttgaactttatatgtgtttaaaatccattgttttagaaattcatatttaggatgttaaataacatacatggtagtaaatctagatcctggtaaaataatccccaacaccaaatacctccaatctctaccataagtgccaaagaagaatgaaaaaaagcccaaaaaaagcaaaaaataacataacctctggtaagatgaacagaagaaaaccatatcgaagtcctaattgtactactttggtatgatgtccttccaacatggattcatgtagaacatcgtgccaccatatgaacattgtacataagataaatatgatgcccaaa

SEQ ID NO: 407423 - DNA, 548 bp, Cannabis indica
gactagaactcgggctcggagaccgtcgtgtagctagatcgggagcgataccaagagttggacctaaatttgggattcgatcccaaacatagactcagacctagatagggatccggataagaacctgaacttggacccaaacccagattgggattgaaacttgggacaaagatctggtccgagatcttgacccaaacccaaacctagacacgcacccgggacccgaactcggaccttgacccaaacctagatctagactgtgatccagacctagacccaaacccagacctagactcggaccaaaactcataccacgacctagacccaaaatagatcccgaactaagacacagaatccgagtgtgggtcagtgtttcagtccgggtccgagtccctatatagttttgggtttaggtccaagtccttatcttggtcctattcttgggtcccgatccgcttctggtttcagttctagtttcaactcatggggtatgggttaagtccaagcatctagtctcgaatccccagtcttgaggtgggtcttaggtt

SEQ ID NO: 407424 - DNA, 565 bp, Cannabis indica
ggcataagtacccaatgtttgtaaaactgtaattttcttccaattttgtcagtacagactctgttttgaatttattaaaagaacatttagaagtaactgatactatatatttctatctagacccgatgatcaaaaatttaggccttatatgtgccctgtttaagacaatatcagagtctgtactgacaaaattaaagaaaaattatagttttgcaaacattgggtacttatgccgctaaaaataaacattgggtttatgccgcttacaaacataaaactttgggtacttatgccactatttacccattttattataatcacaaatatgtaaaaatttattttatataatgttatattttttatatatttttatttttttttcaaatataaatttatatgcatttgataaaaataattagtagtatttttattatgtttcattaaatctaaaaaagattagaaactcaagtatataagaaaattttaagttgatgttatttattaatattaaataaaatataaattattttttagaaaaaaaaaataagagatttaataattattt

SEQ ID NO: 407425 - DNA, 555 bp, Cannabis indica
ttaggatctatcaccatcgggtcgccctaatcaataaggcctttatgagtttgtaccaccatcatgtatgcctcttgttgtggtattttgcaacacgcaagtatacgtgtggtttgaacaagtattactcacaaagagtgaggtcgatcccacgaggattgtagttaagtacgttaaaattaaactcttacttaaatttggctgaataaaatttaagagaaaatttaaactaggaaacaataagaatagtaaaaatcgtgaagcaagtaaattaataggaaaattaacaattaataaaagttagggctttcaattttaattgtaactactcattatggtctaatatgattatcttcctattaccaatttctatgcaatagcaggtttactaaggaaaaccatatcagctatctaaaccatataagtactctcgtcctatatcgaaattcagttctatttcgctatagcataattgacattcagttctcagacctcgtatcaaaatcataaaatattaattgatgaccaggcaattaaaagtaattaagtacaaat

SEQ ID NO: 407426 - DNA, 521 bp, Cannabis indica
ttaccactttaatatgtaaatctcttaatttattttctaatcagggtttaagctgtccaatatataatgacccttaactcaaccctaaaactctaagtcattctatgtctcatttaagcttaagccatcaagctctaactttgatagcattctctctctcacacgcccactaacacttgagatttaccatctttgatccctactttgtaatcttaagagagctagatcaaatttcacctatagtgagttgtacatcggtcggtttgggcagtttatcctatatattttctaacccaatctaaagttctgattgctaaaatttaagtgcaacccgtccaatttaaaataaaattataaaccgaccaacaatttgggcggtttggtcgggttaaaacccccaaaaaccccaaaaacttcttttggtttcaaagtcaaagtcaataaaaattaaaaagataaattaaaaatattagatttcacaaaaacacaacacaatatatatatgactttaaaactaacaa

SEQ ID NO: 407427 - DNA, 251 bp, Cannabis indica
tagttatttcaccaccgactctagtccgctatatatagcagtcattttgccattgtaatctaattttcccaatcaataaagttcaatttctctctgctcttcaaagctaatataaacgcagcaaagtatgtagaggaaaagctacactttagtcccaagcatcgaaatgctcaaccagtggccgaatcacgttggggtgcccaggtgatacccaacgcacaagtgagcatcttgctgttgggttttatgcc

SEQ ID NO: 407428 - DNA, 755 bp, Cannabis indica
tatttaattttgggataattgcgacatatattaagtactaaaaattttgagtttataaccgtcataattctaatgatttttttagcagcatagtattaatttagtaaaattgtaatttaatatagaccctagtttgaaatttattaaaaaaaataaaattaattaataatacatgtttctatagacatctaaatgtactgtttaaaatattaacagtcttactgaatgatgacataattaattataattatttatctttttatatatattttttttaatattgtcctaaacttgctaataatagtgttacatatttattagcaacatcatctttagtgacctaaaccctagctaattcatcttatatttgttgatgcatgcactcattaagtgaatatgaatagtttacaagtcaaaggaattacctaacaaaaagctgcatgagcactcgagattcatttctttcttgtcttaaaaattcaatgcaaccacatctaataaagctgcctcttcttataattattatcttgtgatcaaaataaataagaaaaacatcgtcacacagacattacaaatttttatgtgctcacatttattcgaattatacatacataataaaaggattatatatataattgggtgtttctataatgtatctttttaaaaagatatgctgattcatttaattatctgttttagcatctagaaaaattttttagccatttttttttcttaattatgtacgttatagttat

SEQ ID NO: 407429 - DNA, 529 bp, Cannabis indica
atatatatatatatatagtacagaatatatgtcattatagtttacttattcacacctgtcccgttttacttgccaagttttccattatcatcaaataagatcccatatgcatatagccttttaaacaattaaaagtcacatcttagagccacaattaagactttatttaaaagaaacatcaaagaatgaacatgaatcctgaaagtcctaatttctacgaaagctaattgatagatcttaacatattgttactatgaattgaaacagaaatcataatcaaagaacacaaaatttacaagcttcctctgcattggaaacgcattccaaccgagtagtgcttgggttcccttgaaccgggtaaagtaacatccactataaaatcaaatcaattacaaacaccagttctgattttacaaatcaaacaaagtaatctgaaatgacttttacacaatgttacctaacacttgaacacactcaacttttgagatctaaactcatttagatctaagaacacaagaacaccttgcat

SEQ ID NO: 407430 - DNA, 706 bp, Cannabis indica
ttcaactaggtcttacttttccaagtaagatctagcttactaaatgttaaatctggccaaaaattaacattcaatcaacatttcatcacattcaattgaacaaagataggatcacttcaatcattgtaaattaaagcactagttcatacaaagggtttataaccacccaaatctcaaagatcttagttcatatctaaaattaaaaacttaaaaccagaaaataatatgttcatggagctaaagagaacaacaaagagtagaaaatgatacaaaatggaagagaagagcaagagaaatgacttggtgagctcaaatcttctcttttgaggttgccttcttctccttcttcttagtcttcgtcttctattctttgtactctcttcctttccttttttttttttactgtacttcctctgaattttcgtactgcccccttccttcaagtgcagccaccattcattgttcctctcttttcttggctgccccccatttagggtactaaagtttactctaattggaaatccaagtcattgtccacttgcctttctttttccacatattggctgagtcattgtacacatttttgccacataagcatcctttattcttcattaacgccaactgaaatttctgccacaatacacttactgggctggccaattgctacgcgataactgctatagcaatgacagtcagcaacaagcct

SEQ ID NO: 407431 - DNA, 787 bp, Cannabis indica
cctcccgtagaatcttcttcaaggcctccacctcagcactgccccctgtactcgtcaagggcgtagttgtgttttggccactcagaggttctgcctctcctcgtctgcaggaactggagtcaacactatgtcgtgcggcacagtgaattcctccgcctcggaaggaatccctgagtcattgctaggcaccggagtgtcccccctccgggtccatttagaaggctctgccaccaccatcttgccgtttcgcttgcgctcaaaggcggtcgggtcctccgcttcaccttcttcaacttcctcctcctcgtccaccaagacgatggtgcctgaaagagcattggaggaggacctcccgggagtaactaactgggaggcagccggaggtggagaagcatcaggactgtaagcctcggcaagagtagccaagagatcgtccataggcctggctgctgcaacaagaaaataagttaagtgttaggacattcatgagaacagtatacacttagcaaaaaaaacaataaaacttgtcctaccctgactctctaattcggccctagcaaagtcctgaatcatagcactggcttcatcatcaccgagaaagctgtccgagggaagaaaccagctggaagataaatgagctgaatgatccaaaggaataggcgccggaggtccagaacgcatccgggaccgacctaaataatggcctaagtgggaaaagtaatactccttggcatgattcccccaccgagtagaaggcattctaaacctacggagacgctcatcgaat

SEQ ID NO: 407432 - DNA, 605 bp, Cannabis indica
aatgtggggtaattcaagatggctgacttcctgagaagtgttccatataagtggaccaatgagcacaaagtgcattagaaagactcatgttggtctgcagggttagtcgttattctatgaagtagccaagagtgatgtacccatgtataagagtcaatagtctttgggcaaaggtcaatggagtcttcaagtggggacgttataagtaatctgttggattctattgcattgcattaatattctttattacatactatattttgtattgacttgtactaatagcttttttaaaattatattatctttatcataaactcgatcccaactccgacccctatcctagtttggagtccagggatgggatctggggttcaggtccaggtcggggttcgtgtttggggttggagcttgggtcttgggtcgagatttgaagcgggggccagttctggggtctgaggtcgggcttggtcttgggccgtggtcctcaacccttgtcaaaagtgtggttgacgaggacgtcagactccccaaaggaggtgattatttaagttagagtctcgtgatttgcaaggggaaagattgagagttgtacaattctacatcgc

SEQ ID NO: 407433 - DNA, 648 bp, Cannabis indica
ttcctttttttttttgttgtactcttctttaatttcaatcaatgaaagtttagttcattgtaaaaaaaaaaaaaaaatcaaagagttctccacgtaccctatttttttcgaaaatatattattatttcagttcttaaaatgttgattaaatgcaaatgataacaaaatagtatattattcacatggtaataagcttcaatcatttttttttaacaacttgaagcttcattaagaaagaaacaataagtacaaagcttttaaggtctataaagaatgtaaaaaaaaccattgcaaagtaactcatatctaattctagaccaaacttagcaaaatcatgagaaaatgtattacttatcgtgttaattttaacgtgaaatcaactactaaactgtatagtaatataccatatcatatggcgctaatgctcatcttcttaattaaggtcctaccaactttggatttttgtaataatatccatgctcaagtgtattctcttttacgtaatcccaatttatttaaaagtaatttccaataccaatttaaagtatggtatcgacattagtataattcaatattaaatatcagatattttttttttgaataaaaaaatagatttattaattaataaattcgttcaaaacaatagaa

SEQ ID NO: 407434 - DNA, 521 bp, Cannabis indica
ttccaagcctgttcaaggttgttctagatcggatgagatggaggctaaggcgctatttcatagactcaattgggtgatgcaaatgccactttcactttcacatatcgaaacagatgcattgcgagtttctttggccctaaattcttcatcacgaaaccattcaagttttaatgatttaattgtagatattagctgtcttttatcctttttctcaggagtaactatttctcatgttaagagaaatgctaaccaagctgcacatggtttagctaagtatgctctcgagttggatgaagatgtctgttggatgggtgaaatcccaaatcctattttctctgttattgtaaacgattgccagttttaataacagtgaaatttctcaaaaaaaaaaaaatcatttgcttacattttcaattttgtaataaatattcatttataattttctattttatttattaaacttaaaaattacaatctttttaaagttcatcacttacttactttttaaaattaaacaataa

SEQ ID NO: 407435 - DNA, 517 bp, Cannabis indica
gttaaaatttgtaaatttccatttataaataactttatattttattttaaatgagacatatttttttacagttttaaaaatccaccactgtataatacatagattactataaatttctaaaaaaaaaaaaaaataaatagaatacacaaatcaaacatgactaatatactatatttatacaattataataattctatctacataaatatatatataaatactacaatataggggttttttacacaacatactgaaattttcaacttttttacttttttactgtgggacgttttttcgttcttcaaaaatacagtgtacttgttaagttttcactattgttgattgttttttagttgttctactgttgttttaattattttgttttattgttttataaaaagacattatttttgtaaaaaattctacatgacagtaaaattataaacttttacccaaaatacagttttttttgtaaataatctttgatgaatttgcctaccaagccaaatgttaaaaa

SEQ ID NO: 407436 - DNA, 545 bp, Cannabis indica
aattatttgttttttttttttgttctttttcatatcagtagccaaataaaaaaaaagaaaaattaaattggcctccatttatcaaagtcaatgttagatataagttagttattttattgattacccacaattattatgataatcggagcactatatattattagatttagatattagaaagcttagatatataatgctggtgtgaccttggggcagtagataatttaaatttatttatataacaaagcataaaaaggtataaaagaattattattatggtggtggacccacatctacatctgacaagaaatgaaatgctcatggaagataaacaaattaaaagaaatatgaaaactcattagttttttcacaaacagctaattttaaataataatcactacactataggactttgttcccttttactctcaacttttagagatgagagaaaaaaaaagttatggaatgattgaaaaatatatataaaaaatagggtaggtataagagattaagagcttctatcatccctatatggaatgcaatta

SEQ ID NO: 407437 - DNA, 524 bp, Cannabis indica
tggatataaagaatcgttatacactagaatttctattcaagaatatacttggaaccaagcaaattatattttaattattaggttataactaaatagagttacactaaaaaaaataataattaaaatactaaaaaatatcaatataacaataataacaataaataattattaatactttattataatagaattattttagagtaaatataatgttaatacatatattacaatttggaataaaatttattaattttatgtaaataaatttacaaaatatatgtatatattttattaagatgtaattattcttatatagatgtataatttgttaatacgggacttagaaaatgtataactaattacaatttagaggttattcttatttataactggcccaaattggaacttgatttttttgtaacaaattagaagttattcttgaagagtattcttaaataaaagttctactgcaatataatttatacatataaaaaaaaattaagcaaacaaacatatatatatat

SEQ ID NO: 407438 - DNA, 551 bp, Cannabis indica
gttggcattgttctcagtgtctcaattgtcgagttggaaatgggggtttatatggttgagacagttggacaagtttacaaccgaatgctgagttgtcaagaataacagttaattctgttattactgttcaaagtggttaaaacactaacaattccaccttgttttgatcactttgataaggaagacaagattgaactcagcagaggtttgaggcttgagaatacaagtgttcagtagccattaacatttagcaggtttagacaatgtctgaactttgcttgagtgacacacttggttagcatgtcagcagggttgtgtgcagtattgattttcttcatggtcacttcttttcttgctacaacatccctgataaaatgaagtttgatgtctatgtgtttggatctctcatggaacatggggtttctcattaggtgcagagcactctggttgtcacagtacacagtgacatcatctgtgttgaaccccagttctttggtgagtcctttgagccaaatggcttccttgacagcctcagttgctgccatatactc

SEQ ID NO: 407439 - DNA, 785 bp, Cannabis indica
agatgagtctgctgttgccccatttgcggcatcacaggatcctcgtcttcgcccatcagcatttattcccagcaccttagaggctcgcgaaccagtataccttgccattttggcaaggttggagactgtggagagggagcaaattgctttgagggaagggcagaccactctgctaagaatacagacagcgattatggatcagttgaagaccataatgagactcttgcaagatcctggaaggccgacaccaaatacacagtcacaaccacagccacaaccacaaccgaaagaagaggctcattcaccggaaaataaattattctcccaaatgattatagaccggatgatgatgatatgttgtgtacacctgagaacacgaatatcaccagcatcggggatacttaggattctgaggtacaggtgttagagacagctccagaactagtggagaactggaggaagagaaagcggcctaggtggtttgatgagtacaatgaaatgaagaagaagtccagagaatcgaagacacttgtgaatgtggacccacttagagtcgttgatcaaaagctgctcacgacttttcacagttgggttctcagctagattgggaacaagtactcgagagagtgtttctttgatagacacgatttagcttggttccttgaactacatactccaaagacatggcttggagacaatgtaagtttttaagacttttttacgtctttggttttgaaagactttatctaaccttttttttatttaatctctgacatatttaattt

SEQ ID NO: 407440 - DNA, 829 bp, Cannabis indica
ctgaggtttcagcaaccaataatataatataagatgagagaactgtaagaaattaagagaaggtattttacgtggttgggcgttaatgagccttagtccacgagtctgtgtatttatgagtgtattaaatacagagaatgttcttggtgagtatttactcttcttgcacttatgcaacccaaaattctcgaccccatttaatgagctttgagggggtatttatagtgtttttggtggggtgattcccaggattatagtacatgtatttctgtaactatccataaagttgggtattcccaatgaatataccatgggtaatgcatggtcaaatccctaggtgctgtagggcttttatgtggaatgtccttattgccttttgactgacgtgactcttcgcagtgtagccgtcaatagacttaagtgatcatagcttcgtaggtgcagattgggggttgtgtcgtcagactttattgcgtgtggcagtcccaacacgtttcctcccatgcggcattaaatgcgagatgactgctcaggggaagcctgacacctcgcggagatgctttgatgttacttaggcctccgggagcataggggcttccgtatgccttctccgggaggcaggtcccggatgctgcctttcttcataaagacttagcaattaatttgaatgttaagatcttttggtccacgtgtccctgtccggttggtccacgtatattgggcaaaatcaggggcaacagacctaatcaaaatcttaagaaaagctagaactgttaaccatggttttttagctattcgaagtgattaggggtggaccatcccatagtca

SEQ ID NO: 407441 - DNA, 893 bp, Cannabis indica
gaagagtgggggtgtcgctttttgtggaaggaggaggaggatgttcaagtgttggagtatggggtgtcttatattgatgtagtggtttgtggaagtgagcaaggacattggcggttgacgggattatatggtgagccgaatagaactctacgaaaaagaacttgggatcttataagggagctgaaaaataagtcaagtttgccttggtgtattataggtgatcttaataatgttacttcccaagaggacaagaaaggtggtaatccttatccgaggtggttagtggatggtttcaatgatactttggtggattgtggtttacatgatcttgagttgtatggctacccgtacacttgggagcatagtcgaggcacggcggattgggtggaggttcgtattgatcgtgcgttggtgaatcaatcttggttagacttctttcctttggccaaactttttaatttagaggtgtctacttcagatcatactcctttgaatttggttttggttaatgaagtggtggttgctaagagtcatgttttttggtttgaaaactcttggttgaaagagcctttattttttgaaattgtcaagagttgttggaatagtgctgaactgaatggtataatggataaaataaagagttgtggtgatgtgctttggcattggggaaaggactactctgggaactttcctaaaagaataaaagagtgtaagttggaagttcaaagatggaagaggggccgtgatggggtgtccattgagaactataaaaatgcttctgctaatttgaatagagtgttgctacagcgtgagattttttagaagcagagaagcaagcaactttggttgcgtgaaggggatagtaattctaaatattttcatgcttcggctac

SEQ ID NO: 407442 - DNA, 564 bp, Cannabis indica
tacttcactaaatggacagaagcagagccgctggcaaccatcacatctaagaagtgcaagacttcattgtgaaaaatataatttgtcggttcggactaccgtaaaagatagtctcggacaatggcaaacaatttgacagtaaatccttcattgatttctgtgcaaaccatgggatcataaaatgtttctccacagtggcacatccccaagaaaatggccaagtcgaagcagtcatcaagacactcaaagatactctaaagaaacgacttgaagatgctaaaagaaactggccggaagaactccctaaagtattatggtcgtaccgcacaattgagaaaacagcgaccggacagactccattttccatgacatatggttatgaagccatgatacccgtagaacttgaaccttcgtcccatagaagatggagatatgaccaagaagttaatcatgcactcctcgtagaatcacttgatgaaattaaagaaaagcgaaccgcagcaaacttgaaattggtagcccatcaacaaaaggtagctccgtactttaacaagcaagtgaaag

SEQ ID NO: 407443 - DNA, 644 bp, Cannabis indica
tttttttttttttttttttattttttatattttttactgtactaattttataaaaatattgtgtttaaaagtttcaaaattataaaaaatattaattttcagtaaaataaataataaaaaaaaaacaaatcaaaaacaaccttagaacaatcctataataacaaacaacatgaaaaattttaaaacaacaaaaatataactacaaagcaaatagaaaaaatacaaaatattaacctaattgcaataagcaaaataatatcaactcctcaatatgtttttgtaatacaatttttttacttagttttaacaatttaatttatctttttgtactattaaattattttttaataaaatttgttatcacaactttgttcttttaattttatgttttctttttgaattagtaataattaaaaaataattataaattgaaaaacaatataaaaataagtttttttaaagcctgctaaagacatgccacgagtaccaagcatcaacatcagtaaatacaaatgcattaattttctatttttttttgaaggaaaatggtaactttattaataagaagattgaaccattacaatagaaagaaaatcagcaggaacatcatcctcactaaaaatacgatctggatacaaacaaga

SEQ ID NO: 407444 - DNA, 562 bp, Cannabis indica
aattctaaattagattatgtcttttatttatgaatttttactatggaagggactaattgagaataaagaggtttgtatggtttatttattaattgagagactttgtaaggtccaattaataaataaattaaatgaaaattttatttgataattatttataattattaaataaatagatttgacatttaaatatttaaagttaaaatatgccatttatgaaagaaaatataagttgttgaaataaaatagtaaaactgtaactagtggggtccacaatagagggccaaccacttaagtgattttaagccatttttttatcttatttaattacatataatttaaacctaaccctagatgaaaaacctataaatagaacatgacagactcataacctgataactcatcattagtctattttgtcagaaaatagaaaagagaggctcctctcttaatttttgagttctcttcttcttcatcatcaaaatttggtccctatagttttagagtacatgatcactcatatcaagtcaagtacttaatcatagtgtggaagattgtgaag

SEQ ID NO: 407445 - DNA, 568 bp, Cannabis indica
ccacaaatttaaaatgatatacctccattgattattatttttacttatttcttaattaatataccttatcacaaaataaatatataccatagtgcaacataaatataccaaacttaaatcatcataaattttttgatctaaatattcatttttatacctgcatcttaacattttcctatgctttttgttcctccacaattattgtttggtcctaacaatgaaagctagcaattcttgtaatttttaatatttaataaaaggctaattagtaattttttcccccgaactttgatatatactaaatcatgccccctgaacttttttggccgttaaaaattccccctaaactattgagattgttaaatttaaggacttttgtatgacttctgtacgcttttttttttgtttttgttgccatttattatggtttgttcctacttgtttagggtagttttgtggtatggtcaatgggcagggaaattaataacaacaaattaacaacagtacaacgtaaaaaaattatattatttgtaaataaaataaaaaaaataataaaattatttaaaat

SEQ ID NO: 407446 - DNA, 761 bp, Cannabis indica
gagagagagagaaaggaaaagaagaggtccttagtttgagaacttattttactaggatctagagttactaatatgtacatgtttgaaatattttaccaggatctagatttactaacaagtatgttgaattagcatcctaaatatgaatatctctaaaacaatgaaagtaaacacacaagagtttagaaaaccttacattgattgtagcagaatattatgactctttccgcttagatctctaacccttgttcctttctgtcgttgactattatcaagatctgagcctggatctctttctctcttttgggtttggttaccaccgccttacccactatgattgagtacacgacttgctatgtgtgggcatggcactctatcactataggccgactatgaagaataatgaaggaggctttaaaactgtatagaaggtgtctctcatctaatagttgtctgacatagaaaactaggtttggtaggttgaaaagtcaatagttcaactaaatagtagggtgaaatgagagcatcatgttccttatatagtgttataactaggtttaggtttgaattatatggattaaaaaagaataaaatattgagcaaaaatcactagaatggccgaccacttaatggaccactttctagttataattttgtcactttattttaaccacttattcttctttcaataatactatattttccaatttaatcttataaatgtcaaaactatttatttaataattataattatttatcaa

SEQ ID NO: 407447 - DNA, 742 bp, Cannabis indica
ttctgagactgtgtaggtatgagactgcacagttgaagagagcttaaatggattgattggtactacctatatcaacaaggtgcatcttgtttttcggtagcccatcacgaaagaactccatagttaagcgtgcttagcctggagcaatttcaggatgggtaagcgtgcgagtgaggacaaagcatgctggaaacactcgtgttggtctgtagggtcagtcatcagtccaggaagcagccagagtggcgtacccgtgtataaaagctattagtccgtgggtgtaaggacccaatagaggcttgaaggtggggacgttactaatttaatttttaactatgttatgtaatgtaaagaaaaaaaaaaaaaaaaaagaaacgcaccccctcacttataaaaaaaaaatgtcaccccttaacttaaatcttaggtccgccactgcctgtcgccaatattttattatattaagttagttaaataagacatgaaaataatgctaaatagatcataaaattttcataaacatgttaaactagttataaatatattactagatgtataagttaacaaaaatatgaaactctttataatcgggtaagatcaacttatttataaatgagttggtttgagtgttaatttttcacgattaataaataagttaggtttaaattcagagcattgctattaggtactagtggtgtctagtacttttgcggcatgtcgcattgtgattggctagcgatac

SEQ ID NO: 407448 - DNA, 1009 bp, Cannabis indica
tttttgatataaaaaaactaaaaaaaaaaatcagtatcatataaagaactgtgccaccattttatactattaatttatatgtaagctttatttttattgattgcttttcaattgtgtgttcttgctgttttaatttgagtttgcatccaaagttaaattaggtcatgtagccaattcccacttgatatctttaacaatactggtctacagactgtattttctttcattatatgcaataatacataagatatatcaagtcatcattaatcactaaaaataatgtcatatatataaattgaaaaagcacgaatacgaaaaacagagcaagaaaaattaaaatgaattcttacacgttttacttaaaaaaaacaaatcatgtattgcttccataaaattggctaaatagctaacaatgaacaaatgaataacctttagaagatttgtcgtgtggtggcagtttcagttgtaggaaaccgaatcgtgatggcggtgacggtggcgatggcagtacaaacttagtttggagaaatattattacgtttttttttctttaaaaaaaaataataattaatttggtctcttaatctaatttgcactttagttttacttgtctctgggcagagttctaaagcttcaaaccagatgtaagagagagaacgattgaaggggagagataactaatatttaatttttaatactattttttataaaaaaaataatatttttaaataatattaaaaataatctagtacatgagtaaacatttagtattaatacaccctaccgttttataaccaatagatttattatcaagggctcttaaaagttccccacctgtaaggtaaagatatggtgtcgtaccatagtcattccctatatatatatatatacatctcatacccttataaccctaaggggttactcactaatagggcttaagtggtccttttatagtatactataatttaatgggccaattataatataaagggtgctctcatgtgcatct

SEQ ID NO: 407449 - DNA, 746 bp, Cannabis indica
aatccaaatagtcaaagatcctctatagatgattaacatcgagtagggataaatttaccgttctacccttcaatgtattttatccttaagacacttagctacctatgaatgatatttcaattaactaatataattactcaaatgaggcctcaatcatttatctatattaagccaagctcgaaggaaatcatcgtttaacttctaaatacttatagaagctataaattccatatctatgattagcgctcccactcaattatactaccatgtttccaagctgtaagtattgggctgatgtattggtcagctttaaacgaacaactctaagaacataaataacatagttgagatcgaacctaaccatatcgggattaagatctattgacctaagatcaattaactgatattgacttagatagatataacaataagtttatgatatcttttccaagttcaatatcagtcaagttcgatgtatactccatacatccgatcctagcatactttgccaataccttggaaaggacataacacttattaaaggtgtaagtaaactttatcgctgattatcatgttagtctagtgtactgacaaatcatgggacataaactttgaaacatataatcatgattatattccactgtgttgacaacactataatcatgaataactatatgttccagatttaatagaatttatacattaaccatataatcatgaaataaatgatgtgaaccatgcaacat

SEQ ID NO: 407450 - DNA, 631 bp, Cannabis indica
tatgtaattactaattattttgctaaacaagacaataaaaattaatatgaaattatcacttttacatcgaaatacataatttattttaaaatataatataattattagaatgtataattaggaaattaatatcatagtaattatacaattatatctaaacactaataattttttcgtcctaactctgcccctgaatgtgtcttaagtatagttttggttatttttgagttgtgttttttaaatatttttaatgagcttagtttcagttagtctaattttacattttaatttgtttgtgttttcaagttttgtggataaagaagaattagagtaaatgaagaaaaaatagtttaaaatagaagaaaaatataaactttaatgttggtgtgcaaaaagtggtgtcttcaaaagttttgttaagtcttggcagatttttgaagataaaactaaagatttaaaaaatattgagttagcgccatgacatagaaagttaatgttgcggcgctaaactagaaaaaattgattgagagcaatgcaatattgaaagctaagaggtgcactaggggtgttcattggatcacatccaatgtttttaggcctatccagatccgatccaatcatatattggatg

SEQ ID NO: 407451 - DNA, 692 bp, Cannabis indica
ttattaccttgaaatcagtttcatgttagaattctcttatgaaagccatgtctttattttagaccaattacttgacttgatatatatctatataaaaaagagtaaaatgaacaaggcatgcagaatcttgtgttgagtatagtaaaagtaaggttaaatattttatatatatgaaacaaggaaagcatttcacaaaatttacaccttttgtttctttattttttaacaatgactgatcaacaaactaaaaaacaagggttgttcatatatatcctggaccatttttcagtatatttatatatatatatatattttatatttatatatatatatatgcatttaggtctcattaaagaaaggcatgtagagacaacatgtactccaattggtctgatctctttttacataataaataaataaataaataaataagctcaaaaatgaattaataataacagaaaatttatttcacgatcgaccatttgaatttttcatgaacagctaaaacctataataattaataaataaatatcttcatgtagaaattacaaaaacaaagccagctattatttagctgccttatatatatagctatattatatatatatatatatagatataaggtaatttatttaaatagataacttaatcatcactgtttttccaccttattatatgttattttcttcttc

SEQ ID NO: 407452 - DNA, 878 bp, Cannabis indica
ttttcttctaagtccgtggtggtgaggaaagggaaatctgctgctaccggcctgaacgagctaataaggaggatgagctcattcaacttaagcgtgaagctaagttgaagggaggtgcccgggcaaagcagtatgctcaggagtctatgaatcctgaagatgaagctaaggctgaggctgaggctgagcaggtgactcctttgaagaggaagaagaaactcccggccacgcccaggcctgttgaacatgcccttcgcataagggagcccatttcacctgttcggccatctcatccctatgctggaaaagggaaggctgttatggctgagatatcaggtgatgatggacttctgactttctgggcgggcagtcactctgcgctttacttctttttcagcttcttgactttcatgctttgtattttctgctggtttttgctaaccacgctgtttttgttctgtgcagacatgtctcggcagatgatcgacgctttaaggaagaggatgagcggaagctctagcgcctcccctccggccaagaagtctaagggcggagaggggtcttcagagaagaggccttctagagaggttattgacctttccgaggagctgactgctgcgaatccttccactcccaaatctgccaagtctaaggagtctgggccaccaacaactgggtccgaactggtcaggaggatccctgagcgggtgcaggcaccaactccacccgtgcccgtgctgcctgaggccaagaagggcaaggaggtgctggctcactacatgaaccagctggttcctgaggtcggtgagcaactggctggtgctgcgactcatctctggatgtgttggtgggcgaagtcttgaaggagctcaccaggg

SEQ ID NO: 407453 - DNA, 335 bp, Cannabis indica
tatatattaaaagtgcctatctaacctttttttttggtttaacagaatatattttaaaaataaaagaatattctgttaaatttaacgattaggtttgatctccgttaacaaataaaccttgggagaatattaataattttttttatttattttttaaaaaagaaaaatatagataaaatgtctagaaaagataatataaatgtgagactgtatatgagttgccccttctgtaattacctagaaaagataaaatgtatagataaatatatatatatatatgtgagactctataggtaagagaattaaattaaaaaataatataaataattacagaa

SEQ ID NO: 407454 - DNA, 718 bp, Cannabis indica
aattaagagacaaaatgagaaaataataataaaaagaagatcaagagataatcatacaaattaatcttttttggagagattgagaaaacaaagcttcaccaatcaaaaccttcctatttcagagagagccaagcaagtggatcggagggcagtgactttgaaagctgggcaattcgtaggtgtagagacagagataaattaggcaaaatgttttttttcctttcataagaagaagagtttattaacgtaaaactaattaaatgtgaaatgaaagaagctaaataatttattttttaatggaagttatgagaatgaaaagtcactaatttttttttaattaaataatactaaaaattaacaaaaatctaaataatgtaaaaaaaataagagaatagaaaaatagaaggaaagctcatacaacatgccatgtcatctaccctaacaacacaattatataaatatatagatattgtttagaagcttttcctataaaaatatttgattttcacaaaccacttttgaaaaactaaagaaagttatcgttttaaaataattaacatataaaatgaggtgtttatctacataataacactaataaaatttatgactttaagttgtttatatagcacatatatacatatatgatatatactaggtgaatgtattgctagtttcatttaagattttggctttgaatgtattttatttttaaagatta

SEQ ID NO: 407455 - DNA, 456 bp, Cannabis indica
aaaaaaaaaaagaaaaaatgatgagaataacccatacaaccattaatgcaaaataaccattctattttttgttttttattatttgtttgtttttattttgaatggtgtacctttttcatccactctttctataccaaactttttcactctttcttctaccaaactttcttctgtttctcaaataaaattatgtactcttcagtagtcacattcttgttttcatgaaaaatagctagttgtgataataattaaaatcgtattattgttgtgtgctcaaccccattgatacttattattttcattaaaaataataaagattatacatatatagatatttttttagtagggtattagcatgaatagttactaaataaatttaactataaatattaatttaaaaatattaaattatcaaattttgatctaataacgaataataaaagaaaaatttaaatt

SEQ ID NO: 407456 - DNA, 518 bp, Cannabis indica
atatctctatgttacacatggaagatggtctacagtctacacaattttgtttctatttattcagtacatttttttttttggacaagcaattaaattgagataaaaatgaagagataaggagctttattaaatttattgtttttaaatgctatatcaattatcataatcggtggataatctccgcagattgaggatttttatttgatgggcaattccattccattatcggtaagaattgagaagtttctcatttccttttattaagtttgggaatcgaaggagataatctccttagattaaggtaatttttaactacctaaagcatttgttttctaattttttttttcatatttatacggtattttataaaaattaaaataacacaaaaataacaaaaaaaaaaaagaaaaagaattacataaagtaatagggaaataacaacatccaaataactacaaaatataacatgtataaataacaaaaaattaacaagactataaaatacattaaaaaatcgt

SEQ ID NO: 407457 - DNA, 622 bp, Cannabis indica
tgtgtttgggttacgggtcagaacccgaaaataaataaccaacttttgatacccgaacccgaaaccagtgtggggtatttttgggttggacccgacccaaccacacgggttttcaattttttggtttttttagcagcaggtcagggcgggtggtcggatattccaggtccacgagtctaaatgttcaaccctaaaaacgcccatttttacgagggtctactaggtatttttaaagttattttcgttattgtatttgaattttaaattgtttccttaccataaaccaaagagaaaaatcgtttgcaattcaatcgattctatggcaaacaactttttattactaaccttaaaaacattattttcattactaaccctaaaaaaattattagtaatttctaatagggtaaataccattttggaccctctgttttacaaaagttaccaattggaccctgtgttttgttaaatgacaaaatggactctgtattttttaaaatagtacaaataggaccctgaattaattttttatcaaaataaagtttaattataatccgatctaaaagtgctatgataaaactgtttacattttttgcatctgttcgtattaagcattgtcttcaag

SEQ ID NO: 407458 - DNA, 742 bp, Cannabis indica
tattaaaattcacaaataaataatgctacatatctcaatatacatataatatatatactttaatatatatatcatataaacataatatatattaattacacaactatatatgttacatatctcacacatatatataacatatatacactttaatatacatgcatgatatatattatatacatgtctcatataaatacatagaaataatgtatttctacatatttaatctcgcaatatatatatgtatattatattatatcttatcatatatataatacacataactcatattcatgctatatattatatatctcatatatatacatataataacatgatataaattcaaatatcatattatatactactatatatattaatatgatacaaacacataatcacatatatgtcacatatatataactcatatatatcatatatattactatcatataaaatagtaaatcacattatataccaccatgctcacccatgaatggttttcacataaaatctcttatccttgtattctcacaatcttgatttatcacctcttccattgaaaaggaataagcttttgattgttagagattttataacaatggaagaaaatcaagatttattacaactctattgtaaaataatacaaggactaaaataagagattgattaaatatatgttacaatacatatatatacactatatattatatatatgaaaggtagaagagaagattacaac

SEQ ID NO: 407459 - DNA, 788 bp, Cannabis indica
aattaattcagaatttgctataaaattggtatttgtaatgtagctaattaaatgcaataggcaaaatatgaatatagggggtgtattattcatatatacttatggcatgtttactaataagtaatgagaatcaatagtaaggtaattatttccttacattttgtttactttgcattattattattattattttttttttttgaatgtgaatggataattttattgaatcaaatctgcaatcacaatagatttttacgatcagaccaaaaacaagagccgcgagccaaacaatgggcggccttgttagcagatcgcttaacatgagaaacaaatacattagataaagaagacagtaaaactttgtagtcttttacaacaattccaaacattgaaggcatatcaacttgactttgcaaagcttggacagcagtgaggcaatccgactctatgacagcattagacaaattaaaattaaggaagggagaagattaaataagggagaaaagaaagggagaacttctcccaccaattttgtaaggaatgccattaagggtaatgtatttttattatttttattttattttttaatattaaatatataatgacaattttgtcctttaaaatatgtcttgcaaaataactaccatataatatagtttaactcaaaagggcaatttagtcaatttaagcattccgattacgttttctaataaagtaaacaagataaatcacaactattcaatttctaaaaaaatttagtaaacaacatattacaaatattgattccg

SEQ ID NO: 407460 - DNA, 523 bp, Cannabis indica
ttacttggtaaattctagttcgacttgttggaagcttggttgtataggcccatggtccccatactagttgagaccatactgcttctaagactcagataattgattttaattaatcaattatataattctaaaattagactatgtctagtttatgaattttcactaagcaagggcttaattgtgaagaaaagtgattctaggtcttatttattaattaagagactttattatgtctaattaataaatatattaaatggctaatttttttgatacttaattttaattattaaataattagttttggcatttaaattaggaatggcaaatggggcgggtctgtcccgccccgccccgacaagctattgccccaccccaccccgccccgattatcttaaaaaattaattgggtctgacccgacccgacccaactgggtcgggtttgaccccgacttttttttttttttttgcaaatttactttttcaaatctctgtcttttattttataagtgacttttatatagaa

SEQ ID NO: 407461 - DNA, 616 bp, Cannabis indica
aagattgatgtacaatgaagaagctaaacacgtactcttggccgaatcacttgatgaaatcaaagagaagcgaaccacagcaaatttaaagtatatagcccatcaacaaaaagtagctcggtatttcaataaacaagtgaaggctcagaaattctttgtgtgtgatatggtcctaagaagagtatttctaaacaccaaagacagcacgataggtgtactcgtacctaactgggaaggaccatatcaggtggtcgaaattctcgaatcaggagcatacaagttgggtaagtatgatgaaaaaatgcaacttgttctagtaccacggtattggaatggggaacatttaagaaaatacttccaataaagtaccaggttggatgaccacattaagtactaaaagaacatttacttttaagtgaatggcctgctgggcggatcacgcccaaaggttcggacaaaattgaaaggtactcaggtcggatgaccatcatttaaagtacaatttctaatttctgcaatttgttttatttcatgttaagctaaaagaccggattagatcaaatagcttagatgtaagttactgtggtaacaaacacattttcaatcaataaatgaa

SEQ ID NO: 407462 - DNA, 549 bp, Cannabis indica
aattatttatattatataatataagtttttccaacaaattacttataattaacttaactcaattaatacacataaaaaaatacaaattttaaactatcatagatatcacaatgtttataatatttgataaagatatatatacataacaaaattaacaaatattataataaaaaaaataatatacatttaattgatattgtaactaaatatttttcataaataataattttttttaaaaaaaaattaactaatgacccacaatgtgataactctaaaagtgtggaagcaaatctatcgcccactcttccctcatctcgtcaataatagcttttggatatggctttttgtaaattaatgtaatatcccagaaaaataagatgatatttaaatagacatattttattaaatatgtaattattttggtaataaagtaagattatgatcttacttatggtatttagtgaggatttattaaatgattatattaagcgtaatttattaattacggagattatattgagatatgtggctatcggggataccattttt

SEQ ID NO: 407463 - DNA, 960 bp, Cannabis indica
gatatttaattacaaaatgatacatgaaatttaaaaaataattaaaaagactaatcttaaacagtcaagacaaatgaaaaataaaaatgtaaacattataccattttttttttcttttataaatcagagagttgatatattgcctccaaaaccttttttaattacatcttatttgactctctttacaattgtatctaccatggataacacttatcattctacaagttttcatttctattcaactatagcctgtatacaagggatgcacaagcaaccatcaataaccatagcgcctgcgcctcttgttacctttcctcaaacaagccatatcctaacacaagtgtaatatctgttgcttttgctttccaatccaaccaagtttttatttcaatcaaacatctcatgctaattaagttcacaagcaagaacatgttcaaaggttagcacataccaaacattttgtatcagctatattaaatcgacccaatcttgtctttgtgtgcagctagctgttgtagtatcaaccataaaataaaattgtgtttaggaacattcattcgactccaatataccatggtagcccaataaactttggtttgcattcctaatagtagctaatagcattgtttaaagctatagaaatcgctcatgaatagttggtattgaaaatattttaatttggtcttttacaaccaaaatgcatttccaatacaactccccaaatttatccttacatatacatattttagtttagtataatgtaatgatactggtaataataattaaatttaataataatagtaagatatatttatgatgttcgatttgtttgtttgaatattagaataagtgattaattgataaaattgttctcactttaattttcatatgtatataaaaaaaatatttgagtcattttagttttattttatgaggatgtcaatctcctattacaatttt

SEQ ID NO: 407464 - DNA, 536 bp, Cannabis indica
atgcacaagcagcgtaccgtttatgcgagaattgaatcagatgggagacgtacttgctggtcatctcggaggcaaaaggggccaaggtgggcccgaggaaacgattgaaccaatccgtcagagggtccatgttcagatcccacggatttcggaagttttcctcgttaagagagttttgcaactcctcccgtaagatcctcctcaaggcctccacctcagcgtgcccccgggtgtactcgtcaagggcgtaattatgtttggctatccaaagattctgcctctcctcatctccgaggatcggagtcaacacaatgccatgaggcactgtatactcctctgcctcggaggggatcccggagtcatgactcggggccggagtgtccaccctccgcgggcgtttagaagactcctcagctatcatcttacctttacgcttgcgcacgagagcaacctcttgctcttcttcaccttcttcaacttcctcaggaagtaccccttgctcttcttcaccctcttcagcttcctcaagaagtacc

SEQ ID NO: 407465 - DNA, 837 bp, Cannabis indica
agaaggttgcgttctaacaaagcagatcaaaattaacaatttttattttttagtgtatttatttatacttatgggaaagattatcatgacttaccaagtaacttagcaagttaatactagtaacttgcaagtcttcatatttcatataacaaagtaactagattgtatatttttggcaaaaacacaaatattgggagcacttaagtcttgagctaagaactagaaaccattgttactggacactgaatttattagtgtactttggttctcatttagtaactacttattgattttgctgggtaatattgagctagcttaagttaagtggttaaaaataaaaaacttttactgtttaacaaaatgttagcaaaagggcaagtccaaagaggtaatgccagcaaagcagaaaagtttctaatgttgatattgatatttttgtttagatttcttacttcttagtgttagttattgattattttatttcctttttttttttatcgccatgatctatttcttttcttggtttcgtaacaaaaaattcttgttgtgttactaaaattatcaatagctagcctactattatatatttgtttattgttttgttaccgctattttttgggtttattgttaggtcatgttccttgctagtttagtaactggttactaatctcttaagtttctaatgtgtatgagttattttttaaaattggctattagattagtaacatcttattgtgatattattgaaaagccatggttaatagtttttcatccaatattaacagttttggagtttttacaccatatactgaaatttcttacttttttttttctttt

SEQ ID NO: 407466 - DNA, 596 bp, Cannabis indica
ttggaaaatagtaacagagcaggaaggtctcaaagagataatgcaaaatttattaagggtcaaatatgtgctaaaaatttaatagagaagaagtgggtgatgtggttatggagtataacttcgctaaggaagaattcatcaaagctcaagaggctctggctttgaatcctacagatgctcaattacagtagcaggtgttgggttttatgccctaaataaaactctatttcaatgtaatctctatcttttaaatgaagaaacagaagtattttcatcacttattgtgtcatttggttcatgttatcatttatttgtttatttgatttataaattcatccaaatccttatcacatttatattcttgtttattgtgtcgtcagcacagtagaaaataatcaagattatgtgattaaatatatattcctagatttatcaatacagggtttaactgatatgataatctacaacatagtttacttgcaccttggataagtgctatgtcatttccaggacattggttaaagtaaaacttgggttggatgcatggagtatgcatcggaagggaccaatattgaactttgaatcagatatgataa

SEQ ID NO: 407467 - DNA, 568 bp, Cannabis indica
ttttggttggaatctgaaattctagctgtcatcaatgcaaaattccagtacccatctggaattccggttcacggctgactttgtctcgggaagcatgctaacagctataaacaactacttttctcttaaacactatataacttgtttttcactcaaaaatcaagttggctgagcatttatgtcaaatacctaacctatctgagtgagattaatgagcttccaagtttaaaatccaacaaacacttttcacacactttgagccaaaatttgtgtttattcatcttgagtgtgcttgcttatcactctaggtttccattgtattatcataactctagagtgatttttcttgtaataccaaacacattttcatattgtgattgaggtgaggttggcaccgacattgtaaacaactcggttacagtgagtttggcacttcaacaatccgagaaagaggttaatagtcctcgagggtgcgaaactattgtaagaggtttagaaacaccttggtgtaaataacctgcttgtaagggttagtcaagcccattaacttggctcgagattggaactc

SEQ ID NO: 407468 - DNA, 536 bp, Cannabis indica
gaaggggaaggtgtggtaaacacagcacgagtcaccactaccatcggaagagagctctgtttttcaattcggtacttttctctctctagggtttcacctaaccagtttcagaagatctaagatttgagtaattgtttctgttgtgcgggtttgttcgtcgactcactgattcattgatttgtttagcgattgtttcagctgctatcaatggcgaacatagacatcgaaggaatattggaggagatccctaacgatgggcgagtccccaagacgaagatcgtctgtactctgggtccggcttcaaggtcggtggaaatgattgaaaagcttctcagagctggaatgaacgttgctcgtttcaatttctctcatggaactcacgagtatcatcaggagactttggataatctccgtactgctatgcataatacccagatcctctcagctgtcatgcttgatacaaaggtcttgtttttttttaatttattttttattttttatttttttttaacgaaaaattgtttatgattttgatt

SEQ ID NO: 407469 - DNA, 653 bp, Cannabis indica
ttacctgggactcgaacccaggacctccaacactcacacacccacctatggccacttgagctagccccaagtggttaaatattttttatttttaagttcatatacttataaagttatatattttatgttttttttcacacattaaaattatatattaaataatatgtagacacgtatttttaaatttattacttaatgagtttaatttacacttaacaataaaaaaaataggactactataaaattgtaagatatatttttgctactattttttttattagagttgtaacaattataaatcttaaaagaatttcaacccaaatattcctaaaattgaatatatatatatatatatatccgcaacaaataattcaactaatttttatatttccataatatattattcatatatttatataatcggaacaataaatcacacataaatcttaagcaacatttatttataataccattttaaccaaataatttaataaattttaatcacgtaaatcttgcataaatatatatatatatatataatttagtaaactatattaaaaatatttattttgtaatagtttggtgcagtgcagttaaaccgtctttatagtaattaaaaccgcacacctcactacacaacacaattagaaaaa

SEQ ID NO: 407470 - DNA, 612 bp, Cannabis indica
aaccagttgtggcattatccatagctgagtcagagtacattgcaactacagaagccattaaggaaagtatatgggttaaaggagtcctagaagagctaaaattactagactcaaaaccggtgatttactctgatagccagagctgtgtgcatctatgtagaaatcctatgttccatgacagaaccaagcacatagagataaagtatcactttataagggataaagtgacatagggacacatttctattgacaaggtacctacagaagagaatcctgcagacatggggactaaagtgatcaccctatctaagtttaaacattgtttaaacttaatagggttggatcaaggataatgtgatcctttggatcactgagctatgaccctcaaattgactcgaccactaatgtatcagctcagtgaaggtttaggtggaaattgttgatataaacctccacttacactgatacttaaacaacatacaaggacagaactgtaaatacaagtaaaaaccctaacataaattagttcgaatggatttggttaaatccacacctaactaatttctgtaactacctaactaacacattcagaagcaaaaccagaagccctaa

SEQ ID NO: 407471 - DNA, 695 bp, Cannabis indica
agaaggtatttttggaagtttttgaaaaaagtagtcatattttttttaatttaaaatataattgtttaaaaataaatattaagattttttaagtatagaaaatcaaattgccaatttaactcaaactttcccaaaaataaccaattctcatgtgtatttttcaaccaaacataagactagctactttctgctttttttaatgggttatttgtggagaaattacttaattattacatttatagcacctaaaagtatattattttttagcattaccatttggcatgctcaacaccatttgatttctcttcgaacatattctttttccactttcttcaaatcagccatcaaatgtgcaacttaaaatatatgaaagacaaaaacttagtgaaagctacctaacaaaatttacaccaatgtttccattgtgtagatcagatctgtcatgaagacaaactaaccagcatatatagctacgatcagtttcttgatacctgcagtacaaaggtatatatatatatcaatgaactacaacagggcacaccatttattattcaaccatcaaatcatacattaccattatttgtactaagaggtggtcagtggcggacccagaatttaaagtgagggggcgtaaataaatttaaaaagataatataaagtgtagttagtgggtttgaacctttaccctctaacct

SEQ ID NO: 407472 - DNA, 673 bp, Cannabis indica
actattttttatatattttttctataaaaaagtataaatctacgaattaatattttactatattttaataattttctataaaaacataaaatattttaaaaaagttagaaaatatctatatatgtaaaagagagatatgagacaatgatgtggcactctaaaatctctctaattaacattattgattctctcattaattctctcattttcttaattttttattagcttcataaataataattaatatagaatattttatttatttttctcaaaattttctcttttttttttattttttttaacttttcgttttttttaatcacacgtgagtgatgtatttatttatttatttttttttttgtgtttttcggcctttttttttttaattaagatatttaaaaataatattttttaaaaaatgataactctaagatttttggctataacaattttgtgcttttaaagtacttttttttttttaaaaaaaaaaaaattaagatatttaaaaataacatgttttaaacaattgacaactctaaaatctatcatcatattttgacttttggcttttttaagatatttaaaaaataatcatttttttatcaattactactaaactctttatatctattatatatatatataaaaatgtatataaatgagaagtatgaag

SEQ ID NO: 407473 - DNA, 525 bp, Cannabis indica
caagactcacaaattaatatcccaatgcaaggatgtgtgtgagcaatgagacaacgcccaacaggagattactcgcctcaagcaggaagctgagaaagcgaaggaggaagcagagacacaaagaaggaagccgagaaggcaaaagaggaggctgaaaaggccctaaaagtccacgctgatgagtttgaggagaagcttgctgagaaacttgccgagaaagaaatcgagaccgtagaacggtgcgataaagttggtttttgcgctgtataccgagcctggctttggaaccctaacatggataccaacttcttggatgagaaggaagaggaaactttagctctctacgaaaagaccaagatggaagaagatgacgaggttgaggaagaagaagaaactctgtccaagtctcccaacatgtagacttggtttatttatctccttctttttttttttaggaaatggcccttttgccgagacaatggttttgcccctagtggcacctttttttttttgtaaagtacatat

SEQ ID NO: 407474 - DNA, 623 bp, Cannabis indica
gttaaagagagcttaaatggattgattggtactacctatatcaacaaggtgcatcttgtttttcggtagcccatctcgaaagaactccatagttaagcgtgcttggcctggagtaatttcaaggatgggtgacctcctgggaagttttcccaggatgtgtgtgagtgaggacaaagcacactgaaaacactcgtgttggtctgtagggtcagtcattagtccatgaagcagccagagtgatgaactcgtgtataagagccattagtccgtgggtgtaagggcccaatggaggcttgaagcggggacgttacaagacaatatacatatactttaaaaattaattcatcaattgtaaaacaaaatatataaaagtaaagcacaattcgagctctaatatgaaattaggttagcctgtttaagaaaaataggtcaacaagagcaaagcacgtcacgaatccgaacatgacatgaaaaatactaaatctaaggtcggtgctaagtcctaattttttgaaaataatatcacgacatgatacaacctatattttttagggcacacccgacaagacctatatttgaaaaatcacgaaaaaaactaagggcagaaccagcaggacaagtac

SEQ ID NO: 407475 - DNA, 695 bp, Cannabis indica
aaaaatgataggatgccgtaagatgattgagactgaattgaaggagaagagaagtcggagtgtgtgttacaagtgcgatgagaagtggcactaaggccatgagtgaaagcggcagaactacaaatttttctcatccaagaagacgaacccgatcctcttgaagataatcccatcgaggaagctttgggcattctgtcgtcaaccacaaccaaagcgcaattggtagaggtcttccttgaattcaattgttggattaacttctccaaaaactatgaagttactcagcaaaattcacgagcaggaagtggtggtattgattgatagtggtgtcacccataacttcatcatagcagagttggtttctaagttggctctcccaatttcttccaccgaaacttatggggtacaaatgggcaatgtttaaaaaaacgcaaatgagccttaaaggcgttctttttttggtaagacgaggcgtacaaggcgtaagcctcaaaaattaatggaatcaatgcttttagagcacctacaaatgaataaactgtcacataaatttcaaacatactataaaatgtcttataaaaataataaccataaaacatctcataaaattcaaacataccaaaagatatgtctcataaaactcctaaaatcaagataattatatttctagatttagaatcctaaattctactatc

SEQ ID NO: 407476 - DNA, 519 bp, Cannabis indica
attcccgtgaagaagttcataaactcacgaccgattgatcctctgtcagagatccaaacaccgtcaccattcaaaatgctttctatggcattccttcgatgccgtatagtggccgagagaaaaaagaacttagagcatttgtcaccctccttaatccacgaaatcctagctctctgtttccagtacaactcttttctttcaagcgcatcattaagagatctacggagcgacctttcagtgctccaatcccgggagcccacaggtaagctttgaatcccgttaagcttattttcaagctctttaatgaccacgtccatcttgtcatattgagttctattccaatgcataagagcaaccctagtagcactcaccctcttaaaggcgcgggcaggagcccaagaatggaagaccgaattccaggcctggtcaaccaccaagcgacttcgattgtctctcgtccacccttcttcaaatttgaaacctcttttggaccttccttccattccattagtcatcaga

SEQ ID NO: 407477 - DNA, 522 bp, Cannabis indica
cttttgtagatagaacttcatgcaccttagtatacattcatctattcctacttcattaaccatacactttcacattctcatatggtatcagaacaaaataaaacataaaatactctaatgactattcaacctaaaaaattagatcgaagtatagctaaaaagaagccaccaaatacaaaaattagatcaaaaagtaagagccaaagaccaaaagaagccacttgtgattcaggagtatagtgagccaaaacgaagccaccaaaatactataaactagatccaagaagtagagccaaaagagtcacttgtagttcggggtattaatgagccaaaaaaaaacccttgtgattgagttgtccaagatggttaagaaaaaaaagggtaaattgcggcattataaagaccacttaagatcaatattttggattattaaataacttgtaaagtacccgcttagttaatttggaaattatcagttaattatgattaattatgaaattatttatagtctatttaaataat

SEQ ID NO: 407478 - DNA, 456 bp, Cannabis indica
gtattacccatgaatgagtaaaattagaaaattttgagttattatgcttaatttttcaatctaattaaaaaaatctctcatttttatatcatatgagctgagattgttccatcggcaatttttttttttttttaaaaacgttttttagtatttttgtatgaacatatttttgatatagtgtaaaaagagataatttttttttatatttaattaagtagttaaattaagcatagaaattcaaatttgtgatttcattattcgttattagatcaaaattcgatggtttgatatttttaaaattaatatttatagttaaatttgtttagtaaccattcatgggtaatacccattaagaagtgttccatatatatatataaagttaagtaagtgatggaaaaatatgtgagttatgatttttaaaattatgtgatttttagaaaaaaaaaaaaataagtt

SEQ ID NO: 407479 - DNA, 667 bp, Cannabis indica
taccaaacggcacctaaatataggctttaaaaacttaatttgtacatatatagcctatcaaatactataaaaaatacttaaaaataaaaaaaaatatcatataaattagtcaaacttaaaaaattaaagaaattcaagtgtgtgtggcgactggtataagacatgaagtgtatgtaatagtatagtagtacgtaacgtacatggctcccccaccaagcatttaatgttaaattaatataacaaacaccagaagaactacatagttaccaaacaggttttctcagttttccaatttcatgcaagacatctgataatataggtaggtgtaacaatgaaaacccatcaaactatactataaaattaaattcacccaattttttattgaataaataccatttaagattatgtattttgcaaaagttattaattggactatctgttttgttaaatgataaaatgaaccttgtattttttaaaattgtacaaataagattctgaactgattttttgtcaaaataaaacttaataataatatgatctagagatgttatcacaaaactggttacattttttatatctatttgtgttagaaattatcttaaagttgtttatattaaaaataaaattattgaaaaattgagttgagtgtcctatttttaccattttg

SEQ ID NO: 407480 - DNA, 584 bp, Cannabis indica
aaactagacaggtcgagagggtcttcattctcagtatacacattactcctgcctaagttcaaaataccagtatggtatagagttattttttatgcttttaaactaaaagtattgtgagaagagtagtgaaaatgtgtttgtttgcttaattttagttagttttagtgttaatttttatttagtaagctaacttttaagtcttgtaaatattgatattgttgggtgtgtttttccaattaattgtgcttgtttgttgttgaaaaaggaagaattaaagtgataggaaaaagaaaaggaagcaaggaagagtggaacataagctgaaattgaggcagattgctgaagcaatgctgaagcaaattcagcatcctggcaatgacgtggaaacacgagtttcacttatacacctcagcaaattcggcccaattactcaaattacaccagctggctgatgtggaagaaaagggactaaactagtgggccaaagtggaaaagtttgggcttctattttggggtatgaagtttgtaccctaaaaacccaacaacaaaaagagaaaaaaagggaagtacacaattatcatctt

SEQ ID NO: 407481 - DNA, 741 bp, Cannabis indica
ctcctcacaaagatcaatgacctttgtagaaggtctcttttccatcaaagaggacccctcaccgcccttggacttcttggccggaggagaggcggtagagcttccgcccattatcttcctcagagcatcggtcatctcccgagaaatgtctgcacagaacaaaaacagtatggttagaaaaacagccattagaaaacacaagacatgaaaatcaagaagctcaagaacaaagtaaaatgcaaggtgaccgcctgcacagagactcaaaagtccatcatcacctgacatcgattttatctcagacatgacagccttccctttgccggcaaaggggggacatggccgaacaggtgaaatgggctcccttatgcgaattgcatgttcaacaggcctgggcgtggctgggagtttcttcttcctcttcattggggtcacctgctcgtcctcagcctcatcttcatgattcaaaggcttttgagcatattgcttggccttgacacctccttttaacttagcctcgcgcttaagttgaatcagcccattctccttatgagctcgttcaggtcggccagcatcagacttcctcttcttccccgccacggacttaggagaaaagtcctcaggatagagcccgtacttcaccagattattatctgaggtcaattggataatattcctgtcttccctcggcaaccgggcaagtttctgagctctatccctaagagcaagagtgagggaagg

SEQ ID NO: 407482 - DNA, 558 bp, Cannabis indica
gtagttataataatatatatatattaattaatatatgttatattagaagttatgtgtagaaatgaagagtactaaaagaaaagaagtgtatatgcagtgtagaacgtaaaataaatagtggttacgttcatatttaacgaaaaaaggaaaataataataataagttgcgttcttaattttttcttcagttttttttttttttttttggaaagagaaatatgtgataaatggtgtacaaagtttttgttggtgtggacgatgccacgtaaatgtagatttttttcgaaagccacatatattatagaagtttttaatatatattcccttaaaaataaaaataagtatatttggatattaaaaaaaattaatttaaaaaaaattatttttaaatatatattttttaaaaatttcctttttcaattttatattaattttaataattattttattattttttaaattatgtgtaatatttttttctaatgatattttataagggaattactctatatactattttttttaactttttttttcttcaaatttacggtttgggtt

SEQ ID NO: 407483 - DNA, 696 bp, Cannabis indica
ttaggtcaaaactgcgtttttccatgcctggtcacgaccaacttataggttggtcgcgactacaagcaaatctcgaaataccgaggttctgccaaatcttccaagtcgcgaccatggtcgcgaccaaagaaaagggtcgcaacctagcttctggttagtcgcgactactgacacccaatgagcaaatttttctgatttttcaccaatttgtcccgtcttttcatcaattgactgaatttgaactttgataccccgggaacctgaaacaaggaaaatcaagcgtaaaacttctccaaaagacaccaataaccaagaaaatgcttacttattaaacccgtaacataggctaattataacctaacagtttcagtaagaaagaaaaatacctggacgggttgaatgcaaagaccagacacgacctaatgatcactattgatgacaacaccacctatgctgatatggtgggtaaggcactgcgagctgagggcacattggagtgcactttagagtctcgagggactccggttgttggtggggctcctactcctcctacatcaagctttagtaggggaggtagtggctcggccactggtcaaaaaagaaaggcacctactgtatccagtggctagggtcgaggcaattgccagagtagcactgtaactcgatacacttacccagagtgccctagttgtaaaa

SEQ ID NO: 407484 - DNA, 541 bp, Cannabis indica
agtgaacccaataggattatagcgtggtcttcatcatcaattttcaccctaagattattcaaatcaagaatgattctgttataatcatctagatgcctttttaattcttttgactcatccattcaaagtgtgtaaaacttcttcttgagaaacaacttgtttgcaagaaatttcttcatgtagattgatgccaacttgttccagagacccaaggccttgtcttcatctaaaacttccctcaaaatatcatcaccaagattgaggaggatagcactatgtgctttggcttcaatctcaagtttcttcttgttatcttcaattaaattaatggcttcatcatcaagtgcctcatagattccttggtgaactagaaaagccttcatttttactctccataggctaaaatcattcgaaccattgaacttgtccacctcaaatcttgctgaagccatttaaaccagttcttgattgcttgaatctggttcttgaaagtttgagtttgattcttaaaatattgaagatgagtcttgattggttgaat

SEQ ID NO: 407485 - DNA, 621 bp, Cannabis indica
aaattcaaaatcactcaaacaattttcccaaatattcaacaccacaatataatgatcagaaaacccaatatcaacaatacttttgcacaacacacaattacaccacccaaaatctagaaaaagttaatcaaattccttaaagattgaaggaagtgatacttacaaacccgaagaagctttactccacctccattgttgaatgttcttgaaagcttgaggttatgggtgattttcagatttggtgtgttatgggtgattttcgttatgggttttgatgatatgtgtagattgatgagtgaaattgggtttttgaatagattgggttttagaaatttgagaaaagatgaaaagattgaagattggtgatgaaaaattgaatttttgagaggaaaagggtagggttcggctgagaggtatttgaaatttaaaattttgggtgtagggttaaatgagggggaaagtttgaatttatagaaaaaatcgtgagcaagtcgcgacttggcttagggccagtcgcgactagctcacactcaaatttaagccttctctggaaaatcaggaagtcgcgactggggtcgcgacttggccaaaggctagtcgcgaccactggaaccaaaaaaa

SEQ ID NO: 407486 - DNA, 521 bp, Cannabis indica
attagtgttaattacataaacagtataataaatattaaaaaacattaaaatttatgaacattaatattttgtgttcaactatactgtacttaattgttaaaagataaactatatgagattgtttgttagttcaaggaagaattctcggttgatatctcagctgaaagtcttgatcggtataggaagaagccctgtcaaatagagattttttctttcgaccatctttcgattgttaatacgatatataaggaccgctactacaaatagtactacacccttgatcgtgaaatatcgattgctcgttgtataatatatatatatatatatatttatatatttttgaaaaaaaactagtgtaattttatattgtaatttttattttgattttaatttgtgtaattagaattattatttcttaagtaaagaatttgttagtttgatcatcatatgaagtaagaattttcattttgaataaaagaaggccaaaattttacttaattgtcttaaaactattttaaata

SEQ ID NO: 407487 - DNA, 1519 bp, Cannabis indica
cgtgtcataaacgtgttgacatgaacacgatacaataacacgcattgtcagccctatttttcctaaaaaaaactcgttgtcatgccattcccaggacttttagaatgatccatttcaaataaaatactttggacatcaatatcaaaaaaaaaaaaggcctaaccaattacgcataataggagaaattttacaaggaaccgcaaaaactttatccatagccatagaagaaggattatcagaagtgaaaagagaaaaaaaataatcatcaaatactagtcacttcctccccatctctggagaaaattttagaaatctcaatcctagcattttgagaagaaatacacttgtgaaaataaacagaatttcggtcctcaagcttcaaccaactagtattagcccgcgaggcccaatgcttctcctctttctcattaagagtatcaagctctttctctaaatgatgaagtccatcacaactaactgcagacaagtcaacatccacgataacaagctcttattaatagctgtttgacgacgatgaaccacacggttccaggtatcaagctttgaagtcacgacctctgcattcaagaaaatattaataatagggtttgtgtctctgttcatcattaataacctttacacattcctcctcaattgcctaagaatttttaaaataaaagcgagatttaaattgaacatggtttccccacaaggccataccactgcaaacataaaaataggcttatgatcagaacccgtaaattcaagattaagcatattagagttaggaaaataattagacaaactcgcactatagatgatcaagcctttcttgtacaatagcaggatcacgatgcttattataccaggtaaactttggcctcgaaaaatccaaatcagtgagaaagcaatcagcaagagcaggaaaattatttaacaaataccgcttaactaaccccctttcttttacatcattaaaaagaatttcattccaatcaccaccgagaagccaatgtatgaattatataagtaattattctcaacaaagtccaaaagtgaactcaaagagaagcatcgtaatgaccataaacactcttacaccgccaaggaacaaccctagaaacacaaattgaacatcaatatggccatgcaaaaacgccaataaagtaacatttaaaccaataccccaaaatgaacacaaaccaccactttttcccaacttctcaacaactaacttacccataaaattcaaacgaacacggagaagtttcatttgagattgagaaccgatagtttccaaaagaaacaaaatgtccaatttaaccttccaaatattagcgtgaagagttcaaaatgtcctatcattattcatgcttaaaacattgggcttttttcagttttaaccaaaaaaagtaacaatattacaaaaatactttcagctggccaaataaacaaatatacagcccaaataaaaaaaaattaacacaaataccacttacacacaccttcaactcaggat

SEQ ID NO: 407488 - DNA, 773 bp, Cannabis indica
ataataatattttatattttttttgacgacctattgtatattttataaggaaattactccatttactatttttttaattttttttcaaatttactgtttggatttctaaagtggttggaacgctagttgcaataggggtttctatacgattttttgttgcaatgtaggttgcagcgctagttgcaatagaggcttctatgtagaatttcgtaaaaatgcaaaaaaaactggtttaaagtgtaaaaatgaaaaaatccctattttatataggctaattaggattttttttctccaaacttcaatatgtactaaatcatgcacctgaatttttaaggtcgttaaaaatatccctgaactattgaggttgttagatttaaggacttttgtccaattttagtaaaaaaaaaagtctaacatggatgaaagttcagatgacatgatttagtacatgtcaaaagtctaggggcatgatttggtagttatcaaagtctgggaagcatggtttagtacataaacaatcactgaaatagtaaaatcgaataaaattagacaaaagtccttaaatctaacaatctcaatatatagttcagggggaatttttaacgaacagaaaagttcatgggccatgatttggtacatgttaaagttcaggggctaaaaattctaattagccttttatatataaaatattgggtttccattgttctatgggtttagagttgtgatttaaggtggcctttggttacaaaataaaaatagaataggaatgggaa

SEQ ID NO: 407489 - DNA, 860 bp, Cannabis indica
ttgtagtatactcagtaaccgacatcctctcggtttgcatcaactcagtgaactctttccgcttagcactgcggacggcttcattataatatttggagttaaacaactcgctgaattcttcccaggtcataactgtgatgtcctgagtgaggattatcaactcccaccacacgagagcatcttcctggaactggaaagtggcacaggtaacccgatcattaccaaccactcccataaaatttagaattcgttcaatcactgtgagccactgctcagccttcatcacattgagacctcccaaaaacactagaggtgcttgcttacggaacctttcgtacaacggctccatacggttgccagcaacaggttgttctgctggcaccgctggaactgcaatggcctgagcaacttgttaaggaggcacggcaggaggaccctgctgccttaacctctgaatttcttcatcctgctgggggatttgatctttcatttctacaaacctctgctcccaatccggaggagcttgtggtggatttacaagacgaccaccttaagctctgccacgaccacgaccgcgtccacggggattctggggattttgattttcctgaccgcctccggtctcaaccatgttaccctggcttctagtattttgctggacgtccattttataggacttagcctgcgaacccataagccaggcaagttagacagcgatcataaaacttaataccgctcttatggacttaaaggcaacacacttaaaataaataattataatctaatatgcttcccatcatactttaataatcatttaaaatactaaacaagtacgggcttactgaaccgtgaaccgagct

SEQ ID NO: 407490 - DNA, 754 bp, Cannabis indica
atgtggaattaggggttaaccctatttgtgaaaatcccggtagtgtgactaggattaccggcacctggtcaggagcacccggggattcggaatctctgcttttgcgggacaacaggtaagacagtagttgcacgtagagatatgcacggtggtgcttatattgaatattatattggtgataaattagaaaccgagattagggttattaccctaaagtgagcggtttaatggcctagggttattaccctagtaattattaatgtgtaaatgctatgccatgctaaatatattgtaataaagaattatgcgcacaaggcataattaagttagactcggtaaattagtacgttgagtttgatgtacaataatattgctaatgaagtgaaagcatgaattagggttattaatctttataagtattattttgagcatgcaataatatgttatatgagagactatttggtatacaagttaaggttattaccctaaggttttatatgttatagtgtatatggaatgtatgtatatatatatcaagagttatgtgtataagacataacttggttacacctggtatattatcaggataaaccactgaaagaacgtaatgtatggattacgtaaatatatatgaatagggttatgcgagcaaggcataaccaggttaggctcggtaattataaccgagataaaccctactaaggccttattgtaaatgacgtgtgagcgtaacacgtaggtctatgccacatag

SEQ ID NO: 407491 - DNA, 793 bp, Cannabis indica
ctgagatggatgaccaagtcggcagtgccaaatggttgacatcgttttggactttgtcatggaatcggggtttattggtggcggtatgattgagagccttaggtttgatgctaacagaggaagaagcaatgcttgagaggtggatgctgggacatgtagcttatagagaccctcactgatatggccctgcaaagaacttgcttggttgtcttgtccttgatgagacaagaaaattcatcaaactcaagaattacatggttatgtttggtaaattgagaaatgctaaggaggtttttggtaacattagggacatgtagaatatcttgcaaaaccaatgaatgatttggaaatttagtgccaacagaacttgaaccaatatgatgtatggaaagagaggaaccattacctacaaccacctttgctttgcctttgtaatcagaaacagaggtgagttggtcagcatcattagtcatgtgatgggtggtgccagagtcaagaaaccaagcagtggagggatctgaagtgggattggattatgaggaggatcagtggttgagggagtaaaggttgatccattttatgcacctatgtaagtgatgtcaaatctatgataacatttcacagcaatgtgaccagcacgaccacaaagttgacagattggtctatttccacggccacctctgttgttgttgttgttgttataggatctacctcctctgtgtgaaccacgaaatccacggtttgagggaagtcctctggtgttagccaaatcacgtaatacgcctatgctagt

SEQ ID NO: 407492 - DNA, 1481 bp, Cannabis indica
tttcagatgaatttataaatcaaatagacaagcaactgataagatagaaaccaaaacatacacaaatgaatagaaaatacttctgtttctttattgatgttgaaataaaatggattacattgaaatggagttttatttagggcataaaacccaacagtacggtgcccccaagtgaccgagcagacgtatgactcttggtcacttgtcttttacaaatatattgtttatctgttcggtgttttgggtttgaccaaaccttttgtacgcattgtatggtaaattagaaacatgctgataatttcgactcaattgaattttgaaataactatctttattcatttattgatcgaaaagtgtatttgttaccgtagtaacttacatcagagctatttgatctaatctgatcttttagcttaacatgaaataaaacaaattgcagacataagaaactgtactttaaagtggtcacccgacctgagtactttgtttcttttatcgaaacctttgagcgtagtccgcccagaaggccattcacttaaaagcaaatgttcatttagtacttaaagtggtcatccgacctggtactttattggtagtattttcttaaatgttctccattccagtaccgtggtactagaatgagttgcattttttcgtcatacttacctaacttgtatgctccggagtcgagaacttcgaccacttgatatggtccttcccagttaggtccaagtacacctgccgtactgtctttggtgtttaggaatacccttctcaggaccatatctcccacgaagaatttctgagccttcacttgtttgttgaaataccgagctactttttgttgatgggccatcaactttaagtttgcagttgctcgtttttcttcgatttcatcaagtgattctgcaaggagtatgtgattggtaccttgatcgtacgtcaatcttctgtgggaaggtggctcgagttcgacgggcagcatagcttcataaccgtatgccattgcgaatggtgttttctccggttgccgtcttttcaattgtacggtatgaccataggacttcaggaagctcttctggccaatttcctttggcatcttcaagttttttctttagtgtatccttcaaggttttgttgactgcctcaacttgactgtttgcttgaggatgtgccactgtggagaaacttttgatgataccatggttcgccaagaaattagtaaaggattggctgtcgaactgcttgccattatctgagactattttgtactgtagtccgaaccggcatattatgttcttcacaataaagtcttgagctttctttaatgtgatggttgcgaatggttcggcctcagtccacttagtaaggtaatcaactgtaacaccctaactagccaaggcgtgttacgtgattttgtaaacgtattgtgcggctcgttgctaagcaacgaggtttatggaaatcgtgattaattaaaa

SEQ ID NO: 407493 - DNA, 927 bp, Cannabis indica
aattagcttgaattaccaaggaagaatgctaagcttgctgctcgaggaggggccaaaaatagagagagagtttgagagaaaaagttcttaatttctttccaattttccaatttgagtaaaatgaaaacataatagcctaagtcctttcttatttcagccaacaaacattaaataaatcacatttacaacaaataataagtccactaaaggacaaaacataattggggaaaaatgactattttgcccctccacactaaaataacataaagggtactaaagggtatttttgggaaatctaaattcccgaccaatcccgacattcccaatgtctaataaactgtcccaatatactaacatgctaaattatgattctactgagccatacaccgagttccatgttaccgagcaccgaaaatgcaaaattatgaaatttcactatatgacataaaatgcattctaaattcaaatataacaacataaataattatttaaatatctataaataattttcataattaaatcataattaactgctaatttccaaattaaactaagcggtctttacagaaaggttgctgccctgagccgttttatctcccggtccacagacaaatgcattcccttcttcaacatcttgaagaagtgtcagaaatttgaatggtccgacgagtgcgaggaggccttcaaaaaactgaaagagcacatgcccaagccaccaatcttatcaaagcccgttctcggggaggacttgttcctatacttggccgtctccgagaatgcggtcaccgcagccttagttcgggaagaagagaaaactcagcatcctgtgtactatgtcagcaagcgcatgatggaagcgagagacgcgatcccagtaatcgaaaaaactgtttttgcctcctgatggcctcgagaaagttgagccct

SEQ ID NO: 407494 - DNA, 730 bp, Cannabis indica
tttagtattaaaaatgataatgtcaagtcaaagaagaatcttttttgaataaaaagtaaatgtcgaaccttattcttaaatttataaaaaccacttaaagatatttcttttttaaaaaaattaatatatagaaagataaaatcaaacctttcttaaagtttagtttttaaatatttcataatattgcatttaatattttgaaattatatcattattattaaaaaaaattatttgtaaagattatgtatacaaatggataattatctctacaacaaaaatagaaaaattgataaaaaatgaagacaaaaactacaaaatagtcaattttaatgatttagacccctaaatgtcttctaaagaataaattggtaatttaatatactaataatattttccttctatgcaaagtcttaattaaatctaaaatattttaacattcgaaaagcagatatattagcagtcgcaatacaagtcaagtcaccaaaagatgtaacaacaacatatgttgaataaaaagaattcaagaaatatatctgattaataagaggtaagacaaaacttagttaaaccgaattttgatttttattaaaataaattaaattatattattatagtttaagaattagaataacaaccttatgtaatattttttaataattaaacattttatctaaagaaatagaacttaaacttacgtaatatgtaatataatattttatgtaaatatata

SEQ ID NO: 407495 - DNA, 658 bp, Cannabis indica
tgccacaagggtattactggcctaccttgcgacaagatactttcacttttgcaaagaaatgcgacaaatgtcagcgaatagccacatatgtccatcaacctccaagcaacttgcattccatcacaagtccttggcccttcgcagtgtgggggatcgacttaataggcgaactacctaaaggaaaaggcagagtcaagtatgcagtagtcgcagtagactattttacaaaatgggctgaagccaaggcactcgcaaccattacagcgactaagttgcgcgagtttgtctacaactccataatttgtcgatttggcatcccttacaagctcatctcagataatggaaagtagttcgattgtaaggagatgcgacaattatgcgacgacttgggaattaaaaaagcattctctgcagttgcttacccgcaaagcaatggacaaactgaagcagtcaataaaataataaatcacaccatcaaaggaaaactcgaagagcgtaagggggtatggccagacgagcttccgcaagttctatggtcatacaacacgactcctcgatccacgactggcgagactcctttctcgctttcctatggatgtgaggccatggtaccagtcaagattggggcaggttattggaatttattttaccaggatct

SEQ ID NO: 407496 - DNA, 803 bp, Cannabis indica
atagattagttgtgcatgctctttgaagtttgaatggattaacaacttgtttggctagatatgtaatattcattagtttttttgaatgtatagtattattttgataatcatgtcatttatagtatttatttgatgatcatgagatgtatagtattcatatttagcctgtatgatattattatattttcaatgaatttattttatttaaaaaaaaaagtattttatggataaattacaactctatttatatacatcacaacgtatgatataattgatgatcatgagatgtatagtattcatatttagtctgtatgatattattatatttttaatgaatttatttattatttaaaaaaaagtattttatggataaattgcaactctatttatatacatcacaacgtatgatataattacgggagaaattttataaattctcaacgcaaacctaaaatatatgatttaattgaacattttatattatacaaaaattgtatcaaatacatttattttttagaacttacaatgtgtgtataattactaataagggtaaatggcggtaaaattcccaatactttagttttggtttcgctaaacccccacaatctaaatttctgcgggtaaacccccaaaaccactactctgttagcaatttaccattcccgtccaaatttagctgttaagtgccaggttggcttgtccacgtgaacacaatatacacgtgacacaattttattggtccacgtaaataattatattaaaaaaattaaaaaaataaaataaaattaatttaaaatttaaaa

SEQ ID NO: 407497 - DNA, 692 bp, Cannabis indica
tggtgagtaagtaaatggagaagaagattggatgggagatatgagatggagatatgagaagattgggttgtttggtctttgcttctaacgttttcccgcgaattaactgcctcttcacatgtatctctccatattactttttttaaaaatttactatttattatttttatgtcaaaatttatagttttcgattcctcaaaaactaaattataattagaactgaatatttttaccggatttgacccgaacttggccaatctgaaaattaaaaaaaaactgttttatgtgggcgggtctggttcaacccggtggatctttcgaaagggttgcgagtttgatttttaaggtgatcgaatttcggattggaccagaccagcccatgacatacattggacctcaaatataataatattaattatttcttaaaaaagagttacataatacaatattagggctttacaaaaaattttataaactgttgaacccgaataactcactcaaatcaaattgaaaaaaccagtattaattaatacaaactgaagaaacctgaccaaattataaatcacccaatctattaattgtgcgagttaaaaaatagatacaacatgcccaataaacccgaactaactcgatttgtttcatttttttttgttttttagttttgtatttttgtatttttttaatttttatta

SEQ ID NO: 407498 - DNA, 605 bp, Cannabis indica
caaattagaatagaattcaactacattgatattaactaaaacattccccagcaacgacgccaaaaacttgttgtgataaatctaacacgcaagtatacgtatcgttttaacaagtaatactcaggtaagtgagatcgttcccacgagcactgtagctaagtaccaatcaattaaattcttatttctatttggcaatcgaataaataaattttgaactaaataaactaagcaaaattaaataaaacaaacaaataaaaagtttaacaatggatgtaaaattagggatatgatttcaattactttgattacacaatttttaacactaattaaaccattcttcttcctcctatgtgatgacatattataaattaacctaaactcttttcagattataaaggtcctaacttgcatatcaactactgcatctctaaaatagaacaacatacaatttacattaagcaataatctaaaggtcacataagctatgtgaatactctcgtttcacatcaaaacattgttggaaatattttaccaggatctagttttactaccatctatgtttcattaatatcctaatatgaattctaacaatgaaataaacacat

SEQ ID NO: 407499 - DNA, 1223 bp, Cannabis indica
atgtctaagtgaaaatataattttaaataattaggggaggagccacaacatccttaattatataaaattatatattaattaaaattcaccttaatggacataacttgtaattaattatataggtataataattttaccccacagggattttattatatttgtataattaattagaataatatattaaattaaattctcttaatttacctcacaaggagttatgaggatttaatttaatagtgttatcacaaactttaattaagatagatttcattcctcatttttctaaattaaatattttattaaatctatcacaaagtttatatagttttactagatttaaaatttagcccacaagaaattttagatttagtaaagttttcatcttcatcatgtttctacattggtaaaacatgaaatcattaaatcctcaattttttaacatctaaatttgcaatcctattcatgcagctatttaatccacctctaaatacgctaaaaccactagtggaattcctaagcttaggagtgtcaatttcaaaatctggaaggaaagaattcttctccaccttgcttgcactgacatggactatgtaataaggaaagatgaactagttgttgtcactagaactagcattgatgctgagattgcactacatgaaaaagtgggagcaatccaattgtctctgcatcatattcatcatgtccaaaaattcctttgaaaatgcatgggtcagtggagccacctggaaaaggttaaagatttttatcaaagtgatggatgagcagtttgacactttggataaatctgtattcaacaacctcatccaagagttctcacccacaaaattcactggtgttaaaggagttcgataacacatttcaaagatgagagatatcactgctcatttgaaaaaactcaatgttatcattcctaataccttccaggttcattacatccttcacaatcttcctccacaatatgggcctttcaaaattttctacaacacacataaggataaatggagcattaatgaattgatgaccatgtgtgctcaagaggaagctaggctcctacaggagcaaggagaaagtgctcacctgaccactcaacccaagaaatgcaaaccattcaagaagaacaagggggaaaagcccatggctcccgaggctaccataaagaaggataccatcaaatgtttcttttgtaaacaaaagggaca

SEQ ID NO: 407500 - DNA, 510 bp, Cannabis indica
atctttcctaagaaaaaaatgtaaccacggttgatattttgagtacaatatatatatatattattagttaacctacttatacagtttattaataatatccccttcaaaaaaaaaactacagtttattaatatgggtcccatgtttagttaaagaaaagaaaaagtaaggaaggaaagttataacaatgtgtttcaatataataatttttatatgagctagctatagtttcttctagatagctgtacaaatctaacaaacttaaagttataatgatggtgatataaactatttttgtggttaattaatatgacccttttttaactaaatatgtagtttataaatgtgacatatgacataaaaatagagaaatgctaaaatatagtatctggtattgttttagataattatatcttagtgtaattaaatatagagattatttcacaaatacataaaaacaacaaaaaagttacaaaaatatggttttaaggaattttaaacatttttacaat

SEQ ID NO: 407501 - DNA, 499 bp, Cannabis indica
ctctctctctctctctctctctctctctctctctctctctctctctctctctctctctctctctctctctctctctctctctctctctctctctctctctctctctctctctctctctctctctcttggttcataggtggttcgaccgtaagcgatttgggggtgggtggttcgcggtggaggcttgtcaagggtgatgtactatattggtcgttcgggctctctctccctctctataattttttttgcaggtggtggtggtggtctaatgggatggtgacggtatttattattgttgttattgggttgtagtagtatggatgtggtggtggtacgatattggtttagatttttttttaatttttttttgcttcggttcataatcaaagcgaaaaatatgttgtgtcgttacatctaggggtgttcactaagtatccgatccaatccaatccgcacgatccaatccaatccaatcccaaaatgcggatatccgcacttg

SEQ ID NO: 407502 - DNA, 548 bp, Cannabis indica
aaatcattactatggctctaaggaaattgttgggaatgttttagaaagatctagatttactgacaagtatgttgaattaacatcctaaataggaatatctctaaaacaatgaaatttgttgcccctgattttgcccaatatacgtggaccaaccagacagggacacgtggacacgaaggttttaacactcaaattaatagctaagtctttataaagaaagacattatcccggaggtgcctcccggagaaggcatacgaggttttctatgctcccggagatcaaggtggcatcaaagcatctccgggagatgtcaggcttcctctgagcagtcatctcgcatttaatgctgcatgggaggaggcgtgttggaactgccacacgcaataaagtctgacgacacaacccccactctgcacctacgagactatgaccactagagtctaatgacggctactttgtgaagaatcacatcggtcaaaagggaataaggacaagcctcataaaatccctacagcacctagggatttgaccatgcattacccatggt

SEQ ID NO: 407503 - DNA, 461 bp, Cannabis indica
gaggtacttctggtaccggtcctccgccgaggcgattatgtccacccggagcgccctttccgcagctggagtccttacattcgggtagatgaccttggaaagattgaagtcatccaccgactgactctcggatatcagcttggcctttcgacaattctctgtcgtgactaagtccccaacattgagggccttcctgtcgtaagtggagaaagtcttagcccgctggaggaatacttgagtaggtgcggtccgcatgtaaggagggatcctaacccactccgtaagaagctccgggcggtgcatggcttggaagccggaggaaaagaagaagcggtgacggtactcctcacgtgcttctggtggttaaaagggaccggccctcattcaaagggtgggaccgcagtccgtaaaatccatctttaaatttgtcccccttcttggggacggatacaagttcataa

SEQ ID NO: 407504 - DNA, 515 bp, Cannabis indica
ttatttattaatgaagagactttgttgagtctaattaataaatatattaaatgacaattttatttgataattatttttaattattaaataaatgattttggcatttaagtggttgaattaaaaaatatggcatttgtgaacaataggataaatagttgaaaaatggaaaaattacaaatggtgggcccacatcctacagccggccatatatgctctattttaccatttatttttcaattttttaatgtcaaataatttaatcctaaacctagaaggattcttataaatagatagtgatggacttaaaactgacaaataatgtctatatctcttacgttataactccgattttaaagattttagtgtcattagaaagggaattcgattttttaaaacttttatgaagagagtattctctgatttggaatatttcagtatcaaaactttatatttccgatatttcttgtgattcgttactccatattccttctcagaaatagtttcagtaaaactat

SEQ ID NO: 407505 - DNA, 1448 bp, Cannabis indica
aactccttgactggagaaaccattggtaggtcggaggcatggagttagatccttgatttggagtcccatcttttcgtaagcagtcttaaaaaatatgtttgaagaagctccattgtcgatcatggttctagccaccattttatgggctatctagacttccacgaccaggggtcattgtgcggaaatctaatcttgacagcgtcttcattgttgaaagttatggttggctctcctgctcgtggaactttgggcttctttacttccatggccaggatgacttcttcttgttcatgctgtgctgtccgggcatacctctcttgagctttgcccgaatcttaagcaatgtgcgggcctctaacaatgacttgtaactgtccatctactggtggaggtagcaaatcttggttgttttgacctcggttggtcttgacatacttctgcaagtgcagattgttttcccttattaggaattcaatttcccgcttcaagttgtatcatttgttagtgtcgtagtctccgtggaaccaacaaaactttgtcatgtcccttttgttggtatctttcttcatgggcccaggcttcttgtacaggatcaacggctgagttgccatatatacactttctatatcttcaatcagaatagtgaatggagtgtatttggcatgattctcccggggaatctatccggatttatcagtgaactttcctttcttcccgtttccttgtttgtggttgttgcttaaaggcttgccacttgagcttgaattatttgaatagttgggaagttgggcggatgtcccagtggaaggagcctttgacttgcccgacttttgttcacattccgctcgttgaatgccttcttcgagcttgatgcagccttcggctcggtcaaggaaatcactcattgagtctaccagcccgttcttccttatttctttccagagttcagcgaggacttcaatgccccccagtatcgcggatagctttccatcctcggttacccgcgaaactggtcgcttccgttatgaatctgctgatgtatgcccggagtggctcgcctggtcctcgcttaacctcgaccaaatctcccaaatgcaatgggagttggcgtgaggaggagaattgcgcatggaattccgaagagaaggttttccatgagctaaactttctaggagccaactgaaataccattgctgagcgactttcgacagagtggtggggaagattctacagcatacatcccctcgtgctccttgcaaatccatttgcatctcaaagtacttgagatgggaaatatgatcttctctcccagtatacatcttccacgtcggcattttgaacttgtgaggtagtggcaggagattgatctctggtgagaagggagttttgcatgctcggtctaactcaagatcattattacgttgtccagccatgccatgaaacatatt

SEQ ID NO: 407506 - DNA, 615 bp, Cannabis indica
atcaagagataattcacattcttttttttttaatgcattactagctggttagttttcttgtgctagttcgtttggtacggctattatattttatataatatataaaaatatgatatatttaaatgcattactagctggttagttttcttgtgatatatggattttggttgcaatttaggttgctctgttagttgcaataggaatttctacgtagagttccgtaaaaatagaaaaaaaaaactattttgaagtgtaaaaatgaaaaaacccctttaatataatataatacaatacaacctaatacaacgtaccaaacgagtacgaaataaacggccttgtaaaatagagggcaaagcactggaagtcccctgtggtacttcttcctaccattttaattccgaaatggtttaaaaagtaagagcttttggatttaaatacacacacaaatggatttaaaccttttatttgactaggattttttaagggattatttaaaaaatacacgaaaacaataaaaaaattacagaaatacggttgtaaaattttttaaatatttttatgtttttatttacaaaaaatacttttttttatagatttttatgttgtattattgtt

SEQ ID NO: 407507 - DNA, 853 bp, Cannabis indica
ttcctggaacctttcccaggtcatggttgtaacatcgtgaatctgggacaccatgtcccgcaagactaacgcgtcctcttgaaattgaaaggtggcacacaccaccctgtcattcctggtgacacccataaaattcaatattctagtaatcaccattagccactgctcggctttcatgacgtttggacctcccagaaaaaccggaggtgcttgcttccggaacctttcatacaaggcttccattctgttcgccgctaccactatctcggcctgagcaacaggggcaggagctgtggttttatgccctaaataaaactcatttcaatataatcagatttacttattaatatagatcagaaataacatttaatgttgcatggttcacatgatttatttcatgattatatgtacataatgtatgaattcatctgaaacccttttcacatacttgatcctgtttattgtgctgtcaacacattggaaagtaaacatgactatgtgaataaagtttcctagatttatcagacacagggttttactgatatgataatctacaacagagtttacttgcatttggagaaatgctatgttctttccagagcattggttaaagtaaagctcaggttggatgcatggagtatgcatcggaagggaccgatattgaactttgacttagatttattaaacttaccgtaatatctattcaagtcaatatcgcctagttgatcctagatcaaatgatcttaatcctgttatgattaggctcaatctcaagaggctattcgtgttctttgatttgttagttaagcctacttttaggtcagggtgatacgtacattttgggaacacggta

SEQ ID NO: 407508 - DNA, 638 bp, Cannabis indica
tatcaggaacacaaacttgagctctatataataacattctgttattcgagattgaaaagtccttaggccaaccggccaatacctcatcttgaattttgactagttcagaatcttccaactgcacccttttgattctttctaacaaatctgattgaagtgtcaagttgtgtaactttcaaactacaaactcaattttagccttaaccatttctgaagctagttgaggagctatcatcacggtgttaaaaacctacccgggacctcttctacttagagcatctgccataacattggctttcccagggtgagacagaatctcgcagtcgtaatctttgatcaattccagccacctctctacctcatatttgaatctttttgagtgaagaagtatttgagactctgatgatcagtgtaaatctcgcatttttcaccataaaggtaatgttgccatatttttagagcaaatactatagcagcaagctctaaatcatgcgttggagagcgctgctcataatccttcagttgacgggaggcatagactataactttgttagcttgcatcagaacacatcccagatcctgtctggatgcagcacagtaaacaataaacttttcttgatctgatggcaaagctagca

SEQ ID NO: 407509 - DNA, 676 bp, Cannabis indica
aaaaaatctcaatctgtccaacactttttcttctctccgacaaaaaaacagtaattatactatgagtttaattatgtttattgtttaacaaacatgtattgattcttgttttagtcactagaccacgttaataaataatttaattcattaaaaaaatatattaaataaagtattcaaaaacatttggctaagtaggaccaaatggcaccactaatgattaatgtctttaataacagcccttctggaagggcattatagtaaaaccaagttgtgggctcgactgggccagtagtgtgtgtgactactagtattaggcgttaggggtattttcgtacttttaatcttacgactagactagctagcgaaattgatctcaaccaatgattgagacacgtgtaaattttgctgacgtggcggtatctgaaagagattgaggaatctaaaagtgcgctaggctagttttcagtggacaagagaagtgggccaggcccagttaagtatgggccccatcttattgattgaggatctgcgtttactgattcgtccagtgtggggccgaaggcttgtgtcttcattattattattagggaaatttacacagtttactgtgttttcccattttctttcttttatactgttacactcaaaaataacttttgtacttgttttttttttt

SEQ ID NO: 407510 - DNA, 534 bp, Cannabis indica
tcctttacctacacatggtaacaaactcatgagtcaacaaactcagtaagatatgcaatacatatatataagcaatgcaagaccggctttatgcttaagtcaccctgagctcaacaaccgagctcaccaaatggttatgaacattcttaagggaagtacaaccactgtaccaaatgcactaaagtactaaccctgtactcgtgttggtagagccattattgtactcgcggaagttactacgggttgtaccacatgcacgacgtaccccctggtactcgtgttggtaacaccgaaaccacactgatatcccacactgtactaacacctttaaaatcatatacatattagtgttagtagtgcaaagatccaatacaagcatccattcatatatagattattatgctatcttacctcgttccagattcaagcgtgcttgaatggaaaatccttgagctaaacagaggtcctaagtcacaaaatacaattaagtaaactacttgaacaactaaaccaaagccctagctcaaaatctag

SEQ ID NO: 407511 - DNA, 659 bp, Cannabis indica
ctagaattggatcttgaatggttttctctgtagccattggaaaactgatttcccttgaattccctcttggggaattttcccttaacaatgagtaatccttccccattgacctcatctttctcatctcccttcttttgaatttctttcgaattcaatgcagccttaacctctgtcatagtcagagtttctttgccatacaagatcgtatcaacaaagtgctcatacatcttgggaagtgaacttaactggattatagcttggtcttcatcatcaattttcaccctaagattattcagatctagaataattctgttataatcatctagatttcttctcaattcctttaactcatccattcgaagtgtgtacaacttcttcttaagatacaacttgtttgcaagagatttcttcatgtagattgatgccagcttgttccaaagacccaaggccttgtcttcatctgaaacttctctcaaaacctcatcaccaagactgaggaggatggcactatgtgctttggcttcaatctcatgtttcttcttgttgtcttcaattaatttcatggcttcatcatcaagcgcctcatagatcccttggtgaactagaaaggccttcattttgattctccataggctgaaatcattcgaaccattgaactt

SEQ ID NO: 407512 - DNA, 654 bp, Cannabis indica
aaagagtacactagacttgctgttctcaccttcattcataatgtggtaaacaagttcgagtgggaactaatcatccctgatagaaaaattaaaggtgatacgatgccttatcctcaaaaggacttccaattcgacttcgatccaattcaaagcttatgtgaacttctacctactgtttacaataataataataataataataataataataataataataataataataataataataataatagaaatttctatagtaggttaaaagaatattttagtacactttttatctatttcatcatggttgcaactttttaggactagaagtaaatctttttaaaaaaaatctgaattttttacactgttaaaaataaaagtatttaaattttatttctgttattgtaaattattcagttttttttaaaaaaaaatttacagatggaatctaaataactatatcgtagacgattataaaaaaaattaaattataacaaaaaaaaaaaaacaataatatcaccaacaggaccgtctcaaggtattgaaaggcctagggcgaaatttaaaatgaggcctttctttcataaaaatttaaaataaatattatttaaattttaacacaatatcaattttaactttttttatcaccatataaca

SEQ ID NO: 407513 - DNA, 800 bp, Cannabis indica
aaatattttatttcaaaaatagttttcatgacacccacacattataaaataatctccgtaattaataaattacgtttatttaatcaataattaaattcactctaattacaccaagtaagatcataatcttactccattactaaaataattacatattttataaaatatgcctatttatatactatattaatttccaggatattacaactttccactgtgttgacaacacaataagcaagaatatcaatgtgataagaatttggatgaatttataaatcaaataaacaaataaatgatcacatgaaccaaataacacattaaacaaacaatgaaaataaatctgtttctttattgataactgaatagaaaaaactacattgaaatagaattttatttagggcacacaacccaacacttcctatatgcatctaagcccaacacttcctataaatttctgataagtaaaatgatataaaatatcattttctaacttttgatttataaattaaatatttcataaaataaattatttttgaattagaaaatattatgcttagaatatctcaaaaaaatatataagttaattttaaatttttaattatttagtttatcctataagattattttaatataatatttctgttgctcctcaatccgcccaaaatacgtggaccagtcgagaggggacacgtggatcagataacttggaaagatttgctaagtctttttatgccacctggaagcgctattagcatgggtcccggaggagacccccggagcacaaggtactccaggaagct

SEQ ID NO: 407514 - DNA, 580 bp, Cannabis indica
ttttcaatgtattgcgaggtaataagaaattctactggacagaagagtgtgaataggcctttcagaacattaaacgcatttagcgacacctccaattttggaaaaaccaataactggagaaactttactcctctatctagccatctcagaagatgcgattagtacgactatagtgcgagaagagggtaagcaccagcaacctatttactatgtaagtaaaaggttactgggggcagagtcgaggtatccccgacttgaaaaactcgctttatgcctaatccatgcgtctcgcaagctacgaccttacttccaagcacacccataaaagtgttaactgatcaacccttgagacaagttttctccaaactagatgcttctggaagattgataaaatggtcgatcgcattggggcagttcgacataacataccacattcgaacatccatcaagggccaagccttggcagacttcttaatagaaggaataactctagaagaaattttgcctgttcaccgagacgcagacacttggaagttatacgtggatggtgcatccaacgagcaggactcaggtgcagggg

SEQ ID NO: 407515 - DNA, 502 bp, Cannabis indica
tacatcttattttttagtagtcctccttgaaagaatacgccgaaaatacttgtattaatttgtaagatcaactgtcaatctaaaataacatatgcattgaaacaagaacattacaaaaagactctcataaatactaaatattaaatgagataaaaaatttactagaacaacctgaaatttcctataataattacatataccaagcattatttaatatttataatatatttatatttttacctataaatactaaattatttaatgggctatcctgaatgagaaaacagtattagctaatgtgttgttattagggcaaccgaccatactgagtgtttgttatcttattacacctctatttttttcttctaggtataaacaataatatatctctctatatatatatatatataatactcatactactttaattttaacatatagcaattaatgtttatgacataactatttgatggttttatttttttttttttttactagttag

SEQ ID NO: 407516 - DNA, 932 bp, Cannabis indica
tctttgagctgagataacaaatctgcatttctttctgtgcatattcttcacttttttaggtgagaaaagtagtagaatatttcaaataaaaatgagaaaaaataatagtgtacattttttcgtcgagagatatgaggaaaaaaaaatgagggtgtcagatatgagattataaggatttatagctagtcttatagattatgatatggggttagagtattgaagacttttattttcggttatatatatctttagggcttatgtcttcagttatttcgaaaagcaaagacatagattcataattattttctttctttttctctatacttttgtcttcgaattttaattttttatcggtaaaaaattgagtatatatatatacactatttttagtagtaaaaatattgaatggattggattaaatcatgaacactcgtattaaaaattaatactttatttaaattgtgcgaacgatcaaattaggtagaacaaactattaggtgttgtgagggtctgaatacaggatgaaatcgagtaatttttatacaagtgtatagatgtttaaattaaataggaatataaatattagtatgttaatcataatattagtatattttttctttaaaaaatttatattaaatcaccagacaatatatattacatatattaaaaaaataatttagttatccttgaaaaaatagatttatattttttaactaaataaataattaatttaaatcaaaaaattatatttaattcgtgatttttatattcgtgtagttttcgtgtctgtcttcgagcttatcatgtgtcatgtcatacttaaactcatatttttcgtgtcgtgcctaaacttatattttttttcgtattatgctaggcttatgcacatatttttacgtgttacgtcgtattcgtacctctcggatttgcgt

SEQ ID NO: 407517 - DNA, 554 bp, Cannabis indica
gtttttttttttttttgggagatttctgtttgtttttactttttatatatattaataataattaacaaaatatcccatttcccatttattaacttttgtggcggagaatgagaatcgagaaggttactcgtagcgtaggtaaggtgaaagtgagagaatgaaaaacgacaatgaacatatgtatgtttgttatggttacagtatggatgatgagatgagagtcagagagagagagagaaacgttgttgacagagatgcaacatctctaaacatgacgtggcattcatgcatggaaaagtgaactttctactacctcctctatttttgataacactaaattaacaaaaactaaataaatacacctgatttttttttatgtttcacaactcacaagcctcttttgtaaggaaaacgcgcgttcttgcacaaaggtcataaattcattcccggttttttgctgatcattagcttagagcattttaaatagaggtgtaaataattggtgaaaatttaaaatataactcatttaataaaaaatatattttaatagtatg

SEQ ID NO: 407518 - DNA, 806 bp, Cannabis indica
ctaagataaaactcacacaccaataccaagttaaataaataactacaaacaaaaacattcattcaacatgctctaacacactaaataattacacacataccatatttacccccaaaatatccattcattatgttatattaaccagtttttattttagttataaccggtttgaattatttcattgttatttatttttatttattatatcattgttgttaaaaccgattttattttaattataactagtttgagtattattgtgctatttatatttattcattatgttacagaaccggttatatttcagttataaccgggtttagttattttgtgttacttaatttaattcattatgtaatagaatcagttctatttttatttatatttgagacatttatttctcgtgacttttccaatgacttttttccgacaacaatgacttttccggtgactttttcggcgcgagtgatttttccggcaccgttgatatttccggcgtcggtgactttcttgacagaacttattattattttacaaatataagatttctatctttttttacaaaaatatggcataaaaaatcccatacaaatgtaaaataataataataataaaaaacccataaccctgtagtattatttatttacgccataaaaaagtaaactcttataattttctcatatattgtgtaatttctacttatttttatgtattttttctattgtatagttatttttagtttatgtgcatttgttatgatgtatatctttagtttattccagataatcttttgttgtatagattgt

SEQ ID NO: 407519 - DNA, 835 bp, Cannabis indica
tttttattatatccgagacatttgatccccacattttttttaaaaaaaaaattataaccggttttatgaggtattatgtattatgaactattttattgtggaactagttttgtttttaatttatatttcagtgttttaggaactgatttcttctttgtttttaattgtaatcggtttgagttattgcgtgttacttgtttgtattcattatgttatataaccagttttattttagttataaccggtttgagttatttcgtgttatttatttttattcattataattctattttggaaccggttatattttaattataactggtttgatttattttatgttatttgtatttatttattatgttacataaccggttatatttcaattataaccggtttgagttattaatttttattcatataaccggttatatttttagttatatctgagacatttactttggtgacttttccagcgacgttgacttttccggtgacgttgacttttccgttgacttttcggtgacttttccagcgacttttccggcaaaacttattgttgttttataaatatgggatttctatttttttttttacaaaaatatggcataaaaaaacccaatataaatgtcaaaaaaattaaaaaacccaataatcctatagtgttatttatttattccataaaaaagtaaaccataccctccatacccatatatatgaaaattcctcaaataattaactatttaactaaaactggattgacttctcattcgaaaactaaaaatataaaaaattgcgtagcctaaccccgtcacgagcagcacaacctagtttttaa

SEQ ID NO: 407520 - DNA, 555 bp, Cannabis indica
atttttatttaataaatcagtattttttattatttattttaaatttaaaattaatttttttattttaaataatttatatgttctataatttttaattacaattatatatgtgtatcaataaactctcaacacgtggctttttttgtcagtatttaactgtgctgttaaattgggcatgaatggacaaacaagaattaggaccttcagaactattaccgctattttttgaggttgggaacttatctgtatcaaactgaactttttgaggacttttaccgcaaattttcctattatatttttgtaataataatttatttatttaagatacaattctttggtaaagttgataggagcaaggacagaagtacaacagttggtggtcctcttttatcagttcaaagggtaaaattgtcttctcaaacatggtttttggcggactttgtaaaatagtacaaaatctgtcatacgtagaacgtggtttaatgtattgtagtatatcagatatgttataaatattaataattatgtggatgtccaaatcttttatttattacc

SEQ ID NO: 407521 - DNA, 379 bp, Cannabis indica
ggggttgatgggtggcgttgggtgttggtagagttgagagagagagagagtcggactgagagtaggaattcaaatgggagggttagttttagaaaattagtaaaattgtcatatattaccaattttagtaagtatgtatttaggaaaaaaataatggggttttgtaagtatggaaattctaaatttcccttccaatattaatgttgtagacttataaattgatttaacgtatccttaaaatagataagagacttttttaaatagaaaaatatcttcactttatctcttagcgttcttttctctaatatataattataatagttatcattacaaattaaatatatataataacaatcttttttagaaaaaatattattat

SEQ ID NO: 407522 - DNA, 696 bp, Cannabis indica
actttaaaatgcaaccaaacaaaggaatggaatgaaaattatttcctttccattccattccatttcattacctccaaccaaacgccaccttaatgaaatttattgtaaaactgtaatatatttttttttttatcatgatatagtattatttttttgaaaacaacatatagtatttaatcatttggaaaaaaatatataatatataattgtataaaattaaaaatattagccaaataattgtataattgtattttttttttttttttttagaatagattgtataattgtatttaataattgtataattgtataatattcgctcgagatatttaattattacaacattttattattattattatttatttattttatttttatctaagaagagtaatttggatagggtaggagaaatgtgaaccacttatttaatcttagcaagaaaaaaataaaactctccttttaaatgtggtaacaaattccatttccaacaatgaaacaatggattatctgaaattggatcatataccaatattatttttgttgcaatggatgatgatggtgaagccaccaaaccaaaccaaatcacaagatcaaaatcaacacaaccagttgtagcagcagccatagtcatggtgtaatgtcatgtcaatcatgctaccatgcctttcccacactcaccatcatcatcatcat

SEQ ID NO: 407523 - DNA, 873 bp, Cannabis indica
cgaactaccttagtgtatgagtagtgccccacacacatcaagtgatacctcaatcatagtgaggaagatcgtgaagaaagatcatcagcaaaggaggtttcagcatcaaagattcagagaaagagatccaggttcagatattgataatgctctgctacagaaaggaatcaagggctagatatctgaacggaaggagtcatattattccgctgcacccaatgtaaggtttcttaaactttatatgtgtttaatttcatcgttttagaaagttcatatttaggatgttaataaacatacttgtgagtagatctaagatcctggtaaaataatttccaacagtgaaccgagcccgtttctcatgaaactactagataagcatcatttttgacattcttaggcaattttctttattcttcaagtattcccaataaaattaaacaaagaaaaaaaagaaaaacttaatcattttttttccacttatctttttcttttaaagattttgatttttttttgatttgttattgacattaggattaattagatttgaattctaatcctatttgatagtgtcatcactactacaaaaatgggtttcagtgacacttgttgagagactctaaaatgctttagtgacacttcactgcgcgtcactaatgtgggtgtcaggaaaagtaatatatagtgactcttcatatgtgtcacttaaaccttttagactctctcaaagagtgtcactgtagacttttagaatctcaagttgtgagactctaaccacaacagccacactgtcactatatcttatttttaattttttaaaaaattaattttacccaaaaagaccacactaagagagtgtcactatatcattatttt

SEQ ID NO: 407524 - DNA, 948 bp, Cannabis indica
ataaaaagcacattaagcaaaatgactaattaattaatattaataaaattgatgaggatttatttattttatttgaaagcatggatattcttaatgaattattaagaaaccatatctattatctatctacatctaccaaaatgaacaatacaacgagatttacaatcaaataaacgaatgatctgagatttttggactcaacttgaaaatatttgcattccattaaagtttggtggttgaacatttaatgagccagcctaaaactaaagtttctagttaagcaataataataataataataaaaaaatagtttctacaagaaattagggtcagacaattatggtatacgttattataaagtatatttatttaaaatgtactactttagcttcttgccagctagcttggttaattattattttaattttttgaagaatgctagcttggttaattataatcctacctattacggccattaaataaaactaatcagcaaaaaataaaaataatctttagaaagatacagattattatcatataatcatttagtagggatgtaaacggaacggggtacgggagtggaaattactcccccacatatccattttttgaattcatctcatacctgcttcaatactcatttaaattaaagtagggatatggtagggattattctagggatgtacaaaaaaattcgtaaaccgcccaaaccgaaccgaaaagactgataaaaattacaaaccgaaataactcaaaaaaattacaaaccgcccaatcttttaattgggcgggtttaaaataggtccaacccgcccaattaaaccgaccaacccgattttgtacttttaatttttttttaactttttatttttattatatataacataaataattaaatatataataatataaagttataaacttaattattagttttaaagtcatata

SEQ ID NO: 407525 - DNA, 328 bp, Cannabis indica
cttatttctttttgtttttttaattttcccgtaaaatagtttttccaaaaaaagccttatttttgtaaattttgctaaaaaaaaaatcatgtaaataatatttaaaacaatctattctctcacaataattatgctcttttttcttttttataatacaataatcaataataatagtaaaatggatatgacttgtttcaggctacctaaacaatctagaggcaacaaaaaacaaccatagatgaacaaaggttgggtaaaaaactggagatattggatactttgatgaagaagggcaactattgttgtggatagacttaaagagctcatc

SEQ ID NO: 407526 - DNA, 652 bp, Cannabis indica
gtctgcagtgctaagcaaaaagagttcattgagttagtgcaaaccgaggggatgtcgatcatagaatatactacaaagtttgaccgtatggctaagctcaccgtgggtatcgtgccaactaactttagtaagaaagaaaagtacctggtcggtctgaatgtgaagattaggcgtgatctggtgatcactaccaatgaagcaaccacttatgctgaaatggttgagggtgctgtgaaattcttttcaggagccctgtgtgactccgaatgttggtggaacccccacttttcctattcctgcctatgggagggatggtggtgatttcaccacagatctaaagaggaaagttaccccagcacctggtggttcggggcaaagcaagcggttccgtgggaaccaaggcagaggtggacgccagggttactcttaccctgagtgcccacgttgtaagaaacatcatccgggagagtgcaaccggaagacatgctttttatgtggcatggtggggaatttcaagaaagattgccctcaggcaaagaaagaagagccgaaagatgaggtaaaaccggtacctgctcgagtttttactatcacccaagctgatgctgcagccagtccttctgttgtgacaggtcagcttcccgtcaacaac

SEQ ID NO: 407527 - DNA, 578 bp, Cannabis indica
taatttaacataataatttataaaatattaaagtatttttaactaattagaaaatgacagtacctttaaaattgcaatagtaatgctattatgaaatggtactagattttcttgaaagggctttattgtgtatacgataaaatcttcttggcattgatatgtgtgggttcccatgtcgacctatattgaacacaattttctatctctatcattaacgatatatgcatgcttgcttttcataaaatatctacattgtcttttctttttctcttgaaaagtaattaccaacaagattttcttttgcaaaataatgaggttgattcaacttaattattatcattatttgcaaagtaaggtatacatatgtatatatataatattaaggaagatgtttcaatggttatacttttattgtaactatcgtggttatatttttttaagccattggattaatattcaatggttgtgattaattgaaaattaaataaaaataaataataaataacttgtaacgtgaaagtaacctaataatttatttccttataaaactttaattaagattaattatattttaaaat

SEQ ID NO: 407528 - DNA, 503 bp, Cannabis indica
agcttctaactgatccgattctgctcaacatttgaaagattcagtagaagcggaaggaatgggtgaagcgtggagcgattgaaggctgggatagatgatatgggacaaattgaaagaagttttagagtggaagatgatgaaatgtaagagaattgatgtggctaaatttagtgtttgggaattgagaaactgagagaagtaaaatgcagaatggtttttttgaatgttaggcaggcaacattgcaacgtctcccctttaaattattttattaattaattaattttggagagacttccggaaagaaatattctacacttgtcataaaatcctacttccgacatatcctacatatattaaaagagccaatatcactactattcatatttcatgtcaactaaaacggttattacgtacttcttgtatactagtaaaaagttacgtgcgacgcacgtatattaaattttatgctagtttttttctacgttattaaaaagtgatacaa

SEQ ID NO: 407529 - DNA, 185 bp, Cannabis indica
gtgtggacactactctatcactaagaggctcgaaattactcaaggaagaagaagagagtgaaggtggcggatagggttttgaaagagaaggctcaggtttttctctgaaggaaaccagaagtgaaaagtctaaatttctgaagccttcactatctatttatagcattccacataggattaggttt

SEQ ID NO: 407530 - DNA, 712 bp, Cannabis indica
tttgatagcatctcaacatactgacccaattcaacctttaatattgaacaatgacaatcatattatttttaaatcaacaaaagatattcataatcacaaataccaaagtattaaatcgacatggtcaataagtctagtagtgtggtaaggaattatgttcagcatgtgattaatttaaaataatataatatccttatcagtcatcaatttcactgatatcgtgatgcttagtaaataagctagtgaaattaaccatacactacttaataaataattcagtgtcactaaatatgcttaaaaattaagccaacaaaatatcattatcgttaattaaactcaaaagacaataatcacgacaagatatgaactacatgctttcaattcaatcattctcaaaaatataacaaaacataattgaaagcataaacatccaataaaaaattattggcccaccaagtagttcataacatcaacaagtaaattgcatataaatgtaatctcaaaagatagaacaagaatttcctactaacccaaaagaactaaagattataaaatactcgtatcaacatgtttattaaacaacacgacacttaatcctttagttagaggatctgctaatatcgatttggtcttacaatattctatcacaatgtctcctttcttgactaagtctctaacagtaagatactttatttccatatgtttagaagca

SEQ ID NO: 407531 - DNA, 810 bp, Cannabis indica
gagactatacccatcatgtatttttttttcattttatctttttattttcaaaattatgtttgtttggctgcactgttactgtagctataaccaattaaaagagattaaatatatataaatatatataaatatatatatatatactagctaatattctaatattacatgtatacttgcttatacttttagtttaaattttgattatatatatttttaattgtataagttatatattataaatactttttttattttattattttaaaaaacattaataataaaaatatttttaaatatatacaagaagttttaaaaaataataatagaaatatttttttaaaaaaatatatatgaaaaagtaatataaggatatattttttatataatacacttaaataaatttaaaaaaaaataacaatataaatatatataataaatttaaatttaaattacaatatttttcttatataattattttctactttatagcacgaaaaatatatatttaaaataaacatcttgttttattacttggtaaattagaactttgtactacttctagtttagctatagtattcaattaaattgtaaaattttaagaggagtgttactgtcaatctcctattacaattttttagttaaatctatgcctaaaaacatgtgatgatttttttttttcaaatttctttatggcgatgttcattatgttgacatcatcattcctgtaaatttttaaatagtttacagtgtcacgaaaatacgtttgagttttttaaatgcgcgtgtaaaactagaatatctagaagtttg

SEQ ID NO: 407532 - DNA, 562 bp, Cannabis indica
gtaacatgccaaactcatcttgtaatgtttatactatttcttctttttcactttggcatagttaattgggctacccatcttttagagttattcataatgtactcaatcaatgtaaaatgccatttactaataaaatagtctttgaactctgcaatgcatgttgtcaaggtaaaatttacaaattacatgttcttacttttcttttccttctgcaactattttctcctttcacatttctggtcctcaattacatcagtctactcctcttgtgctactctgcctaatacattcatatctagctcctcctcatcttcctcatcattcagctctttctcattttctccatcatccagttcaaactccacttgcacttaatctggtcctcctccaatgcttctgcatttcttactattcatgactcaccaccaacatcatcatcaaccactacagttcatgttactgttaatgaccatgctatatggtcacaaggtccaagctcagggtgtagataggtgtataaacttaaaagaaaatcatgatggttttgtaacgtccccgcttc

SEQ ID NO: 407533 - DNA, 569 bp, Cannabis indica
cactgacgcctgtacttatgcctagtatgtccctaggaaaattgcatcacctaatcaggtgagcccatacctacgctcagtactcatcatatatcattaacgcccgtacttacgcccaatacgttgccaagaaaatagcatcacctaatcaggtgagcccgtacctacgctcggtactcatcatatatcactgatgcccgtacttacacccagtacgtcgtcagaaaatcacatcacctaatcaggtgagcccgtacctacgcttggtactcatcatatatcactgacgtctgtacttacgcccagtatgtcgccagaaaattgtatcacctaatcaggtgagcccatatatcacatgcataatatcatcacattatcgatactcaaccaatcaatcattcattatataaaaagattaactatatctcaatattaattaattcataacaatactaattatattacatacaacgtactatgtagtacaatatacttttcttacctttaatctaggttcatacatgtcagcctatctaagtggagaactatccccgataatcttggcccta

SEQ ID NO: 407534 - DNA, 512 bp, Cannabis indica
acaactatgattacttttactattagagttcccgcacaaatgattttaagatcattattagaagtttttacaagtttgttagtcagatttccaagagtgtccctaatctgtgtttctcgtggattagttatgcatgctcttcggatgaatgattaacttgtttggctagatttgaatattcttatttttgttgggtgtatagtattattttgattatcctcgcaagaatagtatttatttgatgaacataagatgtatagtattcgtaactagcctgtatggcgttattatatttttaatgaatttattcattgtaaaaaaaatatatttaaaataaattaattttaataaaataaataataattgaatctcttatttttcttaaaaaaatattttacattttattttaatattaagaaaccatatcaacttcagatttttcttatatacttagattttcaaattttttttatttacatttgataaaatataatataaaaatattagattta

SEQ ID NO: 407535 - DNA, 605 bp, Cannabis indica
gtccatctagtttcctttttcggccattggggctaaagcttttattcactccaatactagatgaggtcttccacacgtccctcctctgagtactctttttacgaatcaggctttcagccccctcagcagtgagtgctaagtccacaatctgaggataagtcttaacaacccctgattgtttggctgccataatcacatctctagcaatatactcttcaagacctctaatgaacttagcttttcttgcagcatcactggccacttcatccaaagcaaacttggccaacctgtcaaacttggtagcatattcagtaacagtcatgctaccttgaactaatcgtgcaaactctttagcctgagcagcacaaatggattcattatagtatttctcataaaacagtaccctgaatgcattccaagtcatagtattcagattatgaccttggaaaacaatctcccaccatattatagcatcatcccctaacatatagatagcacatcgtagtcattatctttgacccgcataaaatcaaagatggaagtaatcatactcatccactgtaacaccctaactaccttaggtgtattacgtgatttttaaacgt

SEQ ID NO: 407536 - DNA, 1207 bp, Cannabis indica
taatatacatagagattatctttaatctcttattatcttttcatttaagcttttttttaaaaaaaaaagaaattaaaataaatacatatattttatatataatgatagaatattttctgtattaggttaagcagagccttgtctgttggacccaccttggttggcctttgttaagctctaaccattgaattaccgtttcaatttttgctcttttttttttccactgagagtgacagatcgattttaggaatgcatatcgtattcgttgaattcaaaactttaataagcgtacaagttaattagctacataaagataaatggctttttgattttttccttagaaaataaaattgtgagagtccatcgatggatttttgtttttgataacgttgtgtgatatgtgtggcattttagactttccatgtggtggataattagtttcgacttgtcaccattggtatttggcacttatttgtatgtattactatactataataattttgtcaaatgaattaaacatttattaattattactaataattttgctattaatttacattctatatcatccacactgaatgtacaaaaatatgtggtttgtaactcttcactttgtatttttttttttttttggtggtggtactgtgtggttttaaaacttatatccaaactccatcataccacaatattataatatatggaaattactttatatactatttttttaatttttcttttttaaatttaccgtttgggtttctaaagtagctgcagcactagttacaataggggtttctctacgatttttgttacaatttaggttgcagcgctagttgcaataggagtttctatgtaaaatttcgtaaaaatatatataaaaaaaaactgttttgaagtgtaaaaatgaaaaaggccctataatatatatatatagaacacttcttgataggtattaccatgaatggttactaaacaaatttaactataaatattgattttaaaaatatcaaaccatcgaattttgatctaataacgaataatgaaatcacaaatttgaatttctatgcttaatttaactacttaattaaaaaaatatatcaaaaaatatctctttttacactatatcaaaaatatgttcatacaaaaatatttaactcaaactcaactttttattttttttattttcttgctaagaaaactttttttt

SEQ ID NO: 407537 - DNA, 587 bp, Cannabis indica
ataaaccaaacatcttatattattccccttactattctcattacattacattacattactattctcattaccattttgattacattaatgaactaaacaccacctaaaaatttatcaagctttacttgtaaaacaagcctgaatgattttcaaaaatcctgattccattcttcattttgttcttaaagtaaatactttcaccattttcactttttagatgctcataaaggtcataatcctctagcttgcaataatctcataaaacctaaccagtctggtgttaataaaattaaagggtggtggtcttcactttggaaaaacaaaatatcacctgaatttaaaaactttaattagagagctttttaatcatatattaccttgtgctttgaatcgttatcagaaaaatatcattcctaacaatgtttgttttgttcgagttagaaattcttctaacttatcttcttttcattacaataataattttttagatgttaccaattttgtattaaggcttctcatgaattaaaggctaacgacttcaaattagggttgtacatcggtcggtttagtcggtttatactatatat

SEQ ID NO: 407538 - DNA, 571 bp, Cannabis indica
aataaatgcgatttgaattacccaattatttcattctaaataatcaaagatactctacagatgatctacatcgagtagggacaaatttatcgttctatttaatatattttatccttaaaatactttagctacttgtaaatggtattttagtaaactaatatattactgaaatgagtgctcaatcatttattgcattacgccaaactcaaaagaaatcatcatttcacttctaaatagttatagaagttatagatttcatatgtatgattagcgctcccactcaattgtacaactatattcccaagatgtaagtattaagaagatctacttggtcaactttaacgaacaagtcaaagaacatgaataatatatttaagccagaaactaaccatcttaggattaagatctattgacctaagatcaaataagtgatattgacttagaaagatataacggtaagtttatgatatcttatctaatgtcaatatcgatccagtctgatgtatactccatacatttgataatagtagacttttctaatgtcctggaaaggacataccacttatccaag

SEQ ID NO: 407539 - DNA, 509 bp, Cannabis indica
atgtatgtttaatcaactgtacatttgtcttcggatcttcttgggtttgctgccatagccgagcattcctattcctccatatttgatacaaaagggcagcacaagcagcagcaaaaacctgcttttggaaagcagagtatgaccttttctctataacatgcaccaggtccattaaggatgttgctggtgtcttccatcccagccagttcttgatctgttgtaagcattcagaagagaaagggcagtgaaaaaacaagtgctcacaagtttcagcattccccgagcaaagcaagcatgaaggatctgttatgatctgaaatctgagcagcctatctctggtctttaatctattttgaatggcaagccagaagacaaagctgtgctttggggtattcagacgattccaaacttctttactccatttgaccctcgaaaccgtggggcatagccatttgtagccatctgcaacattgtattttttcagagcaaaggttgtaggatcaactaga

SEQ ID NO: 407540 - DNA, 621 bp, Cannabis indica
cctactcaggaggctggaatagaaaccgtaaaaaggaaacgcagggggaggccaggcagtgttataacgttgctcgcccacctacccattttgatggtatgcgaagctattgagccaggaatggcggaagaagatgagttggatccccgtgtgggatccaaaaaaattgtagaacccatggaggatgtcgaggaaatgtcggtgtgcgacctcgaccccgccaaggtccttcggctaggaaaaagtctagagcctgaggaaaaagaaaaaataattaaaacgctaaaggttgccacggatgtttttgcgtggtttcaagaggacatgactggcataagcccccacgtcataatccacgtccttaacgtcaacctggacatgccaccagtcaaacagaaaagacaccccctcgactcggtaaaggcagaagccctagagaaagaggtggacaaattattaaccagtggcatgatccgagacgtgtattacccagaatggctggctaatccggtgctggtaccaaaaccaaacaggacatggcaagtttgtatagattttaccgatataaacaaggcctgcccaaaagactatttcccttgccacgatagcaaaaatggtgga

SEQ ID NO: 407541 - DNA, 539 bp, Cannabis indica
tgtccatttttcgatgtatcctgctcctatttatggttacataggagggcaattaattacaatcaaattgatttcccacaacaattatctcttgaaattgtgggatttgattacgttccacgtaaattaaatgcaattattatttgaaaaattacacaactatgatttatccgcttttaccgggtcaatgttgatgtggatttaaacacgctccaaagtgtagctcgcagagttatctcactagggtagcaacaataaccctcacagcgagctgaagcttttcccatgtcttttcgaggttgataatgtaaataccgtcgtttatgctattgaagacataacactccatctgacaatcgcagttcttggtgacaaggtaaacttcagcagtccacatcatctgaatgtcagcttctatatgagagagctggcttgacggagcagtgaatcttattgaaagatgtctaaagctgattagtgaaggtaagtagccttcctagatggatgcctcgctattcgttattcaagttcattcaact

SEQ ID NO: 407542 - DNA, 477 bp, Cannabis indica
gtcttgttatttatactcatgacttgttatcctttatttatatataatattaaaaatatattttacatttttgttttgtgtaagaagatctttatgtatattttttttaattaagcatgattgcgtatgtcttaaaaagatattataccaagtaatgcatgtaattaatattgtaaatgcatatgcaggacatgtttgccgcaggaactgatacaaccttcatagtccttgactgggcaatgatagagttgatcactaaccccaaagcattagaagaagcacaagctgaacttcaaagtgttttgggagaaagaaaagtggttttagagagtgatttgcctcaattgaactatatgagtagcagtcattaaagagacttttagactacaccctcctgcacctagtgttagtccctagagaatctctagagtcatcgtcaccattagagggatatgatattccagccagacaaggatc

SEQ ID NO: 407543 - DNA, 516 bp, Cannabis indica
tgccagatgatttttgacttacacttgaataaaaattttaaaaaatataattttaatattagttaccgtaaaaaattaaatttaatattaatctgcaatacaaaaataaaatttttgtatatagtaaattactcataaataaataaaaaatgtgagaatatttttgcaaaaccaaaacataacctaaaaacaacatttaaagaacaagtccaatattttaagcctaaaagataaacaacttcgaagaaatatagtaacaacactgtaacaacttaaaaaaaatgaaatttaaaaactatttgtcaatccagcaattatgataaacaaaaaaaaaaactaaaaataaacaaataaataaccgttgataaaaatgctgcaaatccctgtacaaccaaatacgcgttgaactgtgtaatataaaaacaactcaataacaacataaaaataacatcaacaaaaatacataaaagaaatacaaaaagaatgacacaaaacataaaaccgtcatgataaacg

SEQ ID NO: 407544 - DNA, 590 bp, Cannabis indica
aattgtgttcactgtgcaggtagtgcggattgtaatatttttttcaaaccaaattgtatatttaatttttgtaatttctcaaattgcaaccgcactgtgagatcttaaaactgcaaaaaccatactgcaaaaatacgatgtggtgcaatgaagtacaaattaaccgtgattgttacatatttaatgtaactattaaaacctcccccttttttattattattattattattattattattattattattttattattattattaagtataagtaattaggaaaggttatggtatcattttgacgtgagtaatcaaagatcattctacacacttctaactattgaagaaagtacgaaaaggcatagaaatgtaatccaccaaaaactaaataactgaatatatgggtatacaatcacttggggctagctcaagtggtcataggtgggtgtgtgagtattggaggtcctgggttcgagtcccaggtaaaacatgttgtaatatataaacgcttaaataaaaaaaaaaaaaaaaaagaaatgtatgggtatacatatagttaatttttttttttttaaaaaaaaaattagtaga

SEQ ID NO: 407545 - DNA, 740 bp, Cannabis indica
acggggtccatcaaatctgaagtatttagtcgacacaatgaggtctttcattctcaaatggtgctttggtagatatagagagcttcgaatcctcacttagctccattgatcttaaaacatgtcaaagatgtgaaaatatcatctattgttttacaaccaactcctggtgatatgtctgtagtatatgtctgtgagttgccgtgaaaatcaaggggagattacaacaaagcaaaagccctggctttgggtgttcgacctgggccaaagtatagtcaacttgtctaaggacaatcagtaaagtcagatcaccaagatatcatggtgagttatagaaacataataaagttacttatttgttatgcatttgatgttttgaaagtaagttttatttctccaatttctgtttaggttcatccaagtgatgtaatggactcgtctcttcccggtcccattgtactccttgtagattgccccaatgagtctcatttgcaacagttgttgtccacagatcatctcaataattatttcacagacttctcgggttcacccaggagttctaaggtggtcaattgtattatccatttgagtcctgcatctgtagttaacagcccgaagtaccagaattggatgaagagatttggttcagcacagcatattatggctggacatgaaaggtttttttgctagtttgtcttgttttttcttcttctcttaaaaaatatatatatatataatactaa

SEQ ID NO: 407546 - DNA, 673 bp, Cannabis indica
gaccaagtgtacacaacaatcactactcttgcaacctgggaccacttgacaccagacaaagataagtcgcaagaccatcacttgcaaactgcagcttatagaccatgggcgtctccatattccttgggaccactaatgtacctcaaaccattagagcctataaatacccctttctcagatgtgagtaggagttgaaaaattattgtaatacttgatctagagaaatgtacaaacttcaatctttcttcatagctatttcaaacttttttttaagttttaaaatttcttgattttacatctaagtttcaattttccagccacaatttagttgacaagtttttgccgttaacattagtcattttgatgatttatatattgtttagatattggatatgtggtttatttatatttttgctatatatattttggtaaaaatcaagtttttgtaaaatttgtatttttttttgggattttatttttggaatgcccgttagggtacaacaatagtgtaatttagaagttagaaataaaggttccgtacgataggggttaacttcttgcttaaagtcattttaggcaaatgtcgtactactatcgtttaatatcgtacctatcaactaagctattttcaaaaatatgcgaaaaattattaaggttatgataaaaatggcat

SEQ ID NO: 407547 - DNA, 547 bp, Cannabis indica
agggagagagagagaagaccaaaaatttaagtatccctcctgcctttgtcacaattacaaacatgtttgaatatatgtggtaggcctgtagttaaatttacttatgtttggagaaaggatagaggggtgaaaatgacgtgtacatgagtgatgactcattggagagagaaagagtttgttaggcttgtttatgctgtgataaagtgtgcttgtagttgcaaagtgggaacattgggaaattggtggtgaattgggatagatcaagctctctagttcctggaggggctctctttattttctctactgttttatcaataaattttgcctaaacatgaacaatttcttaagttccaggagtgtttttcttcattctctggtattgtttctgagctgtttaatgattttgtgtcttcttcgttaagtttcaattagaaacttgccgatatgttacctcttcctaccactgcttttaatctaattttcgacataaaatacataatagacatatacatccatcctatgtacttgaatagaaaaaaaaaaaaaa

SEQ ID NO: 407548 - DNA, 530 bp, Cannabis indica
tatgttctttgttgctggtttggtttaaattaaggggttaccttgttgtttgagtcaattggagtttatgaactccaacttgggctctaatggtgattatatgttttgacttgtttattataatttgatgattggaatgtgttatttggggtatgagcaggtgttctggaagttatagggaagtttgggcttgatttgaattaaaggggatcgaaattttgttcccagctcagaaccggtcgatcggttctgggaagcctcttgcaaccggtcgaccggttggtacccaggaactggggttccggttgggaaccggtctgccggttggggctttttcccgagccctagtttttcccgtttttacttaatttagggtataggcatactatttatcgatagggttaagtttagtttctattttaaatccccaaaaagtgttttagcgtgtctctcatcgaattctaaacattatggtttagggccctataaagcgtcgagctacgttccactcaggctgaccggcacacttg

SEQ ID NO: 407549 - DNA, 568 bp, Cannabis indica
  modified_base (64)..(64): a, c, t, g, unknown or other
tacacaagaaaccatggcacaaaagggaggagttcaagtagggattccaacagagatcatcacnctggaaacccaagtcaccaagaagcctaggatcccaatggatgctatcattgtggaaaacctggccatcttaggagagattgctacttttggaagaaaagcaacaagtacaaatctgatggaaatgacaataactcacaaaaatcagacagttacaagcatagggaacatcaagaagctaattacagtgatggctatgatagtggagaagtatatgtggctgactactaatcttaaggatgattggatcctagattctggctgcacttttcatatgacaaacaacggggaattattatctggttatagggatgtcaaaggaggaaaagtcatattagggaataatcaaacatgtggaattgaagtcatagtgacagtgagcttcaagatgtttgatgctgtggtcagatcacttagaggtataaggtatgttcctaacctagctagaaatttaatttcactaagtgtgcttgatgacttgcagattgaaagtaaaatcaaagat

SEQ ID NO: 407550 - DNA, 503 bp, Cannabis indica
atggtaataaataaaaaatttggacatctacataattattaatatttataacataaacttatataaatgcatacttatctcctctctaacaactctcttcctctcccagtctttttgtgtcgttagtttcttagtttgtagccaaattttttcactactatttaaaaacatcacataataatactacatcttctattaacaacaattttatttcgataaatattatattttatagttatatattagtatcacataataatactacttaccacttatttgaatttttagtttattgtgtttgttctttttaatatttacaatttttttagatcccccatttttggatgatttctcaatttagtttttatggtaaaaataaaaattacttttatataaatatatctaattttttcagttttaaatacattagtgtcatgtcagcaaattatttaagaaaatgaatagaaataaataaagatagcatttgtaatgatagttatagt

SEQ ID NO: 407551 - DNA, 602 bp, Cannabis indica
ggcctcgcagaacgacttggatggattgaacttagtactggtggagatgctaagcgagccaagtatatgtgaaacggaagatgtagagatgatagagagttctcctacatggatgactcctataatcaactatctactcgacggacaacttccaactgacaaaaatgaggcgcaaaaaatcttgtattcggtgcctctctacacaataattgaaggcaaactatatagaagaggttattcaatgcctctacttcggtgtgttctccctacagaagcgaactaaatcatcagagaaattcatgaaggcttttgtggggatcatgcaggttggcaaagcctatctaaaaagatcattagataaggatactactagccaacaattaataaggacacctatgagtttgtcaagaaatgtgataagtgtcagaggttttcacatatacctcacgtgctcccaacagaactaagaatgatgaccttgccctacccattttttatatgggggattgacctaattggggcattatgttggaaattattttaccaggatcttagatcctcacaagtatgttgattaaaaacctaaatatgaactttctaaa

SEQ ID NO: 407552 - DNA, 612 bp, Cannabis indica
ctttacatatgttatggtttatatctacactctttatgttatggtttgaccagtttcctttgcctatctaatatacatatatataaagctggaaaataaatatatattaatgagtgaaccctcaagacaaacaaaaaaaaaaaaaaaacaagtaacacgtaaaatactttattataaacatcatcacgtgaatttttattcataatatcttatatataaatatatatccaactacaaataactataacaattaaaaaccattcatgatcatatataatgcgctagctatataatgagctgatattttattaaggctgataggtgatcttattgtgtgtcccattaatattataggggataaataattcaaaatcacaattaaacttaatatgatctatgcatgtttttcatgatatatggtacttaggttttaattatgtgaccttttttctttcacggccgggttaataaaattgaaaaatacccatattatagtactactcaattatcatctaaatctgattttggaaaatttgtgagagattccttacacaacattataacaatattttttccaagtctatccctttcgatataaatatatatatatat

SEQ ID NO: 407553 - DNA, 680 bp, Cannabis indica
gagacgtcttggttgagggcgtgtactacgtccgtgaggagcttactgctatggttcctcacagaaggcaggtgccttgggcgccaggtgggtaagccctccgtccagggttacaaaggcgcgccttcggactctcgaccagggcggatacttgggcgaattggatgttgggtttgataccctaaataaaactccatttcaatgtaatctctattattcaagatcaataaagaaacataagtgtttttcattcatttgtgtgttatttggctcatgttatcaattacttgtctatttgatttataaattcatccaaacccttttcacatttatattcttgtttattgtgtcgtcagcacaatggaaagtaatcaagattatgtgattaaagatatattcctagatttatcagagcacacggtttaactgatatgacaatctacaacatagtttacttgcatcctggataaatgtgcaatgttctttccagagcattggttaaagtaaagcttgggttggatgcatggagtatgcatcggaagggaccgacattgaactttgattcagatatattaaacttaccataatatctattcaaatcaatatcccccagttgatcctagatcaaatgatctttatcctgatatagttaggttcaatctcaggagtattcaacatgt

SEQ ID NO: 407554 - DNA, 649 bp, Cannabis indica
ctcgtgcgagaaaggaggtattgttgaaatttattgctcaagtcttgccaagttatgctatgaatgttttcctcttgccgtcagacacttgcaaggagttagagcggcttatggccaagttctggtggcactcagattcaagtagcggtaagggtattaattggatgagctgggagcggttgtgtcaccataaacatgcagggggattgggatttcgaagcttgagagactttaatttggctcttttagggaagctatattggcgtttgttggttaatactgattctttggttagtaggctttataaggctaaatattatgctactggtaatctgttttctgctgtattggtagacaatcctagtttcatttggcgtagtattcttgaagcaaaagatcttatccacgcctgtgctcaaagaacaattgctaatgggaaaaatgtctccattcttaatgatccttggcttccacataattcaaacaactatgttgtctcacggcaccctactcttgtgaataagtcggtcagctgcctctttcaagtcggtactcgcgcgtgggatgaggatgttgtgagggacctgtttgttgcccatgatcaggaccttattttgtccattcaacttagtgattcggccgctaatga

SEQ ID NO: 407555 - DNA, 520 bp, Cannabis indica
accccatgaagcctcactatctccttaacatacttcgtaaatcgatctaccacaacccaaatagaattagacaaacctgtggttctaggtaacccaaccacaaaatccatcgtgatgtcctccaacttccattcagaaagggttaaaggctgtaacaaccctgccggtctctgatgctcagccttgatctgcttgcaggttaggcatttctatacgaattctaccaaattcttcttcattccgctccaccaaaaataaagtttaagatcctgatacatcttggtggtgcctggatgtagggaatatgggggttgtatgagcctcctcgagaattttgtttctaagttcaacactatttggaacacaaaccctggctttaaacaataacatcccactgtctgacactgtaaaatgtctagcttaccagttgaaacctcttcactgattttactactctggatcagtcatctgagcgactttaaatttgttctagcagatcagattgcaacgtcaagttgtg

SEQ ID NO: 407556 - DNA, 620 bp, Cannabis indica
atggcaaagggcaacggactttgcatttatgtcagctcgttgggcggagctcttggtatctttgaaaatctctgcatttgtcgcacttcttgacataagctttcgaatcttcaatcatcgtcggccagaagtagccttgccttagaattttctttgataagctctgtccggctgcatgaatttccacagaatccgtcgtgaacttcatatagaagccgtgcagcttcatttggtgtgacgcacctgagtaatggcattgagaatcctcttctgtacatgatcccgtctacgatgatgtaccgtgctgcctttcttctcattttccgagcttcatttcggttatctgggagttccccagagttgagataggctgctattggcgtcatccagttcggagatgtgtcgatcatttcgatttcttccgtgccggtgatgctaggctcttcaagaaactggatcaagaccaggttcgccttgtcacttatattactgctcgccaagccggcaaccgcatctgctgttgtactttcctctcttggaatctgcttgaggctatgcttttgaattgtgcaagcagatcatgtaattttgctcagatatgctatccatttttttctccc

SEQ ID NO: 407557 - DNA, 457 bp, Cannabis indica
tatgtgattttgggagctagcattaatctcatgcccatgtctattttcaagaagttgggaattggagaagcaaggccaaccaccgtcactttgcaactagcggatcgttccatggctcatccggatggaaaaattgaagatgttttggtacaagtagataagttcatctttccggcggacttcattattcttgactatgaggaagatagggaagttccaatcattttagggaggccatttcttgccacgggaaggactttgatagatgttgaaaaaggagagctcaccatgagagctcaagatgagcaagccacattcaaggttttccatcccatacgtgccccggatgcaataggagaatgcttagcaattggagatatggatcctaacatggttgaggagtccaaattcaaagttagtaagaaggtgagaaagaagattctccttaaagaaattg

SEQ ID NO: 407558 - DNA, 65 bp, Cannabis indica
gtgtgggcactactctaatcactaaggggtttcgaaataatcaaggaagagagagagagagggtg

SEQ ID NO: 407559 - DNA, 564 bp, Cannabis indica
atcggttcaggggtctcgaatcctgactatttcagtgttgagggctagagatttactacacagtggatgtgtaggatttttagcggttgtgattgactccagcagacccaaaacatttgggcctgaggtagtcagggttgttagagactttctcgacgtatttctcgaggagttactgggattaccaccataacgagaaatagattttgtgattgacttggcacttggagttgaacctgtttcaaaggcaccttataggatggctctagcggaactcaaggagcttaaaatacagcttcaggggatgcttgatttagggtttatccaacccagtgtatcgcgctggggagctccagttctatttgtgaaaaagaaggatggttccctaagaatgtgtattgattatcaggaactgaacaagctgacaattaataacaaatatctattgcccagaattgatgatttattcgatcaccttcagggaaagactgttttcaaacattgacttgcgatctggttatcaccagctcagaattcgggaggaagatattgttgggttttatg

SEQ ID NO: 407560 - DNA, 561 bp, Cannabis indica
cccccgccaagacaacagatccaccagctcctaccggcccaaaagacccgtacaaagagcctaggactccagccgtctgaacacttatctttttatcttttctttttttatatatatttgtctggtcataaggctttttttaagacatcgtgaccggccaagcggtcattaaacttggaattatttttcattttttagacaacaggctgatcgggtagctgttaatcccggtattacatgcttttgttataatttaatgaattttaatctctgtttataaacatcgtgcaattgtgtttattttatccttaccaaatgcttggtacaggtataggtgccccccaagtgagcgagtagacttatgactcttggtcacttgttttttgcaagtatacttttttgtctgttcggggttttgggttcgacaaaaccttttgtatgcactggatggtaaattaacaacatgctagtaatttcgactcaatttgaattttgaaataaacatctttattcatttattgatcgaaaatgtgtttgttaccgtagtaacttacatcagag

SEQ ID NO: 407561 - DNA, 721 bp, Cannabis indica
aaccatttaatagtgattcaatggctaaaaaaaatgtaactatgatggttacaataaaaatgtaaccattagaacctcctctctctctctctatatatatatatatatgatctgtcttttaaaatctactcccacattaaaattggacaaaatataactcattataaaaaaaaaaggttaataaatcgtaatggtattgatataagaggaaaaaatgattcaaataagttacaaaattataaaatttgttgaagatgatgtttcttagtatataataagtacattttttttgagtgatagataattaatgcataaaattctcatataaataattcatactcatttgtgtatatcgtattagtatcaaaaataaaaataccaaaatttagtgaaatatttataaaaatatatatataatatgtttttttgaaatcttattccactttaaaattgaaaaaatattaattattatcttcatcacatcaactaaattcgttttttcatctatccaagaaaaattaaattataagtggctcaaaataataatttataataaacgtgtaacgttgtgacagtcagtagtcccgtgatccgtaaggggaaacaccgagtaagctgtgcaatcccacaccgcctgggaaaggtcaagtgggatgattctgagaatgtgtaggatagtgggactacacagttgaggatggcttaaatggattgattggta

SEQ ID NO: 407562 - DNA, 594 bp, Cannabis indica
gagtgggtcaggattccccctacaagaagaccacacctactcaggtctttctccggagggcccaggtctttgcgacttacgaccgggtggaccttgacgtcgggggcttagtcacgacggagaactgtcggaaggccaagctgatcctgccgcaccaatcagtggaggactctaacctttctaaggttatctgtccgaatgtgagggtgcctgccgcggagaagaccttccgggatcaactcatccccaccgcaaagaagaagtaccaggagtatctttaccggaaggcccaggagaaggcttattccaaggcccaggcagcttctgggaggccccttcgcgtggggagcccagtcgagaggagaagccaggcgattgctaggaggtcccttcgcattgggagcctagttgagaggagggctcccaggccaaaaccttcggttcaggtgccaaacaccggggctcctgatgccagtacttccggctccggtaagtctcctttagcagtacattacgttccttccgttagcgaatatgccagccttaggcctgtagggttcgatgagcgtctccataggtttaggatgccctcga

SEQ ID NO: 407563 - DNA, 1041 bp, Cannabis indica
atataatataaatttttattaaaagtaaaacaatcctgctgtgaaaatattttactaatatatttttcatgatcatctgaatcccagtacatagatttctatatttgttcccttaaggtgatatcaaagtcaaacactattaatagcgcatatgaataaggaaatataagtggagagactactattgaggaataacaaagtatcgattttgtaattgttagaaaaaaaaaaacttacaaatttcatcgccaatatgaaaagtgtgggagttagaccaatctgagtaaaacgaagtgttaggaggtattttccaaccgaaactatctccagcctcgtagcgttcggctgtggcactctttaccaatatcgccataagcatcaagctgcaccctatcatgcccatcttgctactcatttttcccatcaaaatatatctggctatatgtatacgtatatgtgtgtgtgtataattgagctagagtgtgttcttaaggcggttgatatatgtaaacttatctttgtgaatttctgatcgttacttgttttggattagaaaaaatgagcatatatttatatagattgtagagctatttcatagtctctgatattatctttgattactaagttaattaagatacgtcaagactcatgactgagtgatgatctgtatcaattttgccacatgatgagcacaccgatatagacgcaaagtcagctatgcgaacctgtcccttctaagactgtctcacatattagctataaaataaataaaatattaattaacaaattaacaaagtttgattattgtaaatttgtctaaaaagtcagcaaattgtacagtaagggctcgtttgttacacaggactggattggattagacaggctaatttgtccaatccagtatttgggcatgttagaagtctggataactaatccagttaacctcatctgtctaggattatttatcccatccagcagggtgggataaataatcccatgcaggtgagtatttttttttatcgtttttttaatttaaatttt

SEQ ID NO: 407564 - DNA, 636 bp, Cannabis indica
taacaacatttaataaactaaaaatttaatttgaattttaaatatatattttcctcgtattaaaatggttacactaaaaaaaattaaaatgatattatttcccaccaaactaatggtgtaattaggaaaaaaaaaatgataaaattaaatattagaaaggaaaagaaattggaacaaaaaaattgacgttaaaagaaaaaaaaaaaaaaaaagtcaacggcactaccaatgatataataatacaagaaatatgaataattaagtacattatttcagtaaaactaacctgttttaacaattaaaattacttttgctttttccataaataatttatctaatcacgtacatatataaaaaaatcccctaattaaaaatatgatttagtttaatttagtttagtttatcaattatttcattcataattggtaaaaaaaaaaaaccaaacataactcattcataattgttacaaaaaaaaaaacaataactcattcataatattatagtttaaatataggtgctgaataataatatcagggtaataaaacttttaaattaaaatatgattcgtaaaggattaatttttttagtattataaatatcattattaattgataattctttaaaaaaataatcttt

SEQ ID NO: 407565 - DNA, 500 bp, Cannabis indica
gaatgtaactgggagtcaggattggaccaaatccgccaagcctgcttggctagaagagcttgattgtgagaagtaagagaacgaaaacccaagcccccaaaaaacttagacgccgagagggcagaccaatttttccagtgaattttttgtttattcgaagaggagccccaccagaatttagctgttaagctttgaattgaggcacaggtggattttggaagtctgaaacaggacatggcaaaagaagggatagcttggatgactgatttaatgagaacttctttgccagcacgggagaagagtttttcattccaagaactaagtttagaggaagttttttgaataagatagtgaaaaacagagttcttgattctacctatacagtgaggaaccccaagatatttactaataaacccttcaccctggagtaacaatgaagatcgaaagtgtgtttgagaatcagaaggagtgttaggtgagaagaggatggaagacttttc

SEQ ID NO: 407566 - DNA, 363 bp, Cannabis indica
tgcatgagttgttgttttggttgctattcttgctgctagtgtttgttattgttttctatggattaattatgcttagatatgttgttttaggcttgtggtgatggctaatttagtgtttgagcaagctttgagttttagaactcaagcttggctcattaatgacaagttttattctagtgcttgtagctgggttttgttgcttggaaaataatctttaggatgcttagaacaggtctggaaggcttcatgtggattgggattgatttgaatgagttatgaattttttgactcattcctgcactgaactggaattccggttcagatgggcctgtaggaaccggaattccggttggctctcgggaa

SEQ ID NO: 407567 - DNA, 735 bp, Cannabis indica
ggttttgggaattcctgaaccctcatccggaatttcggttgcacaaccggaattccggttcctcgcaggaacttttcaaaaattcccacattgcacaattccaatccaaacaataccaaaacttccagacctgctatttagaccctaaggaacaattctaaagcaactacacagtccagaacacacataattaaaaatcaccatgtgagctccaagctttgagttcaaactcaaacttggctaaagctcacttacaaccctcaaaactagattaaaaccacataatcatgcataaaaacactgcagaaaacaaactctaactcatgcaataatcacagcaacagatttcgaaattttcctttgaaaactaaactttgagctaaaaactttcaatcttgaaatcaaagcaattatcatgcattacactagctctaatctacttaaaacaacaagattaatcctctgtaaatcacaacaaaatcacagcaacaacaacaaccaattcaagcatgcatacatcatctttttcctcaaaattcaagaaattaaaagaacaaggtataaagatcttaccaaacacttgaagaacactaagattgaaaggaaaagagcttgaaaatcaaagaaatctcagccctaaagcaccataccagccgagagagagagagagaaaagagagagcttttgagtagttttttgtaattttttttttttaagttttgaaaaatagaaatg

SEQ ID NO: 407568 - DNA, 1096 bp, Cannabis indica
tcaatagagagcaatacaaagtaacctaattattatagtcaccgtttcttaaacatgcacacatgcataaaaagcagagtttcactaccaaagttattattaattctcctttgaaattatttttacttttgtgttcggtaactactaacaataatgtaattatattttaactttaacatttaacgtcgttttcagaaaattaaaaaaaataataataacaataatctttattataaaaacaaatggattcttttactatatcattttataatttttatgtattttttgagtatatcctactagacacaataacatcaatattgttaattctttccctaaattctttattattttgccgtatatattgcagtacacaatatatatatcgtgcattgtagtacacactttattttttttttatttcgtctatttcattattatttatttaattttataaaattaagaacttagtaaaatactataatacactctactttgtatattgatgtacctctatctattttggaatccgagagacttttttagtttaattttttttttcatagtcgtgtacattatagttatttaagacatcttacaaaatttttaaatattcagaaaaatttaacacgctgaaaataaagttcaaactgcctgttacgtgtgtgattcttttattttatatacgcgtgtgaaatagattgtttgaacattaaattctatattgtaaattatttcgaatttttcaaaattttgcaagatgtcttaaacaactataacgtatacaactatgaaaagaaactgtacacaaaaaaaattctaaatgtcgaaacagataagggtgcaccgaagtaccctttaatttattgtatgtaaatttaaatattaatactataaattattattatttttaattatgatttaagtaaaaaattaattacattttcgtcattagtgtaatatttttttcttctagtaatgtaatatttttgttattacaatatgatattttaatttatcaagttttatccaattttacagtattattatctataaattaattagtagttttgtttaaattattaattaaatatta

SEQ ID NO: 407569 - DNA, 533 bp, Cannabis indica
aagaaagaaatcaaaagagaagatttttgtgaatttaagtcatttggttcattgagtttgtgtcccagaatgaaaaggaagtgatattttttctgtggattcatatgggaccaggtatcctagtccaacaccaagtttttgaaaactaccctttttattatttatgttcttggtttcttacttgaggtaaatccaaggtgaaattccaaaagagaaaaaaaatgttgtgggtaaactgaatagacagataattgcggttaaaaatataatataaaaaattttgtgaataatttttgctgtattagcatgaattttatgttattaaatgagcaaatgcgatatagggtgcttacatcccaaaataagagatatcaatgcccacccaaataatagggaattttcatgagaattgagggtataatttagggaaatttacacagtttactgtgttttcccattttctttcttttatactgttacactcccaaactaacttttgtactgttttttttttttcggctgccaacaatttt

SEQ ID NO: 407570 - DNA, 513 bp, Cannabis indica
gaagccttaagccttgaggcaacactatcactatctctactgctaatccattctcgtttaaggccccatccacatacactttccagataggggaactcacttcgggttcatgagcagttgcttcagtttcattgcactaaacaattaagtctgccagcgcttgctccttaatggaagatgcgtgggacatactgttgggtattttgccttaaataaaatcccattttaatgtaatcttgaatattcatttatcaataaagaaacagatttacttcattacttgtttaatgtgctattcggttcatgtgatcacttatttgatatataaattcattcaaatccttattacattgttgcatggttcacataatttatttcatgattacatttgatgtataaattctattaagtccagaacatatatataaatatgtatatatttgttcatgattataatgtcattagcacagtggaacataatcatgattatatgttcaaaagtttaattcccat

SEQ ID NO: 407571 - DNA, 337 bp, Cannabis indica
aacaaatctattataatatatagattttgtttttgaacaattcaatgtagtattataatattggtatatacaattactacgattttatttaaaaaattaaaaaaataaaaaatagtgaaacacgtggacatggttttacatatttcaaagacttcacagttcacacatatgattacatgtgtagtactggacatgatttgaaaataggcagcacgtaaatgttagtaaatagtaaatgaatcctataatattataaaacatggacttaatttttttttatatttcacaaatatacaaaaacacaaaaataatatgattttatgaaattttaaatatt

SEQ ID NO: 407572 - DNA, 632 bp, Cannabis indica
cctaaaagcaaatatgggaaatctaaaataatcaaatgcagccgtcaaccgtggtgagaaaaaatcggatttcaaaatattaattgtcagagaatttattagctaaaaatcgaagggacacccagtcaacctcacatcgagtctcggatagtcgcgcccgacacgtgtccccatccaaaggtagaagcagctcggatgaagtctacacgcaacttcggaagtcccttacagacttggggggcaaatgttatcccaatttttgcactctgacttggcattgcatgatggtgacatgtggaatcaactttaagtatttgctgggagggtatagcccgaacaggatgcctcgctggcatgcccagagcaaagcgatcagcaatctgcacagagcaaccaacacttagcgaattcagctttcgcattgtgagtcatcaaagaaatccctataacctggggatcagattgcagagatatggcaagctgtccaaatcacatgatcagtgtatactacatttatcatgtaatctttctgcttatatccattgtaacgagaagggaaacacttcctctccaagttcacagccctaaaaatagtgatgcatgttcacaaggcaaagggtcgcaaacagttt

SEQ ID NO: 407573 - DNA, 536 bp, Cannabis indica
cacttgctttgctccatctcatctatactaccagaagaaaccttaactgtgggcctatggacacacccacactagtatcaggtcttcttctttttgagtcaatgattgttgtaattgtggaatcaaaaagaatttcccattattatgcctctcatttttccccccatgacatttttccccatatgtatgcctctcattcagaaattattattaatatcatatccaagattcttgccagccgacccccttgattgctcctggatcataggaatcaagatggctcctcgttcaccgctgctaccgtgagaagcttgactcgattcaccccgcaccaccgcccctgatcggagccactgtgccccaaatgtcgaatttcttctctgcaacgtcgcccgcagatccaaactataaggcttctcttgtagatgcaatggttcaagaaaagcctggggcagaacctctcagcatggcctatttttccacatatgaaacaaaaagttgggagtttttcatatttaaaattaacccagtaccaa

SEQ ID NO: 407574 - DNA, 723 bp, Cannabis indica
aaaaaaaaaaaaacatagtgaaatgagaaatgagatgaatatgatggatttatcatggaatttggcgtactaggatataataagtgaaattttttaagttttagatgttcaatacgctttatttgtgatcgaaaatcaagtctgaagcttcaatctaatttttgactatgatgcattcattttgaggagaaatattgtgaataaaagttctaaatctctctttcgaattttcaaaatatcttaaatcatccaattccaagtcatattaaaagaattatggctgaaatattatcggtcatcgcactaagaagcttgttgctcagaaagtgcctacctgcgcctcaacatggtccagaccatgtcgcagtgtgctcctaaaaatttagctttttaggatttctcaaattgaatgcgggcctcaacatgagttttaccatgttgcagcccaccagctgatttggcgagttttcggggttataaaccctaatgcgaggctttataaaaggacttttggcacttttcaaagtaacaatttggagggacacaaattaaaagcataaagtggctctagagattttcatcaatattttttggacgagttatttcttcttctttattttcttatgttctttattaattgttgtcagttatttacaatgactatgagtagctagatatataatttttttttacgcagtgatcaaaatcacacatgattaacaa

SEQ ID NO: 407575 - DNA, 168 bp, Cannabis indica
ttattcgatcaagatgagaatctagcattgtcccgtttaggcgagagtaaaggccattctatcttatgagcttccaccattattgcataccttgtaagtcttactcttagcagccactattagggtggacattaataagaacaaaactgtaacaccctaatctatagg

SEQ ID NO: 407576 - DNA, 623 bp, Cannabis indica
ggctctgtccgacaccttgaagggggaggcggacctggccaagaaggaagctgaagaagctagggcggaagccggagctgttcggttggagttgggcgaagccaacaagaagctgtttgctgttgagaagaaaaacactatgttgaccaaggatctcgaggttgctgaccgttttgaggagaccatcgagatcttatctgttgaggtaaacagtcttcaagatgagaggacttctctgcgagcagttcttcattggatgaaggaggagaaggtcaatgccttggagacagccggtctcgagctcttctttgatttttggaaggctaatccccatgccaacttcgactgttacaccctcactagcataggcgtgttaacgtgattttaaacatactgtgcagctcattgctaatcaacaaggttaatgaaaatcgtgatcaattaaaattttgctatttaattaaaacttataatattatatacaaaatatttcgggatcccatttacaaaatactttacaatgtttgctagtcatttacaaaatatttgtcatccagcgactaacaacaaaaagccctcgatgtcccgaggatcgtacgctccaggcgtaactgccccgacat

SEQ ID NO: 407577 - DNA, 727 bp, Cannabis indica
ttttaattttttatgtataatttgtagaggaaataggtatgatagtgggacgataatgtagtagtacgatactctatatttttttgtattttattaatttatgatttggggacaatatgggtgtgacatagatacgatgttggctcaatagctagtattatacctgaaattaagctgccatctcagtggaggacgtgtgtcaagataaagggaatatggatcgatgcaatcactttttatggaataactcattaattacgtaagtatcagagtatatttgtaacatgctaactgtaaggtcttaggcgaggaatcaatatacaaactagtactcattatattagcgagaaaccatatgtcgctgaatgcaaatagcgaggcatcaaggacagtacaaataggaagacgaaagcaacacatatcaattgcaaaagcacttattgtataatgaacaaactaagtgcaacactcgagttggctcgagatctagtaagtgaggtgcctatctcgcttcgggaaggctcccagttaacttcagacattttctcggtgaggcttacaatcctgacaagccagaagctaacattcaaacgagcttcgaagaactctttgtaaataagaaccgcgattgtcacaagacatgcatcgtcgaccttggaaggaaaaatggccccagctcgctcttgagatcactgaaaccaagcttctgtcgagacatcttcagata

SEQ ID NO: 407578 - DNA, 718 bp, Cannabis indica
acaaataattagagagctgcccatgtgaatattttatcatgaccacctaaaataactgactataggcactctatagatctagtactcttggtctttggccacatataaataataaacccctgtaattaataaataattatataataatactttcttgaaagtgaattgagtttaaactttaacattggactaagatcaaataagaaaattatataaaagtgtgttgtatatgtgtaatagaatcacatgggcagctataacaatataataataaagataaattatataaacaagaaagttattcatttcagaaaaaatttaaaaaaaaaacaagaaaataattagaagtaattaatgtcattattggctgcaagcggggcgcttggttgccttgactacctcctccacgacgtaggcaaattaattaattaggaacattattctaaaaattcagctataaacccaaatataaataaataaataaatttttttcattgtagataccttaattaattaacaaagtaaatgatcgtaagattataggaattgtatttttgtaacatatgtactttttgaactttgacatgcatttgtcaaatcatatttaatgaattttggcatacatgtatcaatatcaatagtctagaaaattttttttaacgctttttaaaattcaagttataatttggtatatgttaaaatttgaaaaataaaaata

SEQ ID NO: 407579 - DNA, 569 bp, Cannabis indica
taacacattcaaacaatcgtgtgcaaagaataaaatcaataaactaacatgagaagatttaatatcaattattgttttcacttcataatccttataacacaaattgaaaagaaaaaaaaaggaaaaaatgtcattggtaatttagtttataaaaaacttttgttattacaaaataatctattgaacctaatttcccttctaaaaaccaaaacttctaggtaaagaactaaagaaaaataacaatacaataagcaatgtgcacaatatatgcaaattaacaaccacctaggaatgattataattgacttatgcaaattaacaaccacaactaattcatgtaataacaattcaaagtaaaaatcaaactactattaactatatagagcctttctcaaacatgatatattgaggattaataaaactatataaagattaataaactgagatgattactcttcgggaattacagactaaacagaaaaagcaatataaagattaataaaactagtagtggtacttattcaattaaaactaagtaaaaacaatacactaatatagaaaactatgga

SEQ ID NO: 407580 - DNA, 539 bp, Cannabis indica
tctttaaaatcatgttttacaaattatttgtactttttatttttaattaaaattaaaaaaatatttttacaattttaaataattttttatcttaattaatattttaaagggaaatttacatagtatactaactttttgttattttttaacaaaaatactgtcaggcggcattttttacttttttactgtgtttttttataagtttcatactgcagtacactatgttaagttttcactggtgttctactggtattttttagttgttcaactgttgttttgagttgttctgctttgtgttttgctggtgttttataaaaacgcagtattgtgtgacaatatttttgtaaaaattaacctaaatttcagtatttttgtaagtttccctattttaaattccaaccttagtttagattttgagacccaaactccaactttggctccgataccaaactcgaaccacgggcgcgactctagatccatacataaatctgacttaaatcaaataaaaaaataaagaattataaaacacacttttattt

SEQ ID NO: 407581 - DNA, 734 bp, Cannabis indica
aaatgatgtggaacaaattgatagcattggaagcaaaaagccagatgggagtacacagcgaatgggctcgaatggaggggtcaacccttttcacccttcggaaaccacatcctgcgcgtggaagcccgtcagcgttacgtggcccctaaattaccagagtataatgggacaggagacccctcggaatacgtatgtcaatttgagcaaaaaatgttaactgtctccgtcccactagaggacttggaggcgatcaagtgcaagaccttcacgcaaggattgagagggcccgctctacgttggttccacaacctaccatcaggcacagtaaattcttaccaggatctcatcctaagattccaggccaatttcgcgataagtgtgcgaaccgccaaggtggatacggacttaatgttaatacaccagcgcctcgatgaacctctggaacattttatcaacaagtttagcgaggaatacgtcagtatcccgaaatgcaccgattcagtggcgacaaaagcattaatgcagggattgatacatggttcagaattaaagaaggcgatcatagtggagcctggcttgtccctcacaagggccctgactatggcaagaggatatgccttggaagtagaagagaagcggcacaatgaggaagtgtcgcgtgaaactttggcatcaggagatactttccttttcgaatctaagaaccggacaccagctgcacgacctcataatag

SEQ ID NO: 407582 - DNA, 811 bp, Cannabis indica
atcagcatttttgttactcccggttacccaagccctaggtaccaaagccatgtctgcaaaagagccactgagtgtaagatctgtgcgactaacacatcttacagactccattccagatgaccattcaagtgttaaaacctgacggaggcagaacattaagaaatattgtaagttaggtgctgaaaggcatttaaagaagaaaaacaccactgcacttagagatgtctaaccaagacagtttgatatttcaaataatatttgttatcacttacattacatatgccaaatgtgtgtaatttataatatggataaattaggaactaaggtggcgcttggttgggaggaatgagaacataggaataggaatggactaaaatttaaaatacataaaaaaattgataaaaaaagtaagctaattaggatttttgccccttgaactttaacatgtaccaaatcatgccccttgaactttgacatgtatcaaatcatgccccttgaactttttggccgttaaaaattctacctaaactattgaaattgttggatttaagaacttttgtcaaatttcatttaattttactaattcggtgattgtccatatactaaatcatgcttctcggactttgatatctatcaaatcatgctccttgaattttgacatgtgtcaaatcatgccccttaaactttcatccatgttttcttactaaaattaaccaaaagttcttaaatctaacaatctcaatagttcgtagggaatttttaacggtcttcaaagttcaggaggattgatttggtacatgtcaatgttcgg

SEQ ID NO: 407583 - DNA, 838 bp, Cannabis indica
gatgtacttcatgaagttgctagatcaaaattatagctttataatagttggggaacacccgacggtttaaaatcgtcaggtattcttcatttaaaaaattgcattaaactcttaaaaattgccgcggatagcctcgtgagtgttctaagctgtcggaaaaaccaaatttttcctgacagtttaaaatactcatttaattttattagcaatagtttccaaaaaaatatgttgaggagtgacaggaatgcccagttttgtactaatgtttttttaataattttgaagctccttaacttattgtgattcatagttacttctggtcactcctacggacttctatttcagatcatgaatcttactcttctacagctaatattgacactcaagcacttcatgaagtacatccaacaactcctttgtcatcttcacaggaccctggctcacttgcctccagtttttctttaggtattgcatgggaaatatactatgattttgtctagtatgatcatcatggttctgatataaaccttgatcagtttcatgttcaagctcctgaaccaaccatctctattctctcaatcctcaactactgatgttcaatagcctgcttatccacctgctctagtcacccatcccatgtgttatattatttataataatttaatatatagattaaatatatgtaataaactaataaaatgtaacatatgacaatgtatattagttgtcatctttttgtaatatttggggagttacttgttactatgagtaacctccaccattatcaccaaaattaagagtgcaaaaagatgttacacatcttaatttgaaattctta

SEQ ID NO: 407584 - DNA, 1154 bp, Cannabis indica
tactcgtttatatatatatacatcgattgatgaattacgtccacagctttttcaaggagcaattaatcggtttatccatacacatggaagagctaaagacagtgagtgataaattagaggtttccaatgctccaaaatcttaatgatcatctttatcttgataaatcactgtcaaatatatcaaattaaataagcttatacattatataataagtaaacatgttgatatatatatatatatatatatatattcagatataaattagtattagtaaaaaaaaatggttgattatgtaattaagattcaatgattacattacttgacttatgaaaattaaagaagcaaatacatcgatcgaaagaaacggaacaaaagccaataatctagtatgaaaagagcttagaattaatctcatgttggactaattcttaataagccattttcaacatttattatggtatggttacaaaaacagttggaataatggagctactgtagtagtactattgctagtacaattaatatataaatgtaagagagtactagctgatgtagagatgaagtttgacagcgagaaagaagatgcaaacgagagcgaagtaaagaagagaatgaatgagaatggaagcaccactggtctggaagttgccgaactccacacacccatggcgccctggaacttggaatagcagtcctggggttaacagcacgaacagcaccactgccacgaacactgggccccagtctgacataattaattattatatatatagtgaagttgtgaaggaattaatagagaactatatatatagaatgatgagtagtacttaatttggttggtggggatgtttaagttttggtgtatatataggggagtttacatgaatgtatatatgtatataattgaaatacagaggagactttgatgtgaagaaaggaagatatatagagaatgagtatgagtcttagtattagtatcagtctgagtattagtggggcggaaacttgtggagaccaattaacttcgattcactccctccttattgcaattaatattcctaagccctcgatccccacaatataccatttataaaatagagaaatgctaaaggccactagtggtgcctagtactctcttatatacgtgttaata

SEQ ID NO: 407585 - DNA, 746 bp, Cannabis indica
ccgcgaacactcttatcatgtggtgtggtgtaactattatcagtcttatttaattggatatatatatagatatgaaacaattttttaattggtattacctattaataattatcaaataaatcaaattataaatattaattttaaaaatattaaattattaaattttgatcaaataatgaataataaaagaaaattttgaatttctattttgctacttaattaaaaataaataaaaaatatcttattttagattatatcacaaatatatttgcacacaaaatatttaagtaaaattgaactttttttattttattttttttgttcaatttttttcttaattgttttttcagttaatggaacaaatctagctcatgtagtataaatatatatattttttaattaaataagaaaattaagtataaaaactcaacttttttaaataaatagtaatcattgaggagtatataatattttattaaaaagtgcatatacatgagatttttattgttattatcattatatagccgcggtgagtgcatatacatgagatttttattgttattatcattacatagtcgcagttaggggtgggcatcatccaatccaatttaattgaactgaaccgatctaatccaatccaattataaaaagttaggatatccaattacaattagattggattggatgttaaaagttgtattctaattggattggatcggttattggatgtcaatctcaaaatccaa

SEQ ID NO: 407586 - DNA, 552 bp, Cannabis indica
ctttatctcacattgcatagaatctggagaagaaggaaatggctcttctccgacattggccagcgcgggtccagttggtgatgcttctctctacatcgggcctagagccaggcttctgagatatactcattcctgttggaatttattttactaggatctcagatctactcacaggtgtgttatttaacatcctaaatatgaatttctaaaacgataataaacacatataaagttaaggaaagcttacattggttgcagcagaataatatgtctccagtccgaatgtccttctctttgatttgaattcttcacgatcttccagactatgattgaggtaccacttgatgtgtgtgggcactactctatcactaggatatttcgaaattagaagaggaaaagagagagagaggggtcggctatagagagaaagagagaggctcaattttctgaaaggcagtttccttaattactgaaaaactcttatttcggtgtgagccgtcactttctatttatggcaactactaggtttaggttagtaattaattggcatta

SEQ ID NO: 407587 - DNA, 310 bp, Cannabis indica
ttatattttctacatctgttcataacaggaattatcttcaagatgttatattaaaaaaattagtgaaaattttataaaaagcaaaaatagtattaaccatagttttaacagttttacttttaccagatgctgatgtgactaataactatgcatatattagttcaattattgtaaactccagtttctcaacattgaaatacaataaaagtaaagcataacaaaaatataatagtatatagaacccaaaacccgagacaaacaaaattttgtttgtttgtttgttttcttaattgacttatattttcataca

SEQ ID NO: 407588 - DNA, 737 bp, Cannabis indica
taaaagctgctttttgaaaaagcaaaagtgtgtatggtaaacagtcaaaaaacaactttttgaagaatttttggaaaagctacaactaaaagctgaagctgctccaactcaacttttagaaaaaagttgttttgattaaaagattataataatttttttatactaaaaccatatttacttatttattacatataatttttttaaataaactaattatcataaaataaatagttattaaatcttctttttttttttaaaaaaaaaaataatttatattttattttattattaacaaacaacatcaacttacaatttttcttatatacttgagtttctatgttttttttacatttgataaaacataataaaaaaatactataaattatttttatcaaatgcatataaatttatatttaaaaaaaattaaaaataaataaaaaataaaatattatataaaataaatttttacatatttgtcattataataaactagattataacattatcattaacattataatagatcttaacaactcacaatactttgaaatttataatttaccaaacacttagctcagcttttttctacaggtctgctgcagctgctttttctcacagcacagcaacaactgctttttcccacaacacaattatgccaaactcacccttagttgacaagttctcacccgtcaacatttagatgctattttcattttatttttatgtagttttcttgt

SEQ ID NO: 407589 - DNA, 626 bp, Cannabis indica
actctacactctctctctctctctctctctctctctctctctctctctctctctcttttatgaatttctcaagtacatatgttcttctatccccactctgaatgtttgatgtgtgaaactattttttttagttcataaattcacaattcactatggtctttttattttaaataaggaaaccaaaaaaaaaaaaaatgagtaacgactctatggctatttttaaagcttcttcatcctttttctaatcctaaattctaaaaatattacttaaaaattaaggaaacccaaaatgcaaaataaaataggtaagaacgctatatataatagaggatgaccgtgtttctcagcctattctagaagcatcaacttcaaaaaaaaaaaaaaaaaaaagaccattgcataataaggttgaaaatagaaaagtaaaaacaatacaaatggtagtgtaagtaatgtcatgtataaatatcttattttattttatataatagtggtattttttactttcttggagttattttcatgcctaagtaatttacatattgaaatggagttgttatgtaatttttttttgttatttagttgtttaaccaagaaaaataaatatatgcatatatattttttta

SEQ ID NO: 407590 - DNA, 789 bp, Cannabis indica
aatatatttaaaaaataataataccaaaaattatagatgttcgatcctatgattatggtaataatctactcccattttacttgtattacttcgaagaattatcaagatcacaaggagctagccaagataatcattataccatatgccaagatcaccatatgtatatatatattaaactgaaagtaaatagatgaaaagaacatttacctctcgaagtgttggaaatattttaccaggatctagatttactaacaagtatgttttattaacatccggatatgaatttctaaaacaatgaaataaacacatataaagtttaggaaaccttgcattgggtgcagcggaataatatatctccttctattcagatctctagcccttgtatcctttctgtagcagagtatcaccaagatctgagcctgaatgtccttctctttagtttgattcttatcactcaaggtttcgaaaaattgaagaagaaaagagggagagagaggttcggctatagactataggataggaggctcaatttttctgaaggcaaaatttctgattttcaatctcttaataagtgtgagtcatcactatctatttttaggtaagcactaggtttaggttaggaattattgggcattaaaaaaatgaaaatattaattggaaaaacctcattaagtggtcggccatgggttaatgggccccactttggtattttgcaatttttacaattttcatttctattttttcaaaaatgccaatttttcaattctaaccatttaaatgtcaaaacta

SEQ ID NO: 407591 - DNA, 858 bp, Cannabis indica
gtagtgattgttataataaaaaggaaggggatattttttattttctatttctttttttgaatttttctaaaaataattatgaaagtaataaaacttgttaatttcgataataataataataacaatagtaattaattgaattgataagaagaggaggagatgccgtgtaactacaaaaaccaaaacgcaaggaagttatggcggtggtctgtcgttttggtgggccaaccacccaccactcaaaacttaaaagcaacaaaacaaaacgcctatttattattattattattgagagagagtgagatacacaccctcctctcttcacttcatcttttaaccaattttatttgaatccataaatttacaaaaacagttcaattgtaattttttgtctgagaattattaatttttttttgaaggaaaattatttatattgttttattagttgttatgtgggttgtaaggtaaatttttgtaaaaatattaaatttttgtaatatgtaaaaatgaaaaaaaaattataacattttattaatttttttttctctattgttacaatttttaaaatatatataaaataaatacattttaaatgttaaaataaataataataaaaaatatgaaattttattagagtaaaaattaaataattactaaaattaatacaagacaatataaaaattcaaaataataaatttataaaagagtaaatactattttggaccctctattttgcaaaaattattaattgaaagttaaatgataaaataggccttttattttctaaaatggtaaaaatagaatcttaaattgattttttatcaaaactaaaatataataataatctgatttaaaagt

SEQ ID NO: 407592 - DNA, 566 bp, Cannabis indica
aaccacaacactaaaaaattacagcaaatattatattttttactattctattattttattaatataataagaatattttaatattaaatatttgttaaatccaataaattatattagtaaatataaaattttttaatttacaataaatattacattagtttttttttactcttaaaaaatagtatttaatttactctaaaaattaaaacaccttaaaaatattaattaaattttatctttaaagtgttcaattaatacattttaaaactcaattaattaataaataatttattgaataataataatttattatagccaaatatttatattagtaaaaatattaatattacttcatttgcaataaattttccatttcatttttactcttacaaaataaactacatttaattaactccataaaataacacacattaaagatattaacgaaattatactaattttaagaattagtatattcgtcacataggtgctcaattaatgcatttcgaagttcaatgtgagcttctttatctttaatttttctatgtcgagcgagagattcttgg

SEQ ID NO: 407593 - DNA, 1132 bp, Cannabis indica
aatatccatatgattgacattgcattagaaatggaaatggtttctgtatcttattacaaacactcaacttaaagaagagaaatataggacagccaatgaatcaattatgcacatgtagtaggaacgaactatgtgcacactttttgtattttacaattattgagaatggtattgatttgatggtgttctacctggtccgtctatcccaaatgcttctacatttataaaagcgccaatggtctcacgccacttatgagtcatcataaaaccatgtgagccctgaaatcatcataattaccataagacattatgatatgtacaatgagcataaaattacaacttataagggtgagtcatagttccagttgtggaattgatccaataaaacatcttaccagcataaaaagttcctcagcaccattaaaaagaaatataataggctgaggaggtactcaaccagagtccgtaataagtctcaacaattccagtattgatgctgcacaaaaaaagatgaagcaattgttaccatcaggccaaaaagagtaacaattagaaaaaaaaaaaaacttttgttttgtgtacccaccaacacatcactggtgcctggagaaccaagtgggctatcaaaatggtcgttcaacagtacagatgaatcataatcttgttgtgaatctgcaaatgatacactgccattaaaatttaattattttgtgatgctatttccttaaaaacttgaaagatgaaaatgcgaatacttcactgttacaaaatatgcataagcagagagggcctttatagtctggtcaacaggtgccccagccttgacaagcatgataatgactcgtggcttttgaattgagttaacgaaagattcggggtcatggaacccgtacacaggaaggtcaccttctagttttgctctttcaacagtctcatcaactttggaggtagttatgttataaacagaaattggaaatcctttttcttgcaatgttgagtgccaaattctggcccatgacagccaaaccagcaaggcctattcgagtaggtgttgagggggggtggccatagttttcccttgcacagaatttgaaataactagtaagacaaatgtttcttcatggctacaaag

SEQ ID NO: 407594 - DNA, 525 bp, Cannabis indica
tacaaaagtaatcgagccataatctttaaagaaatatttttaaaccaaaacatcgtgacaatcccctaacatgtaatccacgcctcgagctcgccatcctcactgtttagttttgtctttacctgcacacagagtacccgtgagctaacgcccagtaagaagagctatgtaggacataaccccccaaccagataacatagtcataagtataacaatatcacaacatcaaatcaattcataccatacttgcatacatataacaacatgtcatatcacatattattctcacatacaatacaacatcatatcacagtgtaatcttaatgcatgctatactcacacacataacacatagtatcttatcgcacattgtcctcacatacgataatctactcccactcatgttgatcagacatgaagtgtaacttgccctgccttgtgctgttctcacactcggcatccaatagggcaatcccttatcacaagttgtactcacccatgataggataacctgcaagtaaaccc

SEQ ID NO: 407595 - DNA, 635 bp, Cannabis indica
cgatctttagctttctggtcgggctatgttgatcgactttgatctcttttaattcttctacaggtcgaggatccacatcttcatccccgccttgggaagttccctacttgggaatgttttttcccttgtctgtgctctggctagaggatacttccttcttagccttggccactgcaaggttataacattctcgtgcagactgctggtttcctttcagacaccctatattctttgttgggaacttcaggcatgagtaaaatatttatgtgacagcctttaagtcatacaaggctggctggccaagcattacgtcaaaagctgaaggaacatcctatattaggaactgtgccatgatagtcatgctcgtcggaccttgtccaacaatgaggggtagacgaatttgtcctagagcttgtcatgctcgtcttcatagacagcctagaggcatggggttagatccttgagttggagtcccatcttttcgtaagcagtcttgaacaaaatgttggaagaggctccattatcgatcgtggttcttgccacgattttattggctatctggacttccacgaccagcgggtcgttgtgcagaaatctaattttgatagcgcattcatcgttgaaggttatggtcg

SEQ ID NO: 407596 - DNA, 726 bp, Cannabis indica
tagttagattttgcctatttttcctaaccttttatctattttcacaataccacttttacactttcaacctataaatgaccaaaacaatttatttaataattaaaataattatcaaataaaattgtcatttataatatttattaattagactccataaagtctattaattaacaaataaacccctaaatcctatttcttcacaattaagccatatcttagtgaaaattcataaacaagacatagtctaattttagaattataattgattaactaaaatctaattaactgagtcttacaagcagcttgtctcaactagtatgggcactatgggcctttataactgagcttccaataagcagatctagaacttaccaagtaaattctcaaacttattaattcctccttccaccactatagaatttggaattgcactctcaattatatagaacgctctataggttccacgatatagataggctataagattatccatttgttattatctcaataattaatgatcctctatagatgatttacattgaatagggattgatttaccattacacccttcgaagtattttatccttaaaacacttagctacctataaatgatatttcagtgaactaatataatcactaaaatgagtactcaatcatttatctctgtaatgccaagctcgaaggaattatcatttgacttctattctggatgaagctatagattcc

SEQ ID NO: 407597 - DNA, 633 bp, Cannabis indica
agaaacttgatttgagaaatcaaagcactcgtttacactattattttcaaaatatacagaggagaatagaaattattttctctctcaactattcttgcttacgtgttgagaactcaacaagaataatgttatacactttatcctaatagcccacactatttcttatgtgtggtggatcaatttggaagacactggtgtgagtccaattgcattatcctcataatctgaattaagggatacaacatacaagaagttttgaggatactctgatagtcttcaagatgtatatattctaaacttactattttatattttaatttaatgtacacacatctgaagatctattagactatggtacaatgataatcattaatacaaaaccctttcgccacgtatttgatttagtaccataaaaaccaacaagtagtgtaattgagtgggagcgttaatcatagatttagaatctgtagcttctacaatcacataaaagtaaaatgatagtgttgcccctgattttgcccaaaatacttggaccaaccggatgatgacacgtagatggaaagggtttagcgtttaaataaatcagctaagtctctttaaccaaggggatcagctttagacatgcctcccgga

SEQ ID NO: 407598 - DNA, 694 bp, Cannabis indica
ttaatcatatatataataataatctggtaatcaataatcaataataatatataattatataattctgattttgtactcaaaaaaaataatctgatttcaaaaattttatacatgaaaattattatttttaagttaatttttattaataaaactttcttttcctttttattatattaaaatattattttttatttaaatttcacaaagggcggctaagttatctagcattaaatatggagaaagaaataggataagcgagaacttgagaacacaaagagaagaagaagatgtgagagtgaatgaaatttttatttaggtaatgaaatggaatggaatggtaagaaaataattttcattccattcttttgtttgattgtattataaagtattggaatagcattccattattttggtggaatgactattccattttaaaaagaaaagaaagaccattccaatgtaataagagaaaatttaataattttttttatacattttaaattttattacattcttattcttattcttattctcattctcattcttattcttatatttttattcctcccaaccaaatgccaccttaaatcaataaaataaagggaataactaattcaacaaaaactttgccagaaaatctaataggacaaaaattcgacttaggaaaaaagagtgcattatgaattaactcctc

SEQ ID NO: 407599 - DNA, 653 bp, Cannabis indica
tattaaatgtaaatgtatatataaactttttaagttcttttatatgaatattaaaataaaacaaatctgatatataagtacattaaaataaataaataaataaatattaaaataaaaaaattaccctatatcaaaaaaattattaaaataaataaatgaataagtatagtgacttttttgtgtgtcactatagctccaaaaatactaataaaaaagaaaaaaatggatacagtgacacttcatgtatatggctgttaccttttcagtctgacaaaatctgactctatacacctatagtgacacgcaaaaagtgaatgtaaaagggttcagtgacacgtgtggagtgtcactaaaaactatctttccagtcagcctcattagtgacgcgcattgaagtgtcactatacacttttagagttactcaatgtgtgtcactaaaacccaattttctagtagtgatttagtattcttagacaaaattcacggtaccttgtcgtagtgggagggtttcaaggaactcaccctgttatgacttggaagacacttgtgatgaaaatccattattagtttaaacaagtaatggattttcagaataagaaactaagaagcaaagccaagagaactatggttaaaaccattcatatggaacaacc

SEQ ID NO: 407600 - DNA, 553 bp, Cannabis indica
cacgattttgcaggtaatatttgctggaccaccacaccgaaccaacaccatcccttattaaagttttcttttctttttattttttctgaaaccgtcccttattaaagttctttgatcatgtacaacggtactgtgcatgatgtggtaagttgtaactccaagcatgacctctgaaggacgagacaatatttggatacttccaaatcaaattaacctagtattccacttcttaaattttaattacgagctacagtactcgatcggtgctgtatctaatggatagctgctttgtacaagctcatatatgagagacgtgatctgtttattattcaaaagtcttttaaatagtgctctaataacaatattcaaattaatgatgcttagacatgaagattatgataaattaactcggaggaatgtatttataaaatagtcgattcaatttaattttaaattggattaaaaaatttaaaatctacacttgtgcggattgaatattaattgacatgtaaaagtaaatacaatctaatccacgcatatttataaaaaaaaa

SEQ ID NO: 407601 - DNA, 654 bp, Cannabis indica
gtttaattagtactaataagtaatgagaacattatgcttttatatattaatcaaagaaataattatactgcatgttttatccattttgttctttggttatattcttgaaatcctatatgcacgtatactaactatatacattatacaaataatttattcactttttctttttggttgattatcaactttaaagtttaaactagtccaaatgaatataaactgttaccatttgcaaataggatatagtataataattttctatacgcttaaaaaatacacatggtcaaaactcaaatatcaattcaataatacacataattcaaaggttaaaatgtaatcaaacataagaaataagattagagggtaggcaatatagttgatggctatggttggtgggtacaaaaattctcaaattgtggagatatttaatgagtggaggttgaacaaagttttgaaaatatacatatatattatttataagagacaattgtcttacatttatatttatggggtatatatttaagggtgagtattcaatggttacaacaaaaatgtaaccatgatagttacatttttttataacctgttactgataggtaaatttctatttttagacttaaataaattattttttaattaaagtatttaataaaa

SEQ ID NO: 407602 - DNA, 442 bp, Cannabis indica
gccttgtaaagactttgaaaaatcagaatattttggaataaaattttgggaggttttcttcttgagttgttgagagaacattcgaacttatcaaggagtattccttgtggcgttcaacctaacttatcaaatggatttccaccaccatttgtggcgtcttctttcataacaagtttcatgcttaactaagcattgggtcgcggttccacatccaaatttcgagaattcttagagtctgtgatatttggtgtcaggtttcatcacaactgttggtgtggtttgtataaaaaatcttcaggaaaagggtcaaagatcttagccaccctggaagaggtgatgaaaggacccgtgatccaggagaaatacacctaccgatcgactgtctcagaggtagacaaattgcactcaactttgacttctgcccacaacttgagagatagtt

SEQ ID NO: 407603 - DNA, 657 bp, Cannabis indica
atcggtcccttccaatgtatactccatacatccgatactggtaaactttgccaatgccctggaaaggacataacacttatccaaggtgtaagtatacctatcgctgattatcatgccagtctaaatccagtgaactgacaaatcagggaattaaacttttgaacatataatcatgattatattccactgtgctgacaacactataatcatgaacaaatacatatgttctggacctaatagaatttataatcatgaaataaatcatgtgaaccatgcaacataaaatgatttctgatctttattaattagtaaatctgattatattgaaatgggttttatttagggcacaaaacccaacaataaaagtggcaaaaaatctaactctaaggctcattgtatagttcggccctatagttgatttaatcccatgtcttctatttaaccccatctcattgtaatctaacactaagtgatggctatataaaggaagtgatgagagagagagagagagaagagagaaataagttgattcaaactacaaaaaggactccatcttcttctctctttatgaatataaaaatttcataactttctctctcagatatgttcaaaggtgatttgagtatcagcccacactattcaagttgatacttaggc

SEQ ID NO: 407604 - DNA, 1243 bp, Cannabis indica
ctcttatagaggtggattaccttcaattagtcacaaagaacaaacatagatggaaggatcacctctcactttctgatctagtgtccaagattgttaactccttgtctttatttcctaatatgtctttctatacacgtaccaagaaataagaatattttggcacacaatttagatagagattcattaggcttagataaagatttggtttggagaacaattcttccaagctaattctatgtaattgtagctatgtactttattgttgttttgtaacaccatcaaatcagttttagtgttgctttaacctgaattttctctgatactataaatttttcacatatatatataacaattagtataaagtataaataaaaaacgatgtaaagaataaaatattttacatacatgctatacattttagattaatacaattttattatttttatttgcttaaaagtaatattaagttttattttttattaaaaacattaattggttctatttttgattattagatctttataatctaatagttgtaaaacttttataaaatattatgtagaaatatgtattcataaaacctatcccataatagaattcttataattaattatcgaaaacatgaaggacgaatctcgaaaacatgagagagcgattagttaaaaaaaattgtcacatatataataagtatatttgaaaaaaaaaaaaaaataatccaatccataacttttacaaaatacatgttctaaaataatatttatcctatataatatcaaaaacaaaaaaatagtagaatgaatatttttagaattatattttaagtacaataaattatttaaaattttctaacaaaagttaaaatacttgaaattattatatcaattgaaatgttgaaaacaatgccaactacacctattttttttggtaattgttctttacaatttctctaaaactaactgcttctttttgttcactgatgaagaaagataatttttccaaccaccatatattatatccaataacaaaattaacaacatattaagaatttctatgcaaaaatgagcatataaaattaatgaatatatgaagtttaagaaaacaaacaatggatcaacatgaacagatggatgggcatcaagtagacccacatcgtgtctcgaacaactagtcttgatctaaaaaagaagaaggggtaatgaaaatgatggccttggcttgaaatagggtaatatttttgagtttt

SEQ ID NO: 407605 - DNA, 596 bp, Cannabis indica
tgtcttaatttggtgtctactacacatatatgataggcgaactcacgtagtggcgaggaggcagtcgctccttgaaaaagataaacatgtatttttgttagttataatatatatttataattaaaagtaatatatatatattgatatattattagttttgatataatttttaaactattatacatttatttttatggcatgtttactaataagtaatgagaatcaatagtaaggtaatcattctcttacatttgtttacttacattattaaaattaggaaagggaaaacttgattaaataagggagaaaagaaagggagaacttcccccaccaattttataaggaatgtcattaagggtaatagattttaattatttttattttattttttaatattaaatatataatgacaattttatcctttaaaatatatcttataaaataactaccatataatatagtttaactcaaaagggcaatttattcaatttaagcattccgattacgtttcctaataaagtaaacaagataaatcacaactattccatttccaaaaaattttagtaaacaacatattacaaatattgattccgatt

SEQ ID NO: 407606 - DNA, 570 bp, Cannabis indica
aggtgttgtcgtgattgaagcgagttttcccaatggttagtagcgtcgagatcgattgcctggtgttagtccaatcaatttgtagtcctaagatgatgctatctacgtttggaggtgttgtggaagattgcaaatatcttttgaattttttagttaattgttgttaaacaaccggttaatcgagttgctcaacaaattgcaagaacttcttgtttaaatattagttggtttttttttttgctctaatatttcgagtgatgtttctgtcattattgagattgaactcgcctagttgaatgaaattttttagttaaaagaaactaataaaatttaattattaaaaaaataatgaaatttaattattaaaaagataataataataacgtcatttttaaaataaaaacaaattatcaattgtttttttctctaaaaaaaatatccttttttccttatttacttaaatttttttgggaattttttcttttttacatttcaaaatagttatttttacatttttatgaaaatctacatagtaatccagcaacttaaattgtaactaaaatttcacat

SEQ ID NO: 407607 - DNA, 780 bp, Cannabis indica
gctaatcgaaaggcatgtttgtcaaattcacttcatttctctcaacttaattaaatttttactaacttaaataaaataaaaaatagaagttacctaattgcttttttgttattgtacttttaaaattaaaaacaaaaatagttaaaatacatttttaatttgacaaaaacaaaattatattttacttattgtggtttaaaacattcaaactaaattttacaaaacgcatacttgttgttagtgtttttggactaaacatgtgttaccaccatataaattctcaagaaaagataagtcactccatcatgggcttaaataattttgcatttggtcacttttttcacatattggctctcgaacaattttaggtcgagatgttgagaccaatcaccatctcctagaggtgacttttgttatattattttataatataataataaagtagattaaaatgtgataaatatatgtgaataatatatattaagtgtatggtaaataaatgtgtaacctatgattttataacctacacttttgtaacctacatgttgtaacttggagaggagttacaatttgttgtcacttgtaactcatgtgttgatcacacattattagtgtaataaaagggttgttacataatttgatgataggatttaaatggtatgaaatatagttgttacaaactatattaatactcatttatatgagagaaatgagtgttgtgtattttgaattctaagtgatcacctatacattataaaaggaggtctttggtgctcattt

SEQ ID NO: 407608 - DNA, 702 bp, Cannabis indica
ttctaaagcttattccaaagtgaggggacaacctcacaatgaagagttgaaccaagtaagcggacttgcaagagaagcacccatttttttccttagtccaaacccacttatctttgtcctggcccgtaggttgcccaccttttaaaatagcagacacagtctctttgtcaaataggtcgtttagcttctgagtatcccaaccaccgttttctaacatcaaatcagccactttgaaaccctaaaagcatcgagtttattagattttgggataaaattatttccatggatcgaaaaacccagggatcctcctaaatgttaatatctcttctatcagccaccattttacatgcacttttctttaaaatagatgtcgatttcatcacgttattctaaaaccacaaatccgactccttgtaatcacaattaagtaaattccttccttttagatatatagcttccaagatacggcagcaaagagattggctaccaatcaataagttccatccccacttggctaaaaatgcctaattcatctctttaattttctagaaaccaagtcctccccggaaggcacgcacctagtttaacctagtgcataactatatagagttacacttaaaaaaaatatcaatggaacaacaatgacaataaacaatctttaatactatattataataaaattatttttagagtaaatataat

SEQ ID NO: 407609 - DNA, 592 bp, Cannabis indica
aagattcataggacacaatatcatgatttgccaagatctagtgagacattactgcaggaaagccaataagccaagttgtatgatcaaagttgaccttcaaaaagcctatgacacagttgagtgggaattcctagaggaggttctggttggactcaacttccccaacacttttattcaactcataatgaattgtgtctctaccccaaagttttctcttatgttcaatgggacccttcatggtttctttgaatctaggagaggacttcgacaaggagatcccatgtctcctttgttgtttgtactgggtatggaatacttttctagactgatggggaagattggagagaaggaagactttcactttcatgaccgatgttcgagtctcaaattgaaccatctggcttttgcagatgacattctactgttcagtcatggtgatcccaaaagtgtactatatatgctacaagctttaaagctcttttcacacatcaggtttgcaacctaatgcctctaaaactgctgtatattgttgtaacatgcaacatgaatatgtggatagaattttgcaactctcaggctttcagagacatga

SEQ ID NO: 407610 - DNA, 520 bp, Cannabis indica
attggattcatgaagatggtgttagtacaggaaccatgtcattactataatcaacacattgttttgtgttcactaggtgctcgaccaaattccactatgaaatatatgattcaatgtactctctggattcaaccacatttaccattaataaaattgtgcactctaccctcaggtcgactaaaacttacaactaattaatgggaattttctcttccaatagttggtgtttgggcaataagatgaactttgcacggaatgtactttcaggtctttccctgcctactattggctttttcaagactaaggaatttgaaattattatagccttgctcatttggaataatcttgggattattttgacattgattcatgaagtttaaggccatactcatcccaatgatttagtctagttatgaaaatcttgtttccaatttcccttagagtaaggtctttaatgttttggcctaatttactttatcggtggatagagatttttttgattgaaggattgtctaccttc

SEQ ID NO: 407611 - DNA, 529 bp, Cannabis indica
ggaaattaattgcaaattctgacgaccttagaggcataattggacttggagctcaacataaaagtttaagatctcgttcttagattttttagagcatcttgaattgtttaattccaagtaatattgagagagttatgagcaaaatactatcagtcgttgcagcaggaaatttctagaaaaaagatagcgaaaataaagatagcttttcaagtagagttgtgatttttttatcttttttttcaaaagatgagttatcttttcttttaatgagatatttcataatactattctaattctaagggaatttatctatacactatgaataaaatcataattctaataggattcatctaactttctcattactataaataagacctcttagactacaaatggaggaattcaaaaactacaaactagagagaataactcaaagagagagagagcaaggaagatacggagattgcggcttcgaagtgttcttcattctagttcttttcttctccttttactcttactatttattatg

SEQ ID NO: 407612 - DNA, 550 bp, Cannabis indica
tttgacatgtaccaaatcatcctctctaaacttttctaactgttaaaaattctctttgaactattgagattatcgaatttaaggatttttgtccaattttattcaattttactaatttagtgattgtttatgtactaaatcatgctccccaaactttaatatctatcaaatcacgctcttcgaactttaacacgtgtcaaatcatgccccctaaactttcatctatattagactattcttattaaaattggataaaagtccttaaatctaacaatctcaataattcagagggatttttaacgaccagaaaaatttaaaggtataatttaatacatgtcaaagttcgagaaaagttcgagatgtgaaaatgttaattaacctttagttcataataaatgcatccaatcttgtttaagtacattatctataaaaacagccaaataaagtacacatattatatcgcgtcaaaaaaaaaaaaaagtacacatatgatatgatcaacgtcttgctaatatatattacatagtcaatgcacgttaattaaaaacat

SEQ ID NO: 407613 - DNA, 764 bp, Cannabis indica
attttagaagtggtgggtggtggtttcggtggctgtggatggtggcggtggtggtgataatttgtgactgacagaagaagaaggaagaagaagaaaatgaaaactaaaaaaaaaatgtatgaaaaatatgatatttagggaaaaatatttttattttggtaatgattttttataaaaaaaagtttatatatttgtgtggaccaataaaattatgccatgcgtacactgtgtccacatggacaatccaacatgacacttaacagctaaatttggacagaaagtttaaattgctaacggtattgtggttttgggggttttatagccaaaaaattagtattgggggttaagtgcaagtaaaatgaaagtattgagggttttgacgcaattaaccctaaattaaatttgaatgacatggggtttgtgtttccaagtaggtttacttttaaattaaaatggtggtattattaatcccctcaaacacatgggtttcatattattccctttaagtctactccctctaactttactctttacaactcaaactcacataacaaacacccattaggtggcgtttggttagaaagaataaaaacatagctagaacaaaaattacattataatactttaaaataagggataattacataagacactattttttgtaaaaattatatttttacgtttaaagaatttcattttttacatttttaaagttttcataaaaacaacaagaaaactatgttagacatttatatgtatagact

SEQ ID NO: 407614 - DNA, 1207 bp, Cannabis indica
taatttgatctagaattgttatgataagattaagtacatcttttgtacctatttgtgttaaaaattattttcaagttaattatactaaaaaaacattatcgaaatttgagttcagatactattttgtaccattttaaaaatacaaagttcaatgtgttattttaaaaaacaagaatccaattaataattttgtaaaatttaaatacaaaaaaatattaatatttattcaatcttaatatattttaatttaataattattatgaaaaatatttaattatttataagtagttatcgaatagtagtgttggattaatatttatatatatatttatatatatatatataaaagtattagatattattagtgtatctctagtccctaatatttaaaattattaagaacatcatcctaataaaatctaattatcctaaaagaaatccagcaaaaataaaacaaacaaataaaaaaatctcaaaaaaaaaaaaatccaataaatcataatggattttttttgtatacaaaaaaaatcccttccatatatgtttaaagattaattttgattagatatgtttttgtttttaatttaatacaatttaaattaagcccttagatgttgcataaatccaaaagtttaactaacttaacttttgaggttgaagttgaaggatatacctcaattgggtacctcgtatgcatcaagtgtgttagttatgcaagttattattataatatacaaattgcttttttggaaaactacttaactcaaaaaatataaaaaacaaagttgaaaattcactccaaaaacaacacttgaactgaatcctacaaaacaaaatatttttttatttgcaccctacaaaacaaaatattaagtatactttaatattttttttttataaaataaacttaaaataatttttaaaaattacttttaatattttttataatttttttttacattattttatgttaatttcaatacttattttaattttattttaataattttttactatgtaggttgttatatggattttggttgtaattcatgttccttcgttagttgcaataaagttttttatgtagaattccgtaaaaaatgacaaaaaaaccaaaaaaaaaaaatagttttaaaagttagtaaaaataaaaaaaagtaccctatgtaggttgttatatggatttaattttattttaataattttt

SEQ ID NO: 407615 - DNA, 1014 bp, Cannabis indica
gaggtcttgttaaatatttgattaattattttaagaaagtacttaattataattaaataattttaaaaaaggtaatgtctatttaattaattattttaagaaaatacgttaattataattaattaaatctaaaaaaggaaagtctacctattagtaacctgctattataggttaaataaaaatgtaatcatatggttacaataaaaatgtaactattgaatagtcacccatatatatatataaaaatttgttgtttcatctaagtggggggaacactaggtgagattccacaagagttaagctccaatcactccttaattttaggctctcggctagcatgtggaaacaaaggtatattgtttagtcatcttaattttgaatttttagattcaaggttaagttatatatataaatatatatatatatatgtcactataaaaaaaaaatgttctaataaatgagtatgaaactaggttttcttaaagcaaatattggttctcaaaaggttacttttgcaatcaagattacaatctccacattaggtaattaagaacattaaggaccaatttggtacagctgtactgtggaaaaaaagcaattgtagctgtgctgtgagaaaaaacagctgtagcaaaactgtggaaaaaagctgagatgactatttggtaaattataatttttaaagtgctgcgacttgttaagattctattataataacgataatattttaatctagttcattataatcacaaatatataaaaaaaaaaaaaatctatgttatataaaattattatttttatatatatttttttctatagtataaatttatatgcattatttgataaaaataatatttgatatttttaaattatatttttattacttacaaaagataaaattatagtttataagaaacataaattgatattgtttgttaataataaaaatataaatataaaatattttttaaaataaaataaaaaattaaaaatttaaatattaattatttttaa

SEQ ID NO: 407616 - DNA, 654 bp, Cannabis indica
gcgcaaaaactactgccgccaaccccagatcgtgtgttgggtacctgtgttcatactccttaagttgtcttgaggcataggctactacattgtcattttgcatcagcacgcatcctaacccttgttttgatgcatcacagtacaccacaaacttatccttgttattgggaacacataatacatgggctgttattagtttgtccttaagtgtttagaagctaccctcatacttttctgactagacaaacttttgggtctttctgactagattttcattagtaacgtccccgcttcaagtctccattgggtccttacacccacggactaatggctcttatacacgagtacgccactctggctgcttcctggataatccttcaacgaagcgtctatagtaaccaactagacccaagaagcttcttacttcacttgcagtcttaggtgttggccagctcttgaccgcttcgatctttgtaagatccacctcgactccatctttggaaactatatggcctaggaatgccaccttctctaaccagaattcacatttcttcaatttggcgtatagttggctctccttaagtcggtttagagtcatcctcaggtgttcctcatgttcctccacagttttggagtagataagaatgtcatcaa

SEQ ID NO: 407617 - DNA, 827 bp, Cannabis indica
atatacatatacatgtatatatgtggaacatcgtcgctgtgaaacattttttgttcctcctctgttaactcatctggttcaaaagaagcttttaaacaatcactattttgatggattgtgactcctttttgcttcttaaaatgaacatttttcttcgttgttttgaaggttttcggagttacagaagtggaggacgctttattgagagtaatgactcttttatttttcttgctatctttaccaaaggaaactgaaatttgcattttacccttgggtagtgactgatcgattttccttagtggtaaagtaaagcttgtcatcagggctgtcatcgaatcttcgatcggtgtcaaagctttttgccctactcctcgttgacttttagggatatacttaaaggttcgtttttggttagataccttcaagttctcctctttggactgaggagatttcacaagggatagtcgcttaatttgtggagagttttgtacgactgagttttcgtgatgtttgctctcctcaggtttccctttcaagatggtgacattagctggcttgtaaaattttgcatcggcataattcacttgttccccgtaaaagggattcgggtctgcattgacacttttgactttgccttccttgcaaaacttaaagcattggtggagtgttgaaggaatgactccatattcatgaagccatggtcgccctaacaacacattgtaggatgtatctgaatcgatgacatgaaataaggcttcagaatttaactcgcctatttcaatttttagtgtgatacttccccttactttttctccagcttggttaaa

SEQ ID NO: 407618 - DNA, 538 bp, Cannabis indica
ttacaatttattgtgactaagtatatttttaatcacaattatttattgtaattaaattactattgttttaattaaaattattttttttttgttatgatttaaattatatttagttataaaattttatattataactaaaaaaattgttactaaagttaattttattttttgtttttcgtggtaatagaaaaggaacaattttaattagtgtcttgctaaccagctatatatctgatcgaagaagaacatgttatgaaatatgaacttatttatatataaaagtccgttttcacgatcgatgattacactttcagatttatatgttaataatttatatttataaattatatatcgtttttcttatatgttctagcgatcatatgttataatttgtatagaacgtaactaaatatatagtgccgcagctcattatatctattttatataaagtgtataactaaaatttgaaaaatttatgggtgattttttatttttatttaataaaataataaaatattatttatatataataaaacaa

SEQ ID NO: 407619 - DNA, 674 bp, Cannabis indica
aaatggtaagaatgggaaggcctggttacaagcaattcaagaagaaatgacctcactcagaaaaaacagaacttggattgtggtcaagaaacctgctggaaagagagttgttggctgcaaatggattttcagagaaaaggaaggtgattctaatgatggttcaaagaaatttaaagctaggttagtagctaagggtttcactcaacaagaaggggtagatttcaatgaaatcttctcaccagttgtcaagcaagcctcaataagaatgatactgtcaaaggctgctaaatttgatcttgaggtggatcaaatggatgtgagaacagcctttctacatggaaatctagaagaagagatctatatgcaattacctgaaggatttgaaagcaaagacaaagaccaagtctgtctcttgaagaaatctctatatggtcttaaacaagctcctagacaatggaacttgaaatttgatgaatacatgagtaagattggctactgtaagagcaaatatgatccttgtgtatattttgctaacaaaatatatctgctattatatgttgatgacatattggttgttgggaaagaaaggtctgaaatcgacaagttagagcatctgttgtgtaaagcccgcttagttaatttggaaattatcagttaattgtgattaattatga

SEQ ID NO: 407620 - DNA, 531 bp, Cannabis indica
atcttcaaattctagggtttgtggcaagctttcaagaagtgtgtgttgcgattttataccctaaataaaacccatttcaatctaatatgatttgttatcaataaaagattataagtcgtttatgtttacatgtagttttttcatgtttatggtttaatgtatacaaaatctgttaagtccaaaacattgccaaagtatgctagttttggatgtatggagtatacattgtgtacaccctaactattataggtgtgttagcatgatttttaatgtactgtgcagctcgttgctaatcaacgagaatatttgaaaccatgaataattaaaattttgctaatttaattaaaaacataacgtaatacatttataaaatcctgagatcctatttacaaaatacaattacaaaagtttactatttatatacaaaagatttgttgcctagcgactaaacagcaaaagccctgatgtcccgaagatcgtacgctctaggcatatccgccccgacatgtacaatcttcaccttctcgctct

SEQ ID NO: 407621 - DNA, 973 bp, Cannabis indica
attggaagaatagcaagaagcaaagctgtgaaaacagttaaaaagaaaaaggctgctaatcccgaggcaaagccaaaaggaaaatgcttctattgcaatgaaaagggccactggaaaccccaatgccctaagtttctagcaaagaaacaaggtatttctgtctatgctataaactcatgtgttttagagaattattatccccttgggttattaattctggatctactaaccatgtttgttttcttcttatttcagctccagctgcttaaacttggattgttatcctagcgagttgagtcggatggttggacagaagggtggagaatgtccaagattgaagatgaagctcgaaatcttcttttaatttttgaattaattgttttaatttatgaacaatttaatttaaattattggtttgggattttattcccaatttcataattatgcagacaattcattttttttttttgagaatattaataaagttttctcttttagttatgaattgcatttatgaattgagcttcagtttttctttatcttgtgtatgccaataccaattatatttatatgtttatcatgtttgtatgtgtttgtgtttttattattgatacaaaatctatggtatattcatctttgcaaagagatcataccacataaacacttagaatttaaaattcaatgtttatgaataattgttaattcttaagcaattattacgattttgtttaataaaagatcttttactctgataggggtggaaaaagttaagaagtaatatatgcagttcaacgatcttttacatctattgaactttagattatattcataactttacatgatctctataacacttaggtgtggataaagctattgacatatgtagttcattttgaactctagactataatcaatacactacaaaatctctatggcacacatattttgaataaacatggatgtaatataatga

SEQ ID NO: 407622 - DNA, 548 bp, Cannabis indica
atatattaggaaaaatgacgtgatttatgcatgatttagaattaatgtatatatagataattattatttatatttttttagagtttggtagaagaattttcttttaaaaaaataataataaaataattagaaaataaattttgtgtggtcataggagaattttttaaaaaataataaaatatttagaaaataactttgtatatatggtatcatatagattttttaatatattaattgttcattatttttaaaatttaatttaaaaaaaagaagccacaacatggcaaaaaaaagctaattaattttttttttttttaaaaaaaaaagccacaacgtggcaaaaaaaaaaagctaaatttttatttgagttatcattttttaaaaaaaaataatgaattaaggaaaaaatatattttatattaattaaactatatgaaattaataaaagattaaagaaagaaagaattaaggggaaaaaaaaaagatgactttaaagcatttttagaccgctacgtcaccccctcatacttctactttatgtatataga

SEQ ID NO: 407623 - DNA, 606 bp, Cannabis indica
taccacgaataaggccatgatagtgacactcttgggggctgttcccactgtcaatggtaacttaataagtccagccggtgccataccacttcctgtgaatccatagatgagatgttcgcagggctctaaatcctttgctcccaaacccatcctttccaatgaggacttgaagaggatattggctgatgacccattatcaatcattgtccttgccacaatcatattggcgatttgtacctctactaccaaggggtcgttgtgtggatatcgaacgtgtttggtgtcctcttcagagaacgtgattaactcatgttcataacgaggttgcttgggagctcgctcttggacagccaacacatcgttacccagttcatgtcgcagagaccgagcgtacttctctcgggactttccggagttccccgcaaggtgaggtcctccagatataatgtccaaacggcccgcaacggggggaggtaacaattgttggtcatctccaactgcttgttgttgttgttgtcgttggggccggtcattgtcccgtcgtacatatcttttcaagttggggttgttttgtctgatgagaaactctatttcctccttcagatt

SEQ ID NO: 407624 - DNA, 857 bp, Cannabis indica
agagagagagagagagcgtgtttttggtggctttttacaaagtaggatttttggtaactaatgataaaataataataatttagattttttgcccttttaaatttaacttttattaaattatgccccaaaattttgatatatattaaaggctaattaaatttttctccccttaattttaacatatactgaattatgtcccttgaattttttcaagtcgttaaacatttttctcgaactattaagaattgttaaaattaaaaaatttttgttcaatattaaagaaagtttgacattgatgcaattgattatcttacgaaatgggttgaagtagaagcgctcactaccataactacggtcaaactctacgagtttgtgtcccaagctataatatatgtcgatttggtatttcttacaaactgatttctgataatggtaaacagttcgattgtaaagaatgagatctctatgcaacgaagtaggaatccgaaaggtatttcctacagttgcttatccttagagcaatggacaaaccaagacaattaataatcagataataaaacatattgttaaagggaagctcgagaaaagaaaaggtgtttggctagaagagtttccagatgtgttgtaatcgtacaatacgacaccacgatcaacgactgatgaaactcccttctcattattttattgatgtgaagccatagtcccgactgaggtaggcacatgatcccttagttgtgatgttttcaacattaacaatgacgagctaggacaatgtcccagggggcgtttggtatgaggtgttcaaaataatttgattatagggaatattatgaaggagaatatgattatagggaaat

SEQ ID NO: 407625 - DNA, 804 bp, Cannabis indica
ggctttaggcttacgtgcttcatcatacactgacacgtcgccacgtgattgaccgcttaaacaagtcctcctcctctgctctggtggaacgttcatatagactccactccatcgtaaaatcatatggaagctagagtaatcccctgtgatgcgctccatatgagattcctgaaaacatcccacattttgacacatttccatgacatttaactcggtccaattattagtggtccccagtgcaccagactgcctggggagaactagtaggcgactgcctctacccagctggagatcacgacacgtggggccatgtaatgccgagagtttggataatgatctagcaacaaagaatgaaagaagttttaataattaaaaaaaaaaaaaagtacaaagaatgaaagaagtctattttgctgaatagagaatgaaagaactgtttatttagcttaaaaaaaagaatgaaagaaattacgctacttctgacgttggtggcgtcgcgtaatgaaatcatgggataggggcgaaaggaggtgtgtaagataaaacggggttttgatacggcacatgaataccaatataacacgaattttatatattaagatgagaaaaattagaggtaggtggaattttacacaaatttaacatgtttaacataattttttaaatataataaaataaaaaattattaataataatttaattatataaaaatatatatttagtgatttaatgttaagttaaaaaatttaaatttaatttttttaacataaaattaaaaatattttaaaattttttatttttatt

SEQ ID NO: 407626 - DNA, 687 bp, Cannabis indica
aaaataaaatattagtgtaaactgtagaaaatactatataaaaatatacaatagatataattccaaattttgtgtgtgtgtgcttcaaatcttattatttgctttaatccataacatagataatattaaaaaatctttaaagtaaaaagtctcaactccaaatcctcacaggtattgaaatatttgaaaagaggaagggttgtcactcttggagttggaaatgtatattaattgacgctcgaatggataaaaaattttatgacgacaatgtaaacaattattgacccatagataggctaaccaaaaatattttaaaattcaaatgacaagttaactttcgaaatttcattacagtacctagagccaaaataaagaaataaacaacgatttttttttatttggtgattaatatttatgaaaaataaactatagcaaagtttcttttgattgatgattttttatatatattatatatgcatttatatttttatcgatatatatatattttactttgctaaatgattaaaactaagatattgcttgttatatgatatatatgtatttttttaagggcaatatccacaataaataattaccgtagcaaaattttctttggtatattttgattttttttttaccaagctacgctgatagagaaatgttgctcttgttttttgtttttttttt

SEQ ID NO: 407627 - DNA, 597 bp, Cannabis indica
taagagtataaaagaattatttatttatgtatatatattgttaattgacaaaagtagaaatcctagaattgaacagtgatatatagcttagagagacagagtaagtgaaggaattttttgaatttatagttgggagaaatatatataccaaaaaggatgatgatcagctggatgatatgagtagttgaaaaacatctgagcagagttgtgtcagtcaatctaattgtctgtcatcggaaggaaaaaattaaaaaaaaaaaaaaaaaaaaaaaaactcttactctttatttagggtttgagagaggctttcatatggcacatgtcagactcaatctctgctaaacctcacccactgaaaatgataatgtaaattaaagacaggtgggcttcaatattgtagcctcacaaataaaaagatattatgtcccattattattattattattatttatttgaaaataagtgattaaaaaaatgacagtttagagtagttctgcccatttaataatgagaaatgcagattttaagatgtgacgcaatataaaagttgtcatagtttaatttagaaggagtgctaattacaatattctattacaa

SEQ ID NO: 407628 - DNA, 541 bp, Cannabis indica
gattcttatttttatacttattattctgtacacatatttatagtgtgaaggtgattatatataataaaaaccactacaaaaaatagaactactatatcacaaacatgttagacatttttatatatataaactaaaacatatatgtttatgtataaaatgcggaattaaataaaaacatatatgtactataacttaaggatcgaaatgttagaatttattggggtcacaattgtatatataaaatgtgtgttgggtcatcaaataaataagtcaaatttatgtggtctattttggaataaagtttatgacttaagggcatgattatcatgattttaatatgtggataccaattagacaatttctatattgatgaggggccaaatagaaatagtcaaaaaatattaccaacagactccggtacgcttccgctaatctatattctattatttgattctcatgaattaattagggctatattctgagtttacagtatttctaacacgaaatacctccagccattgattcttgagcttcaaaccca

SEQ ID NO: 407629 - DNA, 493 bp, Cannabis indica
gcccaccaccaccaaaaccacatctacgcaccacaaccatcaccgaaacctcttttcaaatccaaacaaaaccccacatctcagatccaaacatatcaaagagacctaacacctaccgaaattcgagtcccaattccataaaaacaaacaaacacaaattaaatccacatgaaaaaaacttcagattaaagaaaaaaaaaaatcgcaagggtgagagagagagcttattgaacacgaagttcaaaagcgactagatcggagtcgaatatctcaaactccacgaattccggcaaactttaatagctgattccaacgatgttaacgcccaaacttttggaagggttttgttctattagagcttctaagctccatcatactactccctatacgaaatggtctacgaaatcatcgacccaaaaattaattagtaaagttttcggactctgtcgatctcctccttcgggctcgtgtcaggcggggctcgtgagggtgg

SEQ ID NO: 407630 - DNA, 880 bp, Cannabis indica
atgaaaacctgtcatttcaatttttttttaattcaaaggttctcgactaaacctctttgacaaaagtggagtcgaaccgttataactccctgaccaaacatttttgacgagaaaggggttgaatcgttataacaccttgatcaaacctttttgatgaagaagggatcaaacaactataaattttgatttataacctatctaacgggagagaaaaatcaaaagttataactcgcgtataaaactgaatactaacggttctcgcgagctaggaaagtactaaacgaggcatcacgacgccttgataaaagtacttaaacctagaaaatggatagataatataactattcatacaagcaaattaaaaatatacaaagtgataaaatccttaaagtatatttaagtttgcttaaggcagattataactacaattgcaaggcagaattgacaaccgctcaaaaatcataaagtttggtagattactaactacttaaacaagaagattacgagcaatggagaaacccaaaagtgatgtatattcgattaaaatatagttgtttacattgtgaataaaaacacaagcaaatacaattgtattaagttcaaatgaaaacagtacaagacatttaagataagaaaaacctaagacttgttacaaacttgtctttacaaaaatgccactaggggcaaaccattaagtcattctcctaagaagaggatgagagaggaagaccagctacacatagacgagaaagattggctgcacgaagagagccttgatctctgcacagaccctattctcctcatcatcagatcccatttcctaaagtcgagatctacttcccagccttaggaaatttctcaacactggagagaggctgac

SEQ ID NO: 407631 - DNA, 666 bp, Cannabis indica
tctaacatgtaattacaagctattatctaatgaaatatatatatttatatacatatatatgtcgtgcattgttgtattaacctcaaattagtgtgcattatagtatttctttggagaagaagcccactccatatatacaatatggagtctcctaaaaattggctttagtataatatcgttattgatataatttaatatcgaaacttaattattttaattaaaaaatttatagagaatcgcaaatcaattataagacgtggtgtcatagaagctcgatctaaatactttaatgtctcatagcaatgctctaatttcaatgatgactctctttaaaattatgaaataaatttgatattatctaaatatgtaatattttatatactcttgtataaatcactttggataattttatttctaaaactactttaatactaatcattcttcaaggttgtcattatttcaattatatcaaattaatctaattcaatctaattaaaaaattatatattcaaattataagttgataagttgcatgcgtaattattttgcttatacacgtggtgagcaattattttttttaaccagtggtaagcacaattgtttaaaccttatttttctgcattgtaaaccattcaaagttttttaaaaatttataggtggtgctaa

SEQ ID NO: 407632 - DNA, 661 bp, Cannabis indica
atctccaagagtaggattgatatcaattgaatcatttgtgatctttattcttttgaatataaattatttttttagatttttatattatttgtggatttaatattacaagtatattgatattttaatttttttttttgatattatacaaataggatgtgatttatgatgaagattattattactattttgcatgcatgtatatgcatacaataggatgtgataatcaatttgtgtagaataaataaactccataataattttctaaaaattataaaaaagacactataatattcaataattaattttaaaattatttatggattagaaagaaaacaaagaatcattatttgaatcaaatatataattcaataaaaatcattaaccatacaacaagtcaccaacaagttacttatttatttgttattttttaaaagtaataaattatttattgtatatttaatatttttattcgtaatattaaccattagatcttgttataaacaaatcactgattagttttgatcactactatataaaagaagtcttaagttatatttctaaaactttcgttagtacctgatctttaagtgtaagtcaatgactacgtagcagtctctgtttaatgctactcattaaacttaaaaatctatatatatatata

SEQ ID NO: 407633 - DNA, 488 bp, Cannabis indica
agtattaaccaccacagttagtttcaacaactttaattttcttgcctagttgattttccaactatgatttttaaaatttaaaagaaacaacgtctattaatgcccttatgaacaaaataagtttcattagtttgaagataagatactattattgatcattccatgaaaccatgagaaaagatccaccaaaatataacataagttcttagacaatgaaattttattctgtcacttgatttctttatgtttgtttgttacccctttctaaaatctaaaatttattaaatcaaggggtcaaaaattctatcaaaaataagtcttttttattttcctttcggagatataacctacttatactaaagtataataggattctcatgatttaatttatgttttgtaccacaagagaaattataaggtttctttatatgaggttataaattttaataaatttataaactaaagaactagtagaaccaatattgaaa

SEQ ID NO: 407634 - DNA, 484 bp, Cannabis indica
atatatttgacctgcccttagggctaggatatttatatgtgatcttttttatgcacatatttctctttttgacctgtcctttggatcaggatttttatacttatgctttttatttttgtgcatactctttttgacctgccctttgggtcaggatattttacttagtttgttttctatgttattggtgaaatataattaaatagcgggctgtgtataatttaaatttaaatatttatttgtgcatgagatttaatatgaatttacactgatgatagtagatattaataggagctagtaatctttagtttattttttctaaaaattatctcatatatatatatatatatttttttaatttctttttttctaaattggatttgggttgctttcaattaatttctttagtagtttatatgagtttatgtggattttagttgcaatttagattgttctattaattattatagtgattttatgtagaatt

SEQ ID NO: 407635 - DNA, 614 bp, Cannabis indica
tataaattatattttactattatcttaataaaccaattaaaaaattaaatatctaactttaaatcttctctaatttttaaaacacatataactctaaacctataaatatattatatatatttatatattattttatatatcacacgttttttcttcttcttttttttttaatttttaattaaaagttgttttatgtacatctctcacactatttcttcttcttctttttcatttttatttttttcttttgttttttaatgaagattctccatctatctctaatcctatttttttttttctctttttttcttttattttgctttaagtttaagtaactattaattttgatgtatgcatgacacctcgacaataacatcaataaatagcatcaagacctcgattttcaatatttctccataatttggagacatacagacttttcttctttatatcgacaactttactgtcatcgatgtcttcacattagtcatgaattactcattagtatgaattatttgatataaaaaaaggattttttaatgataaattcattctaaaatcattccaaagctatttttctctactctcctttaattctctcatttttaatattt

SEQ ID NO: 407636 - DNA, 544 bp, Cannabis indica
acagtttgggagaggtagttgtggaggctgctatgctctgttggagcatatggaagacacgaaatgaagtgctgtggcaagggaaatccaggtctgtattggaggtagtacagtcggcaaaaagggtccttaatcactggaaaattgctaaatttcagtcacctactgctatgtatgccacgggtgactctttaactagcaatagatggcgcaaaccagatgcaaatacggttaaggtgaatgtcgatggggctatcttcgaatcccaacaaaaatttgggtatggtttcattgctcggaacagccaaggtaagcttttggaagcctattctgaaagtcgttggggtagtgtccttcctgaaatagcagaagcaattgggatcaaggaagctttgagttggataaagacgaaagcttgggaaaaggtggttgttgagtctgacgctttagttgtggttcaagcaatcaatagttcagttcatatgccatctcagtttggtttattggtggaagactgtcgttccattttattctctttgaataa

SEQ ID NO: 407637 - DNA, 717 bp, Cannabis indica
attaatttaactatataactattaatatattatttgtaatattatttttccttgttatttttaatattaggagtatgtttcattttaatatttttaaactttatatttattttctttaaaatttttaaactttaaatattatttttttaaaaaaataaaaattaataagtattttttttaaattataaaaattttatatatatacacataaaaaataaaaaacaaataacaataacccattatatataaatatacaaattttaaaatacaagttagaagccaattgcatggcaaagtgagttgtttatgattaacaatgaattaaattactatttttttttttcaaacattgcgtctactttaagaattatgatattgtctctttttttttcatcattatatccaattttatatcaagttgcttataaacaacatatattatttctgaaataaataaataatataatgtgattctacaatacacttctttaaaatggatgtattgatacatttttttatttatttcggcatccagtagaatttttttagtctaatttttttttcttcaatatccatgtatattataactatttaagatattttataaaattttaaaaaatttaaaataatttacaatataaaaaaaaatgtttaaacaatctattttacacgcgtataaaaataaaataagtcaacacgtaacacactgtttgaacg

SEQ ID NO: 407638 - DNA, 661 bp, Cannabis indica
tttaagaatatggcggacttcttccgcctctatcttacccacttcactcccaagggcttaagtatctgtcttccctctttattctctatgcctcctagaagtgggacatgccttttccgcacgaggttagctagttttttgatttgaagtccaccccttagcaaggcaggtcatggtacttctatttctctcaatcagacttcaagtggttgacgggcatcggggattcagccatcagcaaaattgggcattttgttgatgagtatttcatggtggatggcatgggcaccgcccacactcggttccagcagatccctacatttcaccgccctcccctcactcttactcttagagatagagctcaagagcttgctcagctgccaggggatgactggaatatcatccagttgacctccgaggacaactttgtgaagtacgggctctatccaaaatattttattcctaagccattgaaggggaggaagaggaaatttggcactggccggactgagggagttgataaggagaatgagctgattcaactgaagcgtgaggctaagttgaagggaggtgcaagcgcaagcaatatgctcacgagcccttgaatcctgaagatgaagcagaggaagagcaagtgactccgctcaaaaagaggaagaaa

SEQ ID NO: 407639 - DNA, 577 bp, Cannabis indica
aaatgagaagagagttttgaggctcgagtgtttgttcaagaactctattgcaaaatgaatcttggttcttacttgagattaattatcaaagtagtgtttagattgaagcttctacgatcattggctgttacagattcttcatcatagtggagccacggagaccaatttgatattggttgaacaagtataaatcaggtggtattctttacttgtttgaacatttgttttcattgttttgacacagtctttgttgttttattctatgatattgttccaacattgatcttgtttgtttcaacattcaagttgattgaatctgtttgtgatagtatcagattacaaacctttcttttagagagaaaaggattagaaatattagcaaaaacagtgcccaaagctatccataactctgactctcttaaggcctcaaaggagtttcctctctcaaataaccccagaaaattaacaaaaataaaatacataatattacactgggaatacaaaatctcataaggccactttattctctaaaataaacatgaaagttcaaaacctttacaaataggtaagacaaaag

SEQ ID NO: 407640 - DNA, 739 bp, Cannabis indica
acataacacacctagtaactagcttatttataccttctagaaattcaaacaaaataatgtattttgaaaatgaaatatcaaatcaaatcatactaaatgagtttgagtaaagcgacacaacaaaaaaaaaatatcagacactttttacacacaataatgtgtattaaatttcaactatagataatcatatatggaaaacacgtcaattttataaacagtgagtgtgatttgtgtgtgtcagaatgcacaatttgttgatgtccaatattgatttgtatatttatgtagtgttgtcatttaattgtttgttagttgttattaagttgttcaacaaataaaaaaatgagtatgtgtttagttcttttatgggcattattgagttgatacacacgtgttttgtagttgcttgtcaatttattttatacatcagtggtttttttcctttctttggagttgatgcactttgtggaattgtttacatgtctatgttatttgcatattgtagtggagttgttatacagttgttcatttgttggtatttagttgtttattcaatagaaataaatatatatacatattttttttatttgtatgtttttttttaaaaaaaaaatacacttttaaagttaaaattacacatgtttaaaaaaaagttaaaaattacacttatctcaacagaaaataagaaaaacaactaaaaataatgagaaaacaacctcacgacaactataaatcaact

SEQ ID NO: 407641 - DNA, 731 bp, Cannabis indica
acgtttaagtttagttttttttttttttttttttacaagtttttccataaaaacaatacaaaaataataagaaaactacataaaaggaaacataaaaataacaacaaaaaataacatacatataacaaaaatcaacaccaaattaacaagaatacaacataaaaagactgtattttctgtaaataaaataaaaaaaacgtaaaaatgtataaaatttcgtaaaaccgtatttttataatttttttgttaattttatgtatttgtgaaataatccttttattatttactacaagggttttttttaaaaaaaaatatgagaaaatataatatagtttatttttttatggaataaataaataatattatagggttatgagttatttttttttaatatatatatatatatatttgtatgggctttttttatataatatttttgtaaaaaaaagtcgaaatttcatatttgtaaaataataataaatttagcctaaaagttatgaatgccgaaaaagtcactgaaaaagttagttaccggaaaagtcaccagaaaatacatcttcgtcagaaatgtcattggaaaaatcactagaaaagttactggaaaagtcattacttactagaagtagatgtctcagatataactaaaaatagaagcggatctataacatgatgaataaaaataaataactcaaaccatttataattaaaatataactggttttgtaacataa

SEQ ID NO: 407642 - DNA, 5211 bp, Unknown
  Description of Unknown: Contiq #20041 of the LAC Indica assembly polynucleotide sequence
gaccattttgcccctccaccataaagtcacataaaaatcactaaagggagtatttttgggaaattctaaattcccggccaatcccgacattcccaatgtctaaaacccgtccccaaactactaacatactaagttgtgatttctactgagccaaacgccgagttccaaaataccgggcaccggaattacaaaataggcaagctactgaataacataaataacagtataatatattatttaaatagctataaataatttcataatgaatcataaacaactgctaatttccaaattaactaagcgggctttacagagggatatgtggatctcaatcttttgtatgattaatctaattgaaccaaggattctttaagaaagtaaaataagattataacttaactacatatacccaaaattttaaaagtaactctagattataattaaaggaagtcactacacaacactcttttactataataacaagtaaaagaataacaagtacccaatattttattaatgaatatattataattttctaatgcatgtaaaataaaactattccataaacatgtaagttaaaagaatattaatttattctccattaaataagaaagataatttattttattccatatatcttatgattgtctacacagttgtactgtagatgttcatacttaggagcatacatagtacaggtaaacaaattatatatataacagatacatgtatggtataaggattaacttatgtataagagaaatagatatatttaaaaataattaatgacgtcgtggcggaagaggtgggatgctttgctcgtttctaaaaaaattattgggatcaactttggttttcaccttaactaacttgtcaaagtttttaccaaagtacttttcaccccagatacgtgcttgggtgtaattattaggactcttgggatcagtttttcctaaatcaaggtccctataattgagatacgccattcttggattttgggacacataaggcgtcatgaaattataaacacttcaaacccagtttatatgcttttcattatcttcttgcttctcccaggtagctgcgtatcaaacttcgtacatgattccagctcgatgagggaaaggaattgttgattctgagatcttgtccattataccaccgtaagggtacaatacatacaccccaactcctacatcttcttcatacaatttctccaaaattttgacaattgcagtttctggaattggtttcttaacgtagtctaacttaactgagaaagctactttctgcccagctgatctatcaagcaaaatttccttttgaaaattagtagtgttataatttacaacaccactgtagaagatggtagtatcaatccagctcaattctttgcaatcagtttttttaatacccaactcaggaaagctcttgttcatcaagttgactagactatctactccaccatggaaaatgcaagagaagtaaccgtgtactgtagtcttattctttccttgattatctataatattcctggttatgaagtgagtcatgagtaataaatctttgtcatacttgtaagcaatattttgccatttattaaataacttgacaagcccatgtatctccatattccttttaacactgaatatagtagcccttgatgggacagcaaccagtctaattttccacgctgcaatgattccaaagttttcacctccaccaccacgtatagcccaaaatagatcttcccccatggattttcgatctagaacttttccatcaacattgactaagtgtgcatcaatgatattatcagctgcgaggccataatttcgcattaatgctctatagcctcctccactaaagtgtccacctacgccaacagtagggcaatacccaccaggaaaactaagattctcattaatccaataataaacttctccaagggtagctccggcttcaacccacgcaatttggctacgaatatctattttcaccgaatgcatgtttctcaagtctactataacaaatgggacttgagatgtgtaggacaaaccctcagcatcatggccaccgcttcgagttcgaatttgcaagcccactttcttggagcatagaatagtggcttggatatgggagacatttgaaggagtgacaataacgagtggttttggggttgtatcagaggtaaatctaagattttgtattgtcaaattcaggacagacatatacaattggtcgtgttgagtgtatacgagttttagatttgctggattgttatgaatatattgggagaagcattttaggaaattttcttgaggattagctattgaaattttgatattgaatgagagaaagaaaaatataattttgtaaacaaacctaaaggagaatgttgagtagtacttcattttttttagtcttaatgatttttgaattactatgaattaagaattgtcctttctataactttatatattggagcggggactgagaaattgacttaaataattctataatttggtagtcattaaatagcgacatatggtaaaaaaatccacaaaaattaggcacatttgttaggtgaagcccttaatgaaaataaatctaaattttacattgaatagtttggcatcattatttatggaaagaagttaagctgccaaaattgactattggaaaaaaataaaaaacaaaaaattagatatgaaaagaaaggacacgcaaatatttatctatggatctatttgtctttcaatatcttatagctagtttgtgggatataggtgcctatggcactttccaccttttttttcattaatatatatttttttgggtaaaaattaagaactatgcaagtatacaaaattacttttatagtttattacaatatcattcattatcattcccataaaaactaaatatgaagtaccaatatatattttattttttatttggtaatcaaaattagaatttttgaaaagtaaaataacatatagcaaaattaaatgaagaataataaagaacagtaaactaaattcaaaaatataaatgaaaaattatgagttctaatctcctctgctatctactttattattcaatattgatgatggatattcaaaagcattaattattcggattaaaaaatatacaacttgacctattgtaaattctctatatctctctgagaaatttaaataataggaagcaatgaactcaactcaaaatcgcatagaccaatttcatgctctgattctaaattaaaatctatgtcatttttttatcatattaaaatctcacttttgaggttttagtctgaattcataaatagcatgtaagaggtgcgtaattaattatattcacaataaatacaaatttaatagatcttttaaattttgttattttttttatttaaattaaattataaaatcagaaaaaggatatgaaattatcattttatttgtaaaataacatgaaatttaaaagatagttagcattttttttaaatgatatttaagttagttgaaacctaatttttcaaatttgtaggtttaattttaaatattaatttattttatttaaatttatttaaaaaaaccgaaaatattttttatttgttcattattttcgatttttttaaattaattaattaatttaaaattaaataaatcctacatctaactatccaattcaacttgttgcaggagtatgtgttttagcttttgtgtaagttttataaaacctgttattgcttgatctacattggcatggttaacttgttgacagatccaatgatctgattttaacccatggttaaattgtcaataggtcaagtaaataattggtaacaggtaaattttacattcttcttgttggaaatattttaccaggatcttagatttactaacaagtatgttgtttaacaccctaaatatgaactttctaaaacgataattaaacacatataaagttaagaaaaccttacattgatggcagcggaataatgtctccttccactcagatctctaaccattgtatcctttctgtcgcggagtattatcaagatctgagcccgaatgtccttccctttttgtgtggtccttcacagtcttccaatctatgattgaggtaccacttgctgtgtgtgggcactactctatcactaaagttttgatattgagaagaggaaaagagagagggatagggtcggctatagagagaaaagtggaaggctcaatttttctgaaaaaaaaaatctctgattttctgaccaaaaggcatataaaacctattatttgactaagccaccactttctatttataggcaactactaggtttaggttagcaattatttggcattaaaataatgaaaatatcaactggcaatatctgcttaagttgccggccacaggtgttattgggcttcacttggattttgcagttttcacaatttttatttctattttctcaaaaacgacaattttgcaattctaaccttttcaatgccaaaactaattatttaataactaaaatagattattaaataatattgccatttaatttaattattaattagacatatagagtctcttaattaataaataaacctagaatctcttttctttacaatttcacccctgcttagtgaaaattcacaaattagacttagtctaactttagaattataattgattaattaaaaatcaattattgagtcttacaagtagtatagtctcaactagaatggggaccatggatctatatgctgaccttccaataagtgaactgaatttactaagtaaatcccaacttattaattcctcgttgaatccactcttagaacttagaattccacaatatcaatatgctatctcatttaaccattgttataatcttattgtgatttaaagatcctctatatagatgatctacatcaagatgggatttctttaccgttctcacccctcaatgtattttgccccttaaaacacttagctacctgtaaatggtgtttagtgatctaataattagtcagttaaacaagagctcatccatttacttctatttgctaagttcgaagggaatcatcacttgacttctatacaccagtagaagctatagattccatatttatgtttagcactcccactcaatcatactatcatcttcccaaaatatacgtatcaccctgacctaaaagtaggttt

SEQ ID NO: 407643 - protein, 453 aa, Unknown
  Description of Unknown: Contiq #20041 of the LAC Indica assembly polypeptide sequence
FIVIQKSLRLKKMKYYSTFSFRFVYKIIFFFLSFNIKISIANPQENFLKCFSQYIHNNPANLKLVYTQHDQLYMSVLNLTIQNLRFTSDTTPKPLVIVTPSNVSHIQATILCSKKVGLQIRTRSGGHDAEGLSYTSQVPFVIVDLRNMHSVKIDIRSQIAWVEAGATLGEVYYWINENLSFPGGYCPTVGVGGHFSGGGYRALMRNYGLAADNIIDAHLVNVDGKVLDRKSMGEDLFWAIRGGGGENFGIIAAWKIRLVAVPSRATIFSVKRNMEIHGLVKLFNKWQNIAYKYDKDLLLMTHFITRNIIDNQGKNKTTVHGYFSCIFHGGVDSLVNLMNKSFPELGIKKTDCKELSWIDTTIFYSGVVNYNTTNFQKEILLDRSAGQKVAFSVKLDYVKKPIPETAIVKILEKLYEEDVGVGVYVLYPYGGIMDKISESTIPFPHRAGIMYEV

SEQ ID NO: 407644 - DNA, 3757 bp, Unknown
  Description of Unknown: Contiq #34396 of the LAC Indica assembly polynucleotide sequence
tgcatgtttatatatttaggacctgaatttattatagtgtgtttctataatacttcctttaaaagggatgcattatgcattgatacaccatctacttattttagcatcgaggataatttttttaatttttttttatatattcgtgtatgttatagttatttaatatattttataaaattttaaaaaaattaaaataatttacaatatagaaaacagtgttcaaccaatctatttcacacgcgtacaaaataaaataatcatgcgtgcaacataatgagtgaaccctgttttcagcgtattaaattttttttgaattttttaaaatattgcaggatatcttaaataattataatgtacataaccataaaaaaataaatttaactaaaatattacttcaaatatcaaaatagataagatacatgcatcccttttaaaaaggtgaattgtagaatttttcattattatattatatcagtacaaatatttagaggcgtcgcgacagaagtggtgggatgctttgttcgtttctaaagaaattacttggatcgaccttggttttcacattaactaacctcttaaagttcataccgaaatactttttaccccaaacacttgcttgtgagtaactaataggacccttctcgttatttgttcccaaatcaaggtccctataattgagatatgtagctcttggattttgagacacataaggagacatgaaattatatgcacttcggacccaattcatatgcttttcactttctccttctttctcccatgcagacaagtacaaaattttgtacataaatccagctcgatgagggaatggaattgctgattctgaaatctcatccattttaccaccataagggtacatcataagaaaccccacacctacatcttcttcatataacttctccaaaagttttaccatcacaacttctggaactggcttctttacatagtctaatttcaccttgaaaaatacattttgttgaaatgttgtattaagtaaagattctggtgtatccccacttgaaaaaccatcaaagtaaacgacagtttcaatccagctcttttcgaggcaatcttttctttcaattcccaactcaggaaatttcttttgcatcaatatgaggagactctcaaccctaccaagaaatatagaagagaatgaagcttgtatagttgtcttgtatttcccttgtgaatcggtagaattaatagtcatgaagctaacaaagagtaacaaatctttgtcaaacttgtaagcagtattttgccatttgttatatatcttcacagtctcattcatctccaagtttttactaacagagaacatagtaactttagatggaactgcaaccaatctgattttccaagcgagaatgattccaaagcttgctccaccaccaccacgtatggcccaaaacaaatcttctcccatagattttcggtcaaggaattctccatctgcgttgactaagtgagcatcaatgatattatcagctgcaaggccatattttcgcaacagtgctccatagcctcctccactgaaatgcccacctaccccaacagtacgacagtacccagcaggaaaactcagattcccatttttctcagcaatcctataataaagttcaccaatggtagctccagcttcaacccatgcagttttggtatctacgtctacagtgattgaacgtagatttctcatatctaatatcacaaatgggactttagacacataggaggcaccctcaaagtcatggccaccgcttcgagttcgaatctgcaagccatatttcttggagcataaaacacaggcttggacatgggatgtatttgaaggtgtgatgataactagtggttttggtgttgatggagaagcgaatctaaggttttgtatagttgaatttaggacagagatatatgatggatcatttggagtgtgtatgacttttacaattgatttattgttattgttgttgatatgtttggagaagcattgaagaaagttgtcatgtggattagctcgagaagtttggatagagaatgagagaagtgaaactaatattttgcaaagaaaccaaaaagagaatgttgagtacttcattttttttgcaattaacatgagtttagacctttcttatatatagcattatatgtggaaaaggtaaacaaaactaaatttaaaataaatgggtgaggaaggaacctatatatttcattgattttcacacttcattataataatcttgttactttgactaattttaacattatagtttttcatgtataaaataatagtcatgatgatgccaacgttatcttctaaataaaatttacatataatattgactattgttaattaattttatatttgaatggatacgtacttgtttgattttagaattattatgaatatcttcttgtgtgtgatttttttttttttcagaaaatgaaaattggcctcatgaaaatcgcaaaaataagactaggggaactcgagggggataaaagagagttaatatcattgatggaggaggtcgatgagggtctcaatataaatatctcatggactttcttattctattgaaaccaaagtttgttatcatacaatacttttagtgtgcacctcagaaaaatgtgtattgatgcactttttattattttggcataaaaaaattgtttaatttttttataatagtgtacgttgtagttatttaaaatatcatataaaatattaaaaattcaaaaattcataatcataaatgttgtagttgataaatttataaaaaaatttcaaaattttgaaaaatattttaaataattacaacctattttactataagaaaaaaaaaacatatacatttacaaaagttttttacatttttttagggtgtccatcaaagttagtctcaaatcgtagatctcaactctctccatcaaaattatcttctattatagccaacttattctaattttcctacctttgaattgttacttttctcccactccatcctcattcctcccctaaacaccatgagatcaccaatgaaattccattttttataattacaaatttattatttaattaatcaattaattaaacagtgtacaataaagtcagtacagaaatagataatttgtaactatagaacacgattttgtcactacaagaaatggaaccttttatctcattttttatgcttagaaaaataaaaagtgggataaaaagtaagctgaaaatttttaccccacttttgtataagacacaagggccatgtttggtttaacactatcaaaaggaaaatattaaactaagaaaaaggttaaatattatttttttattgactagccaaacacactcctagtgggtcttctactacactttggagcaagggccttgtttgggtacgaaaaaattaagttttcactctttgatattttgctgaaaccaaacgaggtaaaagggaaccctttccgggataaaagggtttccctagtccttttataaatacttttaggtttagggttatctctctcatccaagttctctctcttttgtcgccctctctctttgtttctcccaattctttttgcatttccggattctaggccgcgatctcagccacgcacgaagggccttcttcttcctctccacttctatctttacccatcactatcggagaaaactcttgctgaaaaaggcctgaagctctctctccattgcttctctctctctctctctctc

SEQ ID NO: 407645 - protein, 549 aa, Unknown
  Description of Unknown: Contiq #34396 of the LAC Indica assembly polypeptide sequence
MLIAKKMKYSTFSFWFLCKILVSLLSFSIQTSRANPHDNFLQCFSKHINNNNNKSIVKVIHTPNDPSYISVLNSTIQNLRFASPSTPKPLVIITPSNTSHVQACVLCSKKYGLQIRTRSGGHDFEGASYVSKVPFVILDMRNLRSITVDVDTKTAWVEAGATIGELYYRIAEKNGNLSFPAGYCRTVGVGGHFSGGGYGALLRKYGLAADNIIDAHLVNADGEFLDRKSMGEDLFWAIRGGGGASFGIILAWKIRLVAVPSKVTMFSVSKNLEMNETVKIYNKWQNTAYKFDKDLLLFVSFMTINSTDSQGKYKTTIQASFSSIFLGRVESLLILMQKKFPELGIERKDCLEKSWIETVVYFDGFSSGDTPESLLNTTFQQNVFFKVKLDYVKKPVPEVVMVKLLEKLYEEDVGVGFLMMYPYGGKMDEISESAIPFPHRAGFMYKILYLSAWEKEGESEKHMNWVRSAYNFMSPYVSQNPRATYLNYRDLDLGTNNEKGPISYSQASVWGKKYFGMNFKRLVNVKTKVDPSNFFRNEQSIPPLLSRRL

SEQ ID NO: 407646 - DNA, 3928 bp, Unknown
  Description of Unknown: Contiq #32071 of the LAC Indica assembly polynucleotide sequence
attgagattgttaaatttaggacttttgtctaatttcattcaattttactatttcagtgattgtttatgtactaaacaatgctccctagactttgatatctaccaaatcatgctccttaaactttgatatgtactaaatcatgccctttgaactttcatccatgttagaatttttttactaaaattagacaaaagtccttaaatctaacaatctcaatagttcagggggaattttatttaacggccaaaaaaatttaggggcatgatttggtacatgtcaaaattcgggggattactaattagccaaataaacaaaaaaagaaagaatttacgaaatttagttagaaatattttttattaattgaaatttaataaaaaaaatataatatttaaaactaagattgttatgttatataccctcaaatcaatatatatatattgttgaatctgaattagaatattagtggacttttggaatttaataatatggtaattaataaaaaattgtaactaaattattataaaaataagtacaattggctgttcaaacaaatcgtcctaatttaatatgaaataaatagacttaatattatacacactattgttttagagtgaggaatctatacgtaagttggttatttctcccttaatgctggttgtaatcaatattacgaaacttcatttctaatgacacatataaatgtagtaaaactgcagctattagataaggtagggtcaattattatctctaataaaataactataaataaatagactaatttgtatgtaagaccatttgatactgaaagcaaacatttttattttttataaatcatgacgaagaaacacaaattaatttattgtatagatacatgaagaaacaaaccgtacgtataaatattacaatacaatacaacattaattaatagtaaattataacatatatatatatatatatatatgcatttagagaaatcgtggagataaaggtggaatgctctgttcgttcctaaagaaattagtcgggtcaaccttggttttcacttgaactaatttcttaaaatttttattgaagtactttttcccccaaatgcttgcttgttcataacttataggacctttttcattatttgttcccaaatctaggtctctataattaatatatgaagctcttggattttcggacacgtatggagtcatgtaattataaacacttcgaacccaattcatatgcctttcactttcttcttctttttcccactgagaccaatataaaattttgtacataactccagctctatgtgggaatggaattgcagattcaggaatctcgctcattttaccaccataagggtacatttgaatatatgccaatcctacatcttcttcatataacttttccaaaagtttgaccataacaatttctgaaattggcttcctaacgtagtccagtttccccttgaaataaccctttactacatttgttggatcgagcaaaacctccaatttatcctcacttgagaattcattgaagaaaaagatcatttcaatccaactcgtttcaaaacaatcttttcttactacacccaactcaggaaagttagtttgcatcaaggaaagaaaattatccactctaccaagaaaaatagaaaagaatgtagcttgtattgttgtcatattcttcccatgctcatcagtagaattcacagttaagaacctaactaccatcaacaaatcttggtcaaacttgtgagcaatattttgccacttattataaattttcacagtttcatttatcggcaagttcttactaactgataatacagtaaccttagatggcacaggaaccaatctaattttccaagcaagaacaattccaaagcttgctccaccaccaccacgaatggcccaaaacaaatcttctcccatagattttcggtcaacgaattctccatcagcgttgactaagtgagcatcaatgacattatcagctgcaaggccatattttcgcatcaatgctccatagcctcctccactgaaatgcccaccaaccccaacactatggcaatagccaccaggaaaactaagattctcatttttctcagcaatcctataataaagttctccaagggtagctccagattcaacccatgcagttttgttatctacgtctacagtgattgaacgtagatttctcatatctaatatcacaaatgggactttagacacataggagacaccctcaaagtcatggccgccgcttcgagttcgaatctgtaagccatatttcttggaacataaaacacaggcttggacatgggatgtatttgaaggtgtgatgataactagtggttttggtgttgttgaagtgaatctaaggttctgtatggttgaatttagaagggagatatatgaaaagtcatttggagtgtgtatgagtttggcaagtgatgtattgttgttggagatatgtttggagaagcattgaagaaagttgttgtgaggattagcttgagaagtttggatagagaatgaaagaagataaactaataatattttgcaaagaaaccaagatactgatgagtacttcattttcttaagccttatatgttttgcattagcatgaattgagatctttcttatatacaacttcatgcaaggaaaagtacacaaatcattttttcttatatatataaaaaattaaaaatcaggaagcagcttacacctttcattcgtgaatgatttctcttatttattttatttttaaaacaatatgggttcctttagtatgccgtattacaccgtattgtattgtataagattatattgaattgtatttcatgtaatatttttatgtaaaactatacgtggtattgatttttatgggcacttaaatatataatattttagtataaattaaaatttaacattgtattatataaaaatatatatataatctaatttaatgtaatacaatacaatataacttaatacaacgtaccacacgagctctaaataaattatatgatacaactttgttgaatttcaaactttataataataatctttattctttgactaattttaaaaattgaatttttcacaaatattaccttgcatcaatttttctcttcatattttaatcactaccgccgttgcccaatttgatctcatcaaactcacgaaaagaaaatgaatattatgacttcacagtggttcggaaaaaaaatcatctgtcccaattattctatcacaatcttactccttattagataacaatcttcttcgagacagtataattaaattttctaaaatatatttttcgagtcagtaataaacttcaattgaacaaaagttctattttttatttccatatccaataataactacacaattatatataaatttcacaccctttacaaattactaataagcctcatagtattttcatagtctaatacacaatgtgcaaattttgggttaaatttaatccaaaatataccataaaattatattttgttattttttgtagttgtgcttcaatgaagaagatgcaaattagctataataaaagttaatattactattaattgctgcttgtttggtattatatatggtagttcgtgagatgattttaatcaattttattttgatattgatttcggttaattaattattttgtgtattttattaggactgaacatcgagcgggtttaccgagtttcacattggcgggtttcgggttcacgggttttaggttcaaaaaattgaaaccaaacccggacccgaatagtgcacgggttggcgggttggcaggtcacgggttggcgggtttcggttggtcgggtttagcgggttggcgggttgacccggtcaactcagtgaactcggtcagctctttaaaaaaattaattttttattcaaataa

SEQ ID NO: 407647 - protein, 577 aa, Unknown
  Description of Unknown: Contiq #32071 of the LAC Indica assembly polypeptide sequence
FFIYIRKNDLCTFPCMKLYIRKISIHANAKHIRLKKMKYSSVSWFLCKILLVYLLSFSIQTSQANPHNNFLQCFSKHISNNNTSLAKLIHTPNDFSYISLLNSTIQNLRFTSTTPKPLVIITPSNTSHVQACVLCSKKYGLQIRTRSGGHDFEGVSYVSKVPFVILDMRNLRSITVDVDNKTAWVESGATLGELYYRIAEKNENLSFPGGYCHSVGVGGHFSGGGYGALMRKYGLAADNVIDAHLVNADGEFVDRKSMGEDLFWAIRGGGGASFGIVLAWKIRLVPVPSKVTVLSVSKNLPINETVKIYNKWQNIAHKFDQDLLMVVRFLTVNSTDEHGKNMTTIQATFFSIFLGRVDNFLSLMQTNFPELGVVRKDCFETSWIEMIFFFNEFSSEDKLEVLLDPTNVVKGYFKGKLDYVRKPISEIVMVKLLEKLYEEDVGLAYIQMYPYGGKMSEIPESAIPFPHRAGVMYKILYWSQWEKEEESERHMNWVRSVYNYMTPYVSENPRASYINYRDLDLGTNNEKGPISYEQASIWGKKYFNKNFKKLVQVKTKVDPTNFFRNEQSIPPLSPRFL

SEQ ID NO: 407648 - DNA, 5089 bp, Unknown
  Description of Unknown: Contiq #20817 of the LAC Indica assembly polynucleotide sequence
gttgtttttgttgtatatttatgaaaaaagcccaatttttttgaggtgtatggttcttttatgtttttctaagtgcttatatctgcttattggtttacatttatttttgtgttgttgtagtaattttttttgttctgattttttaagattgggcttgcaaatgtaactgttattgcattgcgtattgaggtagtgtagaacattttttttagttttttttaatcatgttttcctctcttttgtttgatttgttttagtgttattttacagttgttttgccatgattagttatttgacgtcaatttcactttttttttctcaatctcaccggaatttatggttgttttccaattgttctaatgttcctgtggtggttctatccgtgagtgtagaagatggaggcctcatttttttttggcgtttacagtataaaagaaaaaaaattggccaagacagtataaaaataatttctgccgcgtgacagtatttttgtaaaaattaagcctaaaatcagtatttttgtaagtttcccaaaaacttattagtaaatagattttatttaggcctaatagaactaggggtgttcaatgtcacatccaatgtttttaggtctatgcagatccgatccaatcatatattggatgttagattttaccatccgatccgatccaattaatttccatcatccaattgatctaacgtccattggatgttggattggatcggttctatccattggatgtatttcatatatatttatttgtttaattttgatttatctaatattttaggcctagaattttttggatcagatcggatccatcaaatattttaggtcccatatgtattggattggactggatccatccaatccaagaaaaaatagtaaaattttaatgttaattttcatatatacatataaatttgacctataacaatataaaatttaatactcatccaaactaaataaaaatactaattagtttaattggatgttagatatattggatttttagacaccccatccaccatccgatctgatccaattggatatttaaaaataacatccaatccgatccgatcacaattggatatccaatgtttgacggtcagttataattggatcgatcagttctcattgaattgatcgatttatacacaccctaaataaaacattaagtgaggttgttaattaagataaatctagtgcacaaatacaattaagattttatttatatgtgaaaaagttaagatataatttctatttttatcaaaagataataaaattacataaaattgagtttcatttcaagcataaaatcccaacacatgttttacataaaattccttacaataactacatacatatatgaatgaaatagtccacgtgaacatgattttatacacaataaatatataattatacataaacaaagatgaaaaaaaatagtttggtaaagatcaatggtacttatccattattcttattgacttggcagtggcagtggaagaggtggaatgctctgttcattcctgaagaaattttggggatcaactttagtcttcacatgaactaacctcttgaaattgtctttcccaaaatactttctaccccaaatacttgcttgtgtgtaactcgtgggtcccttgtcgttatttttacccaagtcaagatctctatagtttacatatgcacttcttgggcttttggacacataaggagtcatgtagttataaacacttctaggccaattgatactcccatcatcatctcctggtttttgaacccattgagcatagtagagaattttgtagaggtttccggctctatgggagaatggaatctctgattcagaaatctcattcattttcccaccataaggaaacaactgaaagaatcccactccaacatcttcttcatataacttttcaagcattgttttcaatacattctctggtatagttttcttcacgtagtcaagtttacctttgaatgaaaataaccattgttgagttctattaagcaagttttccatctcagctccaatagggaatccagcaaaataagaaacagactcaatccaactcatttcattgcaatcttctcttttcaaaccaaactcaggaaaactcttttccattaatgaaagaagattatccactccaccaagaaacaatgacaagaattgggcttggagtataaccttattattttgagtagaattcacagtcgagaacctaattaagataaccaaatcatcatccaacttgtcagcaatgtattgccacttgttcacaagcttcatggtctcattttggcccaaatccctattaacaatgaatgttgtcactgttgatgggacaggaaccaatctgattttccaagcgagaacgattccaaagcttgctgctccaccaccacgtatggcccaaaacaaatcctcccccattgattctcgatcaagaattttcccatcaacattaacaatgtaagcatcaatgatattatcagctgctaggccatattttcgcaccaaaggtccatagccacctccactaaagtgtccaccaacgcctaccgtagggcaaaatccagcaggaaagccgagatttcgacttttctcggcaatcctataataaacttcaccaatggtagctccggcttcaacccaagctgttttttcatccacgtttacgttgatagaacttaggtttctcaagtctattataacgaatgggacttcagaaacgtaagagagaccttcgaaatcatggccaccgcttcgtgttcggatctctaacccatgtatctttgagcagtagacagaggcttggacatgggaggcgtttgaaggtgtaacgataacgagtggttttggagttgaaggaaaggaaaattttaggttttgtatgttggagttcattacagacataaacgacgagtcgtttcgagtgtatgtgagttcagccaaaatggttgtgtttgagatattgtgggacagacattgaaggaagtcctcatgtggttgagaagcatgagtaacgataatgcaaaaagataacaatgaaaagaaagctaagtagtacttcatttttcttggtaaagtttttgcctttttggtatgtacaatatcatataagtctgccatatttatataaagttattatatgcttgcattgacagagtagtattgtatgaatatatttaatatatatatctatgaaatttcaacgcgtataaagttcagattaccattatttgatctagttaaatgcttactcggatgatgatactaccagttcaacaattataaattaatactaacaagtgtgtaatttgtttttttaaaaaggatttatctgtatatcttttgaatttctcatattatcatcttattttaataatataagctttacgtaggtactttattcttatgtaaaaagggtacgcaaaattgaagcggacaaagccgacaagaaaatattgacttttttttttgaaatcaagaaaatattgactatatatatacatataaatgaacacacattattgtgtgtatatataacatatagtagtcaaataaaaatttagtaatattattcgttaaactcaattatggtggattggtagaagagttatatatacatattatatatatttttcgagaaatatatattatatattaaaactagacggtttgaacacattaagatcacgcttctataatatattaaaatttgttaaaaaaatagctggatttattttttagatatctcttctgttcacaaagtgatattaattcaacaactaatgattataaaacatttatttagaaagacacgtaatcgaaacatcaacgaagctgaaattcttttaaattgttcaattatgcaaatatatgtttacatatattaatatacttgtcctatatatattattatgtatataaatatatttaaatacatctgatcaaacattgttataaatactagaaatttggaactgggtcagccgtatttttattattttttaattgaacaagctacgtacaagttacatgctttttataaaattatattttttattctattttaaacgaaaattcaatatcaatgaattattctagttgaactcttttttttttgaggaaaaaaactgctattataaatcaaaccagagagtcatttacaataacagaatttataggcggaggaatacaatccgaccaaaaacaatcttcatctacccctagtgcaaatttagccaagccatcagcagccatattagctgtgcgcttgacatgagttacatttacattagggaaaaaagaaagaagactagaaacatccatgataatatcattaaaaactgaggaagctactgttggggagcaaattgcatttctcactcgaagtgcatctgtctctataagcagatgaggaaattgaaagtttagagcataatgcacaccatggaacatagcaagagcttccatttcatgaggttcaaagctgcctagcaatttcttggagaaagcggctatgaccataccagagttgtcccgtagaagagcgcccaaaccagtagcattgttgttgcggtccactgcagcatctatattcagcttgtaagcacctgtgggaggtggtttccatgggacgttgttacgattcgaagcagagggagtggcattctgcattggtgctgctgcacgagcttgacaaggttgctgatatttggatatagctgatctgtaattcagcaggtagtttccagcaaaggaagacaactccatggcctttttggctttgtgtccatgtataactctgtttcgttcagaccagatagcccacaaaatacatacaatttgttccatttcagccttagagtgaatacttgtaaggtgaaccaagtaatcccctttatgcattgaagaggctttataccaatcaaagttgaaaccagaaattctccacacagctttggcatacttacaaccaaaaagagcatgtcccacagtctcccacgcttgtttacataatgagcaagtggaatccgtaataactttccgtttgacaaggccagtgg

SEQ ID NO: 407649 - protein, 558 aa, Unknown
  Description of Unknown: Contiq #20817 of the LAC Indica assembly polypeptide sequence
LYINMADLYDIVHTKKAKTLPRKMKYYLAFFSLLSFCIIVTHASQPHEDFLQCLSHNISNTTILAELTYTRNDSSFMSVMNSNIQNLKFSFPSTPKPLVIVTPSNASHVQASVYCSKIHGLEIRTRSGGHDFEGLSYVSEVPFVIIDLRNLSSINVNVDEKTAWVEAGATIGEVYYRIAEKSRNLGFPAGFCPTVGVGGHFSGGGYGPLVRKYGLAADNIIDAYIVNVDGKILDRESMGEDLFWAIRGGGAASFGIVLAWKIRLVPVPSTVTTFIVNRDLGQNETMKLVNKWQYIADKLDDDLVILIRFSTVNSTQNNKVILQAQFLSLFLGGVDNLLSLMEKSFPEFGLKREDCNEMSWIESVSYFAGFPIGAEMENLLNRTQQWLFSFKGKLDYVKKTIPENVLKTMLEKLYEEDVGVGFFQLFPYGGKMNEISESEIPFSHRAGNLYKILYYAQWVQKPGDDDGSINWPRSVYNYMTPYVSKSPRSAYVNYRDLDLGKNNDKGPTSYTQASIWGRKYFGKDNFKRLVHVKTKVDPQNFFRNEQSIPPLPLPLPSQ

SEQ ID NO: 407650 - DNA, 256 bp, Unknown
  Description of Unknown: Putative miniature P element inverted repeat family (mPIF) transposon polynucleotide sequence 5' to the gene in the Sativa sequence
acaatattcttttactataaaacttcaattatcattttaagaacacgtaccaaaaattttaataataaatatattataatgttctaatccattgaacatgtaaactaaaattgttccataaacatataagctcaaataatattattttatttgctattgaaataagaaagacaatttattttattacatatatcttatgatagtctacacagttgtaatgtagattttcatacttgggagcatacatagtatgggt

SEQ ID NO: 407651 - DNA, 1635 bp, Unknown
  Description of Unknown: Tetrahydrocannabinolic acid synthase polynucleotide of Cannabis Sativa
atgaattgctcagcattttccttttggtttgtttgcaaaataatatttttctttctctcattcaatatccaaatttcattagctaatcctcaagaaaacttccttaaatgcttctcggaatatattcctaacaatccagcaaatccaaaattcatatacactcaacacgaccaattgtatatgtctgtcctgaattcgacaatacaaaatcttagattcacctctgatacaaccccaaaaccactcgttattgtcactccttcaaatgtctcccatatccaggccagtattctctgctccaagaaagttggtttgcagattcgaactcgaagcggtggccatgatgctgagggtttgtcctacatatctcaagtcccatttgctatagtagacttgagaaacatgcatacggtcaaagtagatattcatagccaaactgcgtgggttgaagccggagctacccttggagaagtttattattggatcaatgagatgaatgagaattttagttttcctggtgggtattgccctactgttggcgtaggtggacactttagtggaggaggctatggagcattgatgcgaaattatggccttgcggctgataatatcattgatgcacacttagtcaatgttgatggaaaagttctagatcgaaaatccatgggagaagatctattttgggctatacgtggtggaggaggagaaaactttggaatcattgcagcatggaaaatcaaacttgttgttgtcccatcaaaggctactatattcagtgttaaaaagaacatggagatacatgggcttgtcaagttatttaacaaatggcaaaatattgcttacaagtatgacaaagatttaatgctcacgactcacttcagaactaggaatattacagataatcatgggaagaataagactacagtacatggttacttctcttccatttttcttggtggagtggatagtctagttgacttgatgaacaagagctttcctgagttgggtattaaaaaaactgattgcaaagaattgagctggattgatacaaccatcttctacagtggtgttgtaaattacaacactgctaattttaaaaaggaaattttgcttgatagatcagctgggaagaagacggctttctcaattaagttagactatgttaagaaactaatacctgaaactgcaatggtcaaaattttggaaaaattatatgaagaagaggtaggagttgggatgtatgtgttgtacccttacggtggtataatggatgagatttcagaatcagcaattccattccctcatcgagctggaataatgtatgaactttggtacactgctacctgggagaagcaagaagataacgaaaagcatataaactgggttcgaagtgtttataatttcacaacgccttatgtgtcccaaaatccaagattggcgtatctcaattatagggaccttgatttaggaaaaactaatcctgagagtcctaataattacacacaagcacgtatttggggtgaaaagtattttggtaaaaattttaacaggttagttaaggtgaaaaccaaagctgatcccaataatttttttagaaacgaacaaagtatcccacctcttccaccgcatcatcat

SEQ ID NO: 407652 - DNA, 1158 bp, Unknown
  Description of Unknown: Olivetol synthase polynucleotide sequence
atgaatcatcttcgtgctgagggtccggcctccgttctcgccattggcaccgccaatccggagaacattttattacaagatgagtttcctgactactattttcgcgtcaccaaaagtgaacacatgactcaactcaaagaaaagtttcgaaaaatatgtgacaaaagtatgataaggaaacgtaactgtttcttaaatgaagaacacctaaagcaaaacccaagattggtggagcacgagatgcaaactctggatgcacgtcaagacatgttggtagttgaggttccaaaacttgggaaggatgcttgtgcaaaggccatcaaagaatggggtcaacccaagtctaaaatcactcatttaatcttcactagcgcatcaaccactgacatgcccggtgcagactaccattgcgctaagcttctcggactgagtccctcagtgaagcgtgtgatgatgtatcaactaggctgttatggtggtggaaccgttctacgcattgccaaggacatagcagagaataacaaaggcgcacgagttctcgccgtgtgttgtgacataatggcttgcttgtttcgtgggccttcagagtctgacctcgaattactagtgggacaagctatctttggtgatggggctgctgcggtgattgttggagctgaacccgatgagtcagttggggaaaggccgatatttgagttggtgtcaactgggcaaacaatcttaccaaactcggaaggaactattgggggacatataagggaagcaggactgatatttgatttacataaggatgtgcctatgttgatctctaataatattgagaaatgtttgattgaggcatttactcctattgggattagtgattggaactccatattttggattacacacccaggtgggaaagctattttggacaaagtggaggagaagttgcatctaaagagtgataagtttgtggattcacgtcatgtgctgagtgagcatgggaatatgtctagctcaactgtcttgtttgttatggatgagttgaggaagaggtcgttggaggaagggaagtctaccactggagatggatttgagtggggtgttctttttgggtttggaccaggtttgactgtcgaaagagtggtcgtgcgtagtgttcccatcaaatattaa

SEQ ID NO: 407653 - DNA, 1869 bp, Unknown
  Description of Unknown: Limonene synthase polynucleotide sequence
atgcagtgcatagcttttcaccaatttgcttcatcatcatccctccctatttggagtagtattgataatcgttttacaccaaaaacttctattacttctatttcaaaaccaaaaccaaaactaaaatcaaaatcaaacttgaaatcgagatcgagatcaagtacttgctactccatacaatgtactgtggtcgataaccctagttctacgattactaataatagtgatcgaagatcagccaactatggacctcccatttggtcttttgattttgttcaatctcttccaatccaatataagggtgaatcttatacaagtcgattaaataagttggagaaagatgtgaaaaggatgctaattggagtggaaaactctttagcccaacttgaactaattgatacaatacaaagacttggaatatcttatcgttttgaaaatgaaatcatttctattttgaaagaaaaattcaccaataataatgacaaccctaatcctaattatgatttatatgctactgctctccaatttaggcttctacgccaatatggatttgaagtacctcaagaaattttcaataattttaaaaatcacaagacaggagagttcaaggcaaatataagtaatgatattatgggagcattgggcttatatgaagcttcattccatgggaaaaagggtgaaagtattttggaagaagcaagaattttcacaacaaaatgtctcaaaaaatacaaattaatgtcaagtagtaataataataatatgacattaatatcattattagtgaatcatgctttggagatgccacttcaatggagaatcacaagatcagaagctaaatggtttattgaagaaatatatgaaagaaaacaagacatgaatccaactttacttgagtttgccaaattggatttcaatatgctgcaatcaacatatcaagaggagctcaaagtactctctaggtggtggaaggattctaaacttggagagaaattgcctttcgttagagatagattggtggagtgtttcttatggcaagttggagtaagatttgagccacaattcagttactttagaataatggatacaaaactctatgttctattaacaataattgatgatatgcatgacatttatggaacattggaggaactacaacttttcactaatgctcttcaaagatgggatttgaaagaattagataaattaccagattatatgaagacagctttctactttacatacaatttcacaaatgaattggcatttgatgtattacaagaacatggttttgttcacattgaatacttcaagaaactgatggtagagttgtgtaaacatcatttgcaagaggcaaaatggttttatagtggatacaaaccaacattgcaagaatatgttgagaatggatggttgtctgtgggaggacaagttattcttatgcatgcatatttcgcttttacaaatcctgttaccaaagaggcattggaatgtctaaaagacggtcatcctaacatagttcgccatgcatcgataatattacgacttgcagatgatctaggaacattgtcggatgaactgaaaagaggcgatgttcctaaatcaattcaatgttatatgcacgatactggtgcttctgaagatgaagctcgtgagcacataaaatatttaataagtgaatcatggaaggagatgaataatgaagatggaaatattaactcttttttctcaaatgaatttgttcaagtttgccaaaatcttggtagagcgtcacaattcatataccagtatggcgatggacatgcttctcagaataatctatcgaaagagcgcgttttagggttgattattactcctatccccatgtaa

SEQ ID NO: 407654 - DNA, 1848 bp, Unknown
  Description of Unknown: Alpha-pinene synthase polynucleotide sequence
atgcattgcatggctgttcgccatttcgctccatcgtcatcgctctccatattttcgagtactaatattaataatcatttttttggtagagaaatttttacaccaaaaacatctaatattacaacaaaaaaatcaagatcaagacctaattgcaatccaatccaatgtagtttggccaaaagccctagtagtgatactagtacaattgttagaagatcagccaactatgatcctcccatttggtcttttgatttcattcagtctcttccatgcaaatataagggagaaccctatacaagtcgatcgaataagctaaaagaagaagtgaaaaagatgttagttggaatggaaaactctttagtccaacttgagttgattgatacattacaaagacttggaatatcttatcattttgagaatgaaatcatttctattttgaaagaatatttcactaatattagtactaataaaaaccctaaatatgatttatatgccactgctctcgaatttaggcttttacgcgaatatggatatgcaatacctcaagaaatatttaatgattttaaggacgagacgggaaagttcaaagcgagtattaaaaatgatgatattaagggagtattggctttatatgaagcttcattctatgtgaaaaatggtgaaaatattttggaggaagctagggttttcacaacagaatatctcaaaagatatgtaatgatgattgatcaaaacataatattaaatgataatatggcaatattagtgagacatgccttggagatgccacttcattggaggactataagagcagaagctaagtggttcattgaagaatatgagaagacacaagacaagaatggcactttgcttgaatttgcgaaattggatttcaacatgcttcaatcaatatttcaagaagatctaaaacatgtctcgaggtggtgggaacattctgagcttggaaagaataaaatggtttatgctagagatagattggtagaggcttttctatggcaggttggagtaagatttgagccacaattcagccactttaggagaatatctgcaagaatatatgctctaattacaatcatagatgacatatatgatgtgtatggaacattggaagagttagagcttttcaccaaggctgttgagagatgggatgcgaagaccatacacgagttaccagattatatgaagttgcctttctttactttatttaacaccgtaaatgaaatggcgtatgatgtattagaagagcataattttgtcaccgttgaatacctcaagaactcgtgggcagagttatgtaggtgctatttggaagaggcaaaatggttctatagcggatacaaaccaaccttgaaaaaatatattgagaacgcctcgctttcaataggaggacaaattatttttgtatatgcttttttctctcttacaaagtccataacaaacgaggccttagagtccttgcaagagggtcatcacgctgcatgtcgccaaggatccttaatgttacgacttgcagatgatctaggaacattgtcggatgaaatgaaaagaggcgatgttcctaaatcaattcaatgttatatgcacgatactggtgcttctgaagatgaagctcgtgagcacatcaaatttttgataagtgaaatatggaaggagatgaatgatgaagatgaatataactctattttctctaaagagtttgttcaagcttgcaaaaatcttggtaggatgtcattatttatgtatcaacatggagatggacatgcttctcaagatagccattcaaggaaacgtatttcagatttaattattaatcctattcctttataa

SEQ ID NO: 407655 - protein, 437 aa, Unknown
  Description of Unknown: PK23203.1_THCAS_like_3 polypeptide sequence
LQIRTRSGGHDFEGASYVSKVPFVILDMRNLRSITVDVDTKTAWVEAGATIGELYYRIAEKNGNLSFPAGYCRTVGVGGHFSGGGYGALLRKYGLAADNIIDAHLVNADGEFLDRKSMGEDLFWAIRGGGGASFGIILAWKIRLVAVPSKVTMFSVSKNLEMNETVKIYNKWQNTAYKFDKDLLLFVSFMTINSTDSQGKYKTTIQASFSSIFLGRVESLLILMQKKFPELGIERKDCLEKSWIETVVYFDGFSSGDTPESLLNTTFQQNVFFKVKLDYVKKPVPEVVMVKLLEKLYEEDVGVGFLMMYPYGGKMDEISESAIPFPHRAGFMYKILYLSAWEKEGESEKHMNWVRSAYNFMSPYVSQNPRATYLNYRDLDLGTNNEKGPISYSQASVWGKKYFGMNFKRLVNVKTKVDPSNFFRNEQSIPPLLSRRL

SEQ ID NO: 407656 - protein, 437 aa, Unknown
  Description of Unknown: CD_contig27237_ORF_THCAS_like_3 polypeptide sequence
LQIRTRSGGHDFEGASYVSKVPFVILDMRNLRSITVDVDTKTAWVEAGATIGELYYRIAEKNGNLSFPAGYCRTVGVGGHFSGGGYGALLRKYGLAADNIIDAHLVNADGEFVDRKSMGEDLFWAIRGGGGASFGIILAWKIRLVAVPSKVTMFSVSKNLEMNETVKIYNKWQNIAYKFDKDLLLFVSFMTINSTDSQGKYKTTIQASFSSIFLGRVESLLILMQKKFPELGIERKDCLEKSWIETVVYFDGFSSGDTPESLLNTTFQQNVFFKVKLDYVKKPVPEVVMVKLLEKLYEEDVGVGFLMMYPYGGKMDEISESAIPFPHRAGFMYKILYLSAWEKEGESEKHMNWVRSAYNFMSPYVSQNPRATYLNYRDLDLGTNNEKGPISYSQASVWGKKYFGMNFKRLVNVKTKVDPSNFFRNEQSIPPLLSRRL

SEQ ID NO: 407657 - protein, 545 aa, Unknown
  Description of Unknown: THC_Synthase-translation polypeptide sequence
MNCSAFSFWFVCKIIFFFLSFNIQISLANPQENFLKCFSEYIPNNPANPKFIYTQHDQLYMSVLNSTIQNLRFTSDTTPKPLVIVTPSNVSHIQASILCSKKVGLQIRTRSGGHDAEGLSYISQVPFAIVDLRNMHTVKVDIHSQTAWVEAGATLGEVYYWINEMNENFSFPGGYCPTVGVGGHFSGGGYGALMRNYGLAADNIIDAHLVNVDGKVLDRKSMGEDLFWAIRGGGGENFGIIAAWKIKLVVVPSKATIFSVKKNMEIHGLVKLFNKWQNIAYKYDKDLMLTTHFRTRNITDNHGKNKTTVHGYFSSIFLGGVDSLVDLMNKSFPELGIKKTDCKELSWIDTTIFYSGVVNYNTANFKKEILLDRSAGKKTAFSIKLDYVKKLIPETAMVKILEKLYEEEVGVGMYVLYPYGGIMDEISESAIPFPHRAGIMYELWYTATWEKQEDNEKHINWVRSVYNFTTPYVSQNPRLAYLNYRDLDLGKTNPESPNNYTQARIWGEKYFGKNFNRLVKVKTKADPNNFFRNEQSIPPLPPHHH

SEQ ID NO: 407658 - protein, 482 aa, Unknown
  Description of Unknown: Consensus sequence
  MOD_RES (220)..(220): Any amino acid
  MOD_RES (482)..(482): Any amino acid
MFFSNNKITDYSVLNSTIQNLRFSTPKPLVITPSNSHQALCSKKGLQIRTRSGGHDFEGASYVSKVPFVILDMRNLRSITVDVDTKTAWVEAGATIGELYYRIAEKNGNLSFPAGYCRTVGVGGHFSGGGYGALLRKYGLAADNIIDAHLVNADGEFLDRKSMGEDLFWAIRGGGGASFGIILAWKIRLVAVPSKVTMFSVSKNLEMNETVKIYNKWQNXAYKFDKDLLLFVSFMTINSTDSQGKYKTTIQASFSSIFLGRVESLLILMQKKFPELGIERKDCLEKSWIETVVYFDGFSSGDTPESLLNTTFQQNVFFKVKLDYVKKPVPEVVMVKLLEKLEEDVGVGFLMMYPYGGKMDEISESAIPFPHRAGFMYKILYLSAWEKEGESEKHMNWVRSAYNFMSPYVSQNPRATYLNYRDLDLGTNNEKGPISYSQASVWGKKYFGMNFKRLVNVKTKVDPSNFFRNEQSIPPLLSRRLX

SEQ ID NO: 407659 - protein, 441 aa, Unknown
  Description of Unknown: LA_contig20041_ORF_THCAS_like_1 polypeptide sequence
MKYYSTFSFRFVYKIIFFFLSFNIKISIANPQENFLKCFSQYIHNNPANLKLVYTQHDQLYMSVLNLTIQNLRFTSDTTPKPLVIVTPSNVSHIQATILCSKKVGLQIRTRSGGHDAEGLSYTSQVPFVIVDLRNMHSVKIDIRSQIAWVEAGATLGEVYYWINENLSFPGGYCPTVGVGGHFSGGGYRALMRNYGLAADNIIDAHLVNVDGKVLDRKSMGEDLFWAIRGGGGENFGIIAAWKIRLVAVPSRATIFSVKRNMEIHGLVKLFNKWQNIAYKYDKDLLLMTHFITRNIIDNQGKNKTTVHGYFSCIFHGGVDSLVNLMNKSFPELGIKKTDCKELSWIDTTIFYSGVVNYNTTNFQKEILLDRSAGQKVAFSVKLDYVKKPIPETAIVKILEKLYEEDVGVGVYVLYPYGGIMDKISESTIPFPHRAGIMYEV

SEQ ID NO: 407660 - protein, 391 aa, Unknown
  Description of Unknown: PK20093.1_THCAS_like_1 polypeptide sequence
KLVYTQHDQLYMSVLNLTIQNLRFTSDTTPKPLVIVTPSNVSHIQATILCSKKVGLQIRTRSGGHDAEGLSYTSQVPFVIVDLRNMHSVKIDIRSQIAWVEAGATLGEVYYWINENLSFPGGYCPTVGVGGHFSGGGYRALMRNYGLAADNIIDAHLVNVDGKVLDRKSMGEDLFWAIRGGGGENFGIIAAWKIRLVAVPSRATIFSVKRNMEIHGLVKLFNKWQNIAYKYDKDLLLMTHFITRNIIDNQGKNKTTVHGYFSCIFHGGVDSLVNLMNKSFPELGIKKTDCKELSWIDTTIFYSGVVNYNTTNFQKEILLDRSAGQKVAFSVKLDYVKKPIPETAIVKILEKLYEEDVGVGVYVLYPYGGIMDKISESTIPFPHRAGIMYEV

SEQ ID NO: 407661 - protein, 545 aa, Unknown; identical to SEQ ID NO: 407657
  Description of Unknown: THC_synthase_translation polypeptide sequence

SEQ ID NO: 407662 - protein, 441 aa, Unknown
  Description of Unknown: Consensus polypeptide sequence
  MOD_RES (2)..(3): Any amino acid
  MOD_RES (5)..(5): Any amino acid
  MOD_RES (9)..(9): Any amino acid
  MOD_RES (12)..(12): Any amino acid
  MOD_RES (24)..(24): Any amino acid
  MOD_RES (27)..(27): Any amino acid
  MOD_RES (40)..(40): Any amino acid
  MOD_RES (43)..(43): Any amino acid
  MOD_RES (49)..(49): Any amino acid
  MOD_RES (441)..(441): Any amino acid
MXXSXFSFXFVXKIIFFFLSFNIXISXANPQENFLKCFSXYIXNNPANXKLVYTQHDQLYMSVLNLTIQNLRFTSDTTPKPLVIVTPSNVSHIQATILCSKKVGLQIRTRSGGHDAEGLSYTSQVPFVIVDLRNMHSVKIDIRSQIAWVEAGATLGEVYYWINENLSFPGGYCPTVGVGGHFSGGGYRALMRNYGLAADNIIDAHLVNVDGKVLDRKSMGEDLFWAIRGGGGENFGIIAAWKIRLVAVPSRATIFSVKRNMEIHGLVKLFNKWQNIAYKYDKDLLLMTHFITRNIIDNQGKNKTTVHGYFSCIFHGGVDSLVNLMNKSFPELGIKKTDCKELSWIDTTIFYSGVVNYNTTNFQKEILLDRSAGQKVAFSVKLDYVKKPIPETAIVKILEKLYEEDVGVGVYVLYPYGGIMDKISESTIPFPHRAGIMYEVX

SEQ ID NO: 407663 - protein, 568 aa, Unknown
  Description of Unknown: LA_contig32071_ORF_THCAS_like_2 polypeptide sequence
LCTFPCMKLYIRKISIHANAKHIRLKKMKYSSVSWFLCKILLVYLLSFSIQTSQANPHNNFLQCFSKHISNNNTSLAKLIHTPNDFSYISLLNSTIQNLRFTSTTPKPLVIITPSNTSHVQACVLCSKKYGLQIRTRSGGHDFEGVSYVSKVPFVILDMRNLRSITVDVDNKTAWVESGATLGELYYRIAEKNENLSFPGGYCHSVGVGGHFSGGGYGALMRKYGLAADNVIDAHLVNADGEFVDRKSMGEDLFWAIRGGGGASFGIVLAWKIRLVPVPSKVTVLSVSKNLPINETVKIYNKWQNIAHKFDQDLLMVVRFLTVNSTDEHGKNMTTIQATFFSIFLGRVDNFLSLMQTNFPELGVVRKDCFETSWIEMIFFFNEFSSEDKLEVLLDPTNVVKGYFKGKLDYVRKPISEIVMVKLLEKLYEEDVGLAYIQMYPYGGKMSEIPESAIPFPHRAGVMYKILYWSQWEKEEESERHMNWVRSVYNYMTPYVSENPRASYINYRDLDLGTNNEKGPISYEQASIWGKKYFNKNFKKLVQVKTKVDPTNFFRNEQSIPPLSPRFL

SEQ ID NO: 407664 - protein, 567 aa, Unknown
  Description of Unknown: CD_contig32295_ORF_THCAS_like_2 polypeptide sequence
LYTFPCMKLYIRKISIHANAKHIRLKKMKYSSVSWFLCQILVYLLSFSIQTSQANPHNNFLQCFSKHISNNNTSLAKLIHTPNDFSYISLLNSTIQNLRFTSPTPKPLVIITPSNTSHVQACVLCSKKYGLQIRTRSGGHDFEGVSYVSKVPFVILDMRNLRSIIIDVDNKTAWVESGATLGELYYRIAEKNENLSFPGGYCHSVGVGGHFSGGGYGALMRKYGLAADNVIDAHLVNADGEFVDRKSMGEDLFWAIRGGGGASFGIVLAWKIRLVPVPSKVTILSVSKNLPINETVKIYNKWQNIAHKFDQDLLMVVRFLTVNSTDEHGKNMTTIQATFFSIFLGRVDKFLSLMQTNFPELGVVRKDCFETSWIEMIFFFNEFSSEDKLDVLLDPTNVVKGFFKGKLDYVRKPISEIVMVKLLEKLYEEDVGLAYIQMYPYGGKMSEIPESAIPFPHRAGVMYKILYWSQWEKEEESERHMNWVRSVYNYMTPYVSKNPRASYINYRDLDLGTNNEKGPISYEQASIWGKKYFNKNFKKLVQVKTKVDPTNFFRNEQSIPPLSPRFL

SEQ ID NO: 407665 - protein, 501 aa, Unknown
  Description of Unknown: PK09375.1_THCAS-like_2 polypeptide sequence
IQTSQANPHENFLQCFSKHINNNNNKSIVKLIHTPNDPSYISVLNSTIQNLRFASPSTPKPLVIITPSNTSHVQACVLCSKKYGLQIRTRSGGHDFEGASYVSKVPFVILDMRNLRSITVDVDNKTAWVESGATLGELYYRIAEKNENLSFPGGYCHSVGVGGHFSGGGYGALMRKYGLAADNVIDAHLVNADGEFVDRKSMGEDLFWAIRGGGGASFGIVLAWKIRLVPVPSKVTVLSVSKNLPINETVKIYNKWQNIAHKFDQDLLMVVRFLTVNSTDEHGKNMTTIQATFFSIFLGRVDNFLSLMQTNFPELGVVRKDCFETSWIEMIFFFNEFSSEDKLEVLLDPTNVVKGYFKGKLDYVRKPISEIVMVKLLEKLYEEDVGLAYIQMYPYGGKMSEIPESAIPFPHRAGVMYKILYWSQWEKEEESERHTNRVRSVYNYMTPYVSENPRASYINYRDLDLGTNNEKGPISYEQASIWGKKYFNKNFKKLVQVKTKV

SEQ ID NO: 407666 - protein, 567 aa, Unknown
  Description of Unknown: Consensus polypeptide sequence
  MOD_RES (38)..(38): Any amino acid
  MOD_RES (57)..(57): Any amino acid
  MOD_RES (89)..(89): Any amino acid
  MOD_RES (282)..(282): Any amino acid
  MOD_RES (567)..(567): Any amino acid
LTFPCMKLYIRKISIHANAKHIRLKKMKYSSVSWFLCXILVYLLSFSIQTSQANPHXNFLQCFSKHISNNNTSLAKLIHTPNDFSYISXLNSTIQNLRFTSPTPKPLVIITPSNTSHVQACVLCSKKYGLQIRTRSGGHDFEGVSYVSKVPFVILDMRNLRSITVDVDNKTAWVESGATLGELYYRIAEKNENLSFPGGYCHSVGVGGHFSGGGYGALMRKYGLAADNVIDAHLVNADGEFVDRKSMGEDLFWAIRGGGGASFGIVLAWKIRLVPVPSKVTXLSVSKNLPINETVKIYNKWQNIAHKFDQDLLMVVRFLTVNSTDEHGKNMTTIQATFFSIFLGRVDNFLSLMQTNFPELGVVRKDCFETSWIEMIFFFNEFSSEDKLEVLLDPTNVVKGYFKGKLDYVRKPISEIVMVKLLEKLYEEDVGLAYIQMYPYGGKMSEIPESAIPFPHRAGVMYKILYWSQWEKEEESERHMNWVRSVYNYMTPYVSENPRASYINYRDLDLGTNNEKGPISYEQASIWGKKYFNKNFKKLVQVKTKVDPTNFFRNEQSIPPLSPRFLX

SEQ ID NO: 407667 - protein, 554 aa, Unknown
  Description of Unknown: LA_contig20817_ORF_THCAS_like_4 polypeptide sequence
MADLYDIVHTKKAKTLPRKMKYYLAFFSLLSFCIIVTHASQPHEDFLQCLSHNISNTTILAELTYTRNDSSFMSVMNSNIQNLKFSFPSTPKPLVIVTPSNASHVQASVYCSKIHGLEIRTRSGGHDFEGLSYVSEVPFVIIDLRNLSSINVNVDEKTAWVEAGATIGEVYYRIAEKSRNLGFPAGFCPTVGVGGHFSGGGYGPLVRKYGLAADNIIDAYIVNVDGKILDRESMGEDLFWAIRGGGAASFGIVLAWKIRLVPVPSTVTTFIVNRDLGQNETMKLVNKWQYIADKLDDDLVILIRFSTVNSTQNNKVILQAQFLSLFLGGVDNLLSLMEKSFPEFGLKREDCNEMSWIESVSYFAGFPIGAEMENLLNRTQQWLFSFKGKLDYVKKTIPENVLKTMLEKLYEEDVGVGFFQLFPYGGKMNEISESEIPFSHRAGNLYKILYYAQWVQKPGDDDGSINWPRSVYNYMTPYVSKSPRSAYVNYRDLDLGKNNDKGPTSYTQASIWGRKYFGKDNFKRLVHVKTKVDPQNFFRNEQSIPPLPLPLPSQ

SEQ ID NO: 407668 - protein, 557 aa, Unknown
  Description of Unknown: PK11708.1_THCAS_like_4 polypeptide sequence
TQRPSYGGHTKKAKTLRRKMKYYLAFFSLLSFCIIVTNASQPHEDFLQCLSHNISNTTTLAELTYTRNDSSFISVMSSNIQNLRFSFPSTPKPLVIVTPSNASHVQASVYCSKIHGLEIRTRSGGHDFEGLSYVSEVPFVIIDLRNLSSINVNVDEKTAWVEAGATIGEVYYRIAEKSRNLGFPAGFCPTVGVGGHFSGGGYGPLVRKYGLAADNIIDAYIVNVDGKILDRESMGEDLFWAIRGGGAASFGIVLAWKIRLVPVPSTVTTFIVNRDLGQNETMKLVNKWQYIADKLDDDLVILIRFSTVNSTQNNKVILQAQFLSLFLGGVDNLLSLMEKSFPEFGLKREDCNEMSWIESVSYFAGFPIGAEMENLLNRTQQWLFSFKGKLDYVKKTIPENVLKTMLEKLYEEDVGVGFFQLFPYGGKMNEISESEIPFSHRAGNLYKILYYAQWVQKPGDDDDDDGSINWPRSVYKYMTPYVSKSPRSAYVNYRDLDLGKNNDKGPTSYTQASIWGRKYFGKDNFKRLVHVKTKVDPQNFFRNEQSIPPLPLPLPSP

SEQ ID NO: 407669 - protein, 558 aa, Unknown
  Description of Unknown: Consensus polypeptide sequence
  MOD_RES (2)..(8): Any amino acid
  MOD_RES (17)..(17): Any amino acid
  MOD_RES (38)..(38): Any amino acid
  MOD_RES (59)..(59): Any amino acid
  MOD_RES (464)..(465): Any amino acid
  MOD_RES (557)..(558): Any amino acid
MXXXXXXXHTKKAKTLXRKMKYYLAFFSLLSFCIIVTXASQPHEDFLQCLSHNISNTTXLAELTYTRNDSSFMSVMNSNIQNLRFSFPSTPKPLVIVTPSNASHVQASVYCSKIHGLEIRTRSGGHDFEGLSYVSEVPFVIIDLRNLSSINVNVDEKTAWVEAGATIGEVYYRIAEKSRNLGFPAGFCPTVGVGGHFSGGGYGPLVRKYGLAADNIIDAYIVNVDGKILDRESMGEDLFWAIRGGGAASFGIVLAWKIRLVPVPSTVTTFIVNRDLGQNETMKLVNKWQYIADKLDDDLVILIRFSTVNSTQNNKVILQAQFLSLFLGGVDNLLSLMEKSFPEFGLKREDCNEMSWIESVSYFAGFPIGAEMENLLNRTQQWLFSFKGKLDYVKKTIPENVLKTMLEKLYEEDVGVGFFQLFPYGGKMNEISESEIPFSHRAGNLYKILYYAQWVQKPGDDDDXXGSINWPRSVYNYMTPYVSKSPRSAYVNYRDLDLGKNNDKGPTSYTQASIWGRKYFGKDNFKRLVHVKTKVDPQNFFRNEQSIPPLPLPLPSXX

SEQ ID NO: 407670 - DNA, 1635 bp, Unknown; identical to SEQ ID NO: 407651
  Description of Unknown: THC Synthase polynucleotide sequence

SEQ ID NO: 407671 - DNA, 1650 bp, Unknown
  Description of Unknown: LA_contig_60432 polynucleotide  sequence
atgaattgctcagcattttccttttggtttgtttgcaaaataatatttttctttctctcattccatatccaaatttcaatagctaatcctcgagaaaacttccttaaatgcttctcaaaacatattcccaacaatgtagcaaatccaaaactcgtatacactcaacacgaccaattgtatatgtctatcctgaattcgacaatacaaaatcttagattcatctctgatacaaccccaaaaccactcgttattgtcactccttcaaataactcccatatccaagcaactattttatgctctaagaaagttggcttgcagattcgaactcgaagcggtggccatgatgctgagggtatgtcctacatatctcaagtcccatttgttgtagtagacttgagaaacatgcattcgatcaaaatagatgttcatagccaaactgcgtgggttgaagccggagctacccttggagaagtttattattggatcaatgagaagaatgagaatcttagttttcctggtgggtattgccctactgttggcgtaggtggacactttagtggaggaggctatggagcattgatgcgaaattatggccttgcggctgataatattattgatgcacacttagtcaatgttgatggaaaagttctagatcgaaaatccatgggagaagatctgttttgggctatacgtggtggtggaggagaaaactttggaatcattgcagcatggaaaatcaaactggttgctgtcccatcaaagtctactatattcagtgttaaaaagaacatggagatacatgggcttgtcaagttatttaacaaatggcaaaatattgcttacaagtatgacaaagatttagtactcatgactcacttcataacaaagaatattacagataatcatgggaagaataagactacagtacatggttacttctcttcaatttttcatggtggagtggatagtctagtcgacttgatgaacaagagctttcgtgagttgggtattaaaaaaactgattgcaaagaatttagctggattgatacaaccatcttctacagtggtgttgtaaattttaacactgctaattttaaaaaggaaattttgcttgatagatcagctgggaagaagacggctttctcaattaagttagactatgttaagaaaccaattccagaaactgcaatggtcaaaattttggaaaaattatatgaagaagatgtaggagctgggatgtatgtgttgtacccttacggtggtataatggaggagatttcagaatcagcaattccattccctcatcgagctggaataatgtatgaactttggtacactgcttcctgggagaagcaagaagataatgaaaagcatataaactgggttcgaagtgtttataattttacgactccttatgtgtcccaaaatccaagattggcgtatctcaattatagggaccttgatttaggaaaaactaatcatgcgagtcctaataattacacacaagcacgtatttggggtgaaaagtattttggtaaaaattttaacaggttagttaaggtgaaaactaaagttgatcccaataatttttttagaaacgaacaaagtatcccacctcttccaccgcatcatcattaattatctttaaat

SEQ ID NO: 407672 - DNA, 1605 bp, Unknown
  Description of Unknown: LA_contig_20041 polynucleotide sequence
ctcaacattctcctttaggtttgtttacaaaattatatttttctttctctcattcaatatcaaaatttcaatagctaatcctcaagaaaatttcctaaaatgcttctcccaatatattcataacaatccagcaaatctaaaactcgtatacactcaacacgaccaattgtatatgtctgtcctgaatttgacaatacaaaatcttagatttacctctgatacaaccccaaaaccactcgttattgtcactccttcaaatgtctcccatatccaagccactattctatgctccaagaaagtgggcttgcaaattcgaactcgaagcggtggccatgatgctgagggtttgtcctacacatctcaagtcccatttgttatagtagacttgagaaacatgcattcggtgaaaatagatattcgtagccaaattgcgtgggttgaagccggagctacccttggagaagtttattattggattaatgagaatcttagttttcctggtgggtattgccctactgttggcgtaggtggacactttagtggaggaggctatagagcattaatgcgaaattatggcctcgcagctgataatatcattgatgcacacttagtcaatgttgatggaaaagttctagatcgaaaatccatgggggaagatctattttgggctatacgtggtggtggaggtgaaaactttggaatcattgcagcgtggaaaattagactggttgctgtcccatcaagggctactatattcagtgttaaaaggaatatggagatacatgggcttgtcaagttatttaataaatggcaaaatattgcttacaagtatgacaaagatttattactcatgactcacttcataaccaggaatattatagataatcaaggaaagaataagactacagtacacggttacttctcttgcattttccatggtggagtagatagtctagtcaacttgatgaacaagagctttcctgagttgggtattaaaaaaactgattgcaaagaattgagctggattgatactaccatcttctacagtggtgttgtaaattataacactactaattttcaaaaggaaattttgcttgatagatcagctgggcagaaagtagctttctcagttaagttagactacgttaagaaaccaattccagaaactgcaattgtcaaaattttggagaaattgtatgaagaagatgtaggagttggggtgtatgtattgtacccttacggtggtataatggacaagatctcagaatcaacaattcctttccctcatcgagctggaatcatgtacgaagtttgatacgcagctacctgggagaagcaagaagataatgaaaagcatataaactgggtttgaagtgtttataatttcatgacgccttatgtgtcccaaaatccaagaatggcgtatctcaattatagggaccttgatttaggaaaaactgatcccaagagtcctaataattacacccaagcacgtatctggggtgaaaagtactttggtaaaaactttgacaagttagttaaggtgaaaaccaaagttgatcccaataatttttttagaaacgagcaaagcatcccacctcttcc

SEQ ID NO: 407673 - DNA, 1156 bp, Unknown
  Description of Unknown: LA_contig_23755 polynucleotide sequence
atgaattgctcaacattctccttttggtttgtttgcaaaataatatttttctttctctcattcaatatccaaatttcaatagctaatcctcaagaaaacttccttaaatgcttctcggaatatattcctaacaatccagcaaatccaaaattcatatacactcaacacgaccaattgtatatgtctgtcctgaattcgacaatacaaaatcttagattcacctctgatacaaccccaaaaccactcgttattgtcactccttcaaatgtctcccatatccaggccagtattctctgctccaagaaagttggtttgcagattcgaactcgaagcggtggccatgatgctgagggtttgtcctacatatctcaagtcccatttgctatagtagacttgagaaacatgcatacggtcaaagtagatattcatagccaaactgcgtgggttgaagccggagctacccttggagaagtttattattggatcaatgagatgaatgagaattttagttttcctggtgggtattgccctactgttggcgtaggtggacactttagtggaggaggctatggagcattgatgcgaaattatggccttgcggctgataatatcattgatgcacacttagtcaatgttgatggaaaagttctagatcgaaaatccatgggagaagatctattttgggctatacgtggtggaggaggagaaaactttggaatcattgcagcatggaaaatcaaacttgttgttgtcccatcaaaggctactatattcagtgttaaaaagaacatggagatacatgggcttgtcaagttatttaacaaatggcaaaatattgcttacaagtatgacaaagatttaatgctcacgactcacttcagaactaggaatattacagataatcatgggaagaataagactacagtacatggttacttctcttccatttttcttggtggagtggatagtctagttgacttgatgaacaagagctttcctgagttgggtattaaaaaaactgattgcaaagaattgagctggattgatacaaccatcttctacagtggtgttgtaaattacaacactgctaattttaaaaaggaaattttgcttgatagatcagctgggaagaagacggctttctcaattaagttag

SEQ ID NO: 407674 - DNA, 1635 bp, Unknown
  Description of Unknown: CBD_Synthase polynucleotide sequence
atgaagtgctcaacattctccttttggtttgtttgcaagataatatttttctttttctcattcaatatccaaacttccattgctaatcctcgagaaaacttccttaaatgcttctcgcaatatattcccaataatgcaacaaatctaaaactcgtatacactcaaaacaacccattgtatatgtctgtcctaaattcgacaatacacaatcttagattcacctctgacacaaccccaaaaccacttgttatcgtcactccttcacatgtctctcatatccaaggcactattctatgctccaagaaagttggcttgcagattcgaactcgaagtggtggtcatgattctgagggcatgtcctacatatctcaagtcccatttgttatagtagacttgagaaacatgcgttcaatcaaaatagatgttcatagccaaactgcatgggttgaagccggagctacccttggagaagtttattattgggttaatgagaaaaatgagaatcttagtttggcggctgggtattgccctactgtttgcgcaggtggacactttggtggaggaggctatggaccattgatgagaaactatggcctcgcggctgataatatcattgatgcacacttagtcaacgttcatggaaaagtgctagatcgaaaatctatgggggaagatctcttttgggctttacgtggtggtggagcagaaagcttcggaatcattgtagcatggaaaattagactggttgctgtcccaaagtctactatgtttagtgttaaaaagatcatggagatacatgagcttgtcaagttagttaacaaatggcaaaatattgcttacaagtatgacaaagatttattactcatgactcacttcataactaggaacattacagataatcaagggaagaataagacagcaatacacacttacttctcttcagttttccttggtggagtggatagtctagtcgacttgatgaacaagagttttcctgagttgggtattaaaaaaacggattgcagacaattgagctggattgatactatcatcttctatagtggtgttgtaaattacgacactgataattttaacaaggaaattttgcttgatagatccgctgggcagaacggtgctttcaagattaagttagactacgttaagaaaccaattccagaatctgtatttgtccaaattttggaaaaattatatgaagaagatataggagctgggatgtatgcgttgtacccttacggtggtataatggatgagatttcagaatcagcaattccattccctcatcgagctggaatcttgtatgagttatggtacatatgtagttgggagaagcaagaagataacgaaaagcatctaaactggattagaaatatttataacttcatgactccttatgtgtccaaaaatccaagattggcatatctcaattatagagaccttgatataggaataaatgatcccaagaatccaaataattacacacaagcacgtatttggggtgagaagtattttggtaaaaattttgacaggctagtaaaagtgaaaaccctggttgatcccaataacttttttagaaacgaacaaagcatcccacctcttccacggcatcgtcattaa

SEQ ID NO: 407675 - DNA, 1635 bp, Unknown
  Description of Unknown: LA_contig_27956 polynucleotide sequence
atgaagtactcaacattctccttttggtttgtttgcaagataatatttttctttctctcattcaatatccaaacttcaattgctaatcctcgagaaaacttccttaaatgcttctcgcaatatattcccaccaatgtaacaaatctaaaacttacacccaaaacaaccaattgtatatgcctgtccaaaattcgacaatacacaatcttagattcacctctaacacaaccccaaaactacttgttatcgtcactccttcacatgtctctcatatccaaggcactattctatgtccaagaaaattggtttgcaaattcgaactcgaagcggtggtcatgattctgaagacatgtcctacatatctcaagtcccatttgttatagtagacttgagaaacatgcattcaatcaacatagatgttcatagccaaatcgcaagggttgaagccggagctacccttggagaagtttattattgggttaatgagaaaaatgagaatcttagtttggctgctgggtattgccctactgttagcgcagctggacactttggtggaggaggatatggaccattgatgcaaaattatggcctcgcggctgataatatcgttgatgcacacttagtcaacgttgatgcaaaagtgctagatcgaaaatctatgggggaagatctcttttgggctatacgtggtggtggaggagaaagcttcggaatcattgtagcatggaaaattagactggttgctgtcccaacaaagtctactatgtttagtgttaaaaagatcatggagatacatgagcttgtcaagtgagttaacaaatggcaaaatattgcttacaagtatgacaaagatttattactcatgactcacttcataactaggaatattacaaataatcatgggaagaataagacaacaatacacacttacttctcttcagttttccttggtggagtggatagtctagtcgacttgatgaataagagttttcctgagttgggtattaaaaaaacagattgcaaacaattgagctagattgatattatcatcttttatagcggtgttgtaaattacggcactgataattttaataaggaaattttgcttgatagatcagctgggcagaacggttctttaaagattaagttagactacgttaagaaaccaattccagaatctgcgtttgtcaaaattttggaaaaattatatgaagaagatgaaggagctgggatgtatgcgttgtacccttacggtggtataatggatgagatttcagaatcagcaattccattccctcattgagctggaatcatgtatgaattatggtacatatgtagctgggagaagcacgaagataacgaaaaagcatctaaactggattcgaaatgtttatagcttcattactccttatgtgtcctaaaatccaagattggcatatctcaattatagagaccttgatactggaataaatgatcccaagagtccaaataattacacacaagaaagtatttggggtgagaagtattttggtaaaaattttgacagggtagtaaaagtgaaaaccctggttgatcccaataatttttttagaaatgaacaaagcatcccacctcttccaccgcatcgtcattaat

SEQ ID NO: 407676 - DNA, 1480 bp, Unknown
  Description of Unknown: LA_contig_46083 polynucleotide sequence
acactcataatgaccacttgtatatgtctgtcctgaattcaaaaatacaaaatcttagattcaactctgatgcaaccccaaaaccactcgttatcgtcactccttcaaatgtctcccacatccaagccccaattctatgctccaagaaagttgacttgtagattcgaacttgaagcggtagccacgatgctgagggtttgtcctacatatctcaagtcccattcattatagtagacttgagaaacatacatttgatcaaaatagatgttcgtagccaaactgcatgggttgaagctggagctacccttggagaagtttacttccagatcaatgagaagaatgagaatcttagttttcctggtgggttttgccctactgttggcgcaggtggacactttagtggaggaggctatggagcattgatacgaaattatggcctcgcggctaataatatcattgatgcacacatagtcaatgttgatggaaagtttctagatcgaaaatccatgagagaagatatgttttgggctatacgtggtggtggaggagaaactttggaataattacagcgtggaaaatcagactggttgatgtcctgtcaaagtctactatattcagtgttaaaaagaatatggagatacatgggcttgtcaagttatttgataaatggcaaaatattgcttacaagtatgacaaagatttattactcatgactcacttcataaccaaaaatactacagataatcaaggaaagaataaaacaacagtacacgattacttcccttccattttccatggtggagcggatagtttggttgacttgatgaacaagagctttcctgagttgggtattaaaaaaactgattgcaaagaattgagctgaattgataccaccatcttctatagttgaattgtaaattcaacactgctaattttaaaaaggaaattttgcttgatcgatcagctgggccgaagacagctttctcaattaagttagactacgttaagaacccaattctgaaaatcgcaatggtcaaaattttggaaaaattatatgaagaagatgtaggagttgggatgtatcttttgatcccttacggcggtacaatggatgagatttcagaatcagcaattccattccgtcatcgagctggaatcatgtatgaactttggtacgcagctacctaggaaaaggaagaagataatcaaaagcatataaattgggttcgaagtgtttataatttcacaactccttatgtgtcccaaaatcaaagaatcgcatatgtcaattatagggaccttgatttaggaaaaactaatcccaagagtcctaataattacacacaagcatgtatttggggtgaaaagtattttagtaaaaattttaacaggtttgttaaggtgaaaaccaaggttgatcccaataatttttttagaaacgaacaaagcatcccacctcttccaccgcgtcgtccttaat

SEQ ID NO: 407677 - DNA, 1415 bp, Unknown
  Description of Unknown: LA_contig_24266 polynucleotide  sequence
cttagattcaactctgatgcaaccccaaaaccactcgttatcgtcactccttcaaatgtctcccacatccaagccccaattctgtgctccaagaaagttgacttgtagattcgaacttgaagcggtagccacgatgctgagggtttgtcctacatatctcaagtcccattcgttatagtagacttgagaaacatacatttgatcaaaatagatgttcgtagccaaactgcatgggttgaagctggagctacccttggagaagtttacttccggatcaatgagaagaatgagaatcttaattttcctggtgggttttgccctactgttggcgcaggtggacactttagtggaggaggctatggagcattgatacgaaattatggcctcgcggctaataatatcattgatgcacacatagtcaatgttgatggaaagtttctagatcgaaaatccatgggagaagatatgttttgggctatacgtggtggtggaggagaaactttggaataattacactgtggaaaatcagactggttgatgtcatgtcaaagtctactatattcagtgttgaaaagaatatggagatacatgggcttgtcaagttatttgataaatggcaaaatattgcttacaagtatgacaaagatttattactcatgactcacttcataaccaaaaatactacagataatcaaggaaagaataaaacaacagtacacggttacttcccttccattttccatggtggagcggatagtttagttgacttgatgaacaagagctttcttgagttgggtattaaaaaaactgattgcaaagaattgagctgaattgataccaccatcttctacagtggaattgtaaattcaacactgctaattttaaaaaggaaattttgcttgatcgatcagctgggccgaagacagctttctcaattaagttagactacgttaagaacccaattccgaaaatcgcaatggtcaaaattttggaaaaattatatgaagaagatgtaggagttgggatgtaacttttgatcctgtacggcggtacaatggatgagatttcagaatcagcaattccattccgtcatcgagctggaatcatgtatgaactttggtacgcagctacctaggaaaagcaagaagataatcaaaagcatataaattgggttcgaagtgtttataatttcacaactccttatgtgtcctaaaatcaaagattcccatatctcaattatagggaccttgatttaggaaaaactaatcccaagagtcctaataattacacacaagcatgtatttggggtgaaaagtattttagtaaaaattttaacaggtttgttaaggtgaaaaccaaggttgatcccaataatttttttagaaacgaacaaagcatcccacctcttccaccgc

SEQ ID NO: 407678 - DNA, 836 bp, Unknown
  Description of Unknown: LA_contig_86540 polynucleotide sequence
aagtactcaacattctgtttttggtatgtttgcaagataatatttttctttctctcattcaatatccaaatttcaatagctaatcctcaagaaaacttccttaaatgcttctcacaatatattcccaccaatgtaacaaatgcaaaactcgtatacactcaacacgaccaattttatatgtctatcctaaattcgaccatacaaaatcttagatttacctctgacacaaccccaaaaccacttgttatcatcactcctttaaatgtctcccatatccaaggcactattctatgctccaagaaagttggcttgcagattcgaactcgaagcggtggtcatgatgctgagggcatgtcctacatatctcaagtcccatttgttatagtagacttgagaaacatgcattcggtcaaaatagatgttcatagccaaactgcatgggttgaagccggagctacccttggagaagtttattattggatcaatgagaacaatgagaatcttagttttcctgctgggtactgccctactgttggcgcgggtggacactttagtggaggaggctatggagcattgatgcgaaattatggcctcgcggctgataatatcattgatgcgcacttagtcaatgttgatggaaaagttttagatcgaaaatccatgggggaagatttgttttgggctatacgtggtggtggaggagaaaactttggaatcattgcagcgtggaaaattagacttgttgctgtcccatcaatgtctactatattcagtgttaaaaagaacatggagatacatgagcttgtcaagttagttaacaaatggcaaaatattgc

SEQ ID NO: 407679 - DNA, 836 bp, Unknown
  Description of Unknown: LA_contig_66523 polynucleotide sequence
atgaagtactcaacattctgtttttggtatgtttgcaagataatatttttctttctctcattcaatatccaaatttcaatagctaatcctgaaggaaacttccttaaatgcttctcacaatatattcccaccaatgtaacaaatgcaaaactcgtatacactcaacacgaccaattttatatgtctatcctaaattcgaccatacaaaatcttagatttacctttgacacaaccccaaaaccacttgttatcatcactcctttaaatgtctcccatatccaaggcactattctatgctccaagaaagttggcttgtagattcgaactcgaagcggtggtcatgatgctgagggcatgtcctacatatctcaagtcccatttgttatagtaaacttgagaaacatgcattcggtcaaaatagatgttcatagcgaaactgcatgggttgaagccggagctacccttggagaagtttattattggatcaatgagaacaatgagaatcttagttttcttgctgggtactgccctactgttggcgcgggtggacactttagtggaggaggctatggagcattgatgcgaaattatggcctcgcggctaataacatcattgatgcgcacttagtcaatgttgatggaaaagttttagatcgaaaatccatgggggaagatttgttttgggctatacgtggtggaggagaaaactttggaatcattgcagcgtggaaaattagatttgttgctgtcccatcaatgtctactatattcagtgttaaaaagaacatggagatacatgagcttgtcaagttagttaacaaatggcaaaatattgc

SEQ ID NO: 407680 - DNA, 1296 bp, Unknown
  Description of Unknown: LA_contig_27237_rev polynucleotide sequence
agcggtggccatgactttgagggtgcctcctatgtgtctaaagtcccatttgtgatattagatatgagaaatctacgttcaatcactgtagacgtagataccaaaactgcatgggttgaagctggagctaccattggtgaactttattataggattgctgagaaaaatgggaatctgagttttcctgctgggtactgtcgtactgttggggtaggtgggcatttcagtggaggaggctatggagcactgttgcgaaaatatggccttgcagctgataatatcattgatgctcacttagtcaacgcagatggagaattcgttgaccgaaaatctatgggagaagatttgttttgggccatacgtggtggtggtggagcaagctttggaatcattctcgcttggaaaatcagattggttgcagttccatcaaaagttactatgttctctgttagtaaaaacttggagatgaatgagactgtgaagatatataacaaatggcaaaatattgcttacaagtttgacaaagatttgttactctttgttagtttcatgactattaattctaccgattcacaagggaaatacaagacaactatacaagcttcattctcttctatatttcttggtagggttgagagtctcctcatattgatgcaaaagaaatttcctgagttgggaattgaaagaaaagattgcctcgaaaagagctggattgaaactgtcgtttactttgatggtttttcaagtggggatacaccagaatctttacttaatacaacatttcaacaaaatgtatttttcaaggtgaaattagactatgtgaagaagccagttccagaagttgtgatggtaaaacttttggagaagttatatgaagaagatgtaggagtggggtttcttatgatgtacccttatggtggtaaaatggatgagatttcagaatcagcaattccattccctcatcgagctggatttatgtacaaaattttgtacttgtctgcatgggagaaagaaggagaaagtgaaaagcatatgaattgggtccgaagtgcatacaatttcatgtctccttatgtgtcccaaaacccaagagctacatatctcaattatagggaccttgatttgggaacaaataacgagaagggtcctattagttactcacaagcaagtgtttggggtaaaaagtattttggtatgaactttaagaggttagttaatgtgaaaaccaaggtcgatccaagtaatttctttagaaacgaacaaagcatcccaccacttctgtcgcgacgcctctaa

SEQ ID NO: 407681 - DNA, 1606 bp, Unknown
  Description of Unknown: PK_RNA_23203.1 polynucleotide sequence
cacttctctcattctctatccaaacttctcaagctaatccacatgaaaactttcttcaatgcttctccaaacatatctccaacaacaatacatcacttgccaaactcatacacactccaaatgacttttcatatatctcccttctaaattcaaccatacagaaccttagattcacttcaacaacaccaaaaccactagttatcatcacaccttcaaatacatcccatgtccaagcctgtgttttatgctccaagaaatatggcttgcagattcgaactcgaagcggtggccatgactttgagggtgcctcctatgtgtctaaagtcccatttgtgatattagatatgagaaatctacgttcaatcactgtagacgtagataccaaaactgcatgggttgaagctggagctaccattggtgaactttattataggattgctgagaaaaatgggaatctgagttttcctgctgggtactgtcgtactgttggggtaggtgggcatttcagtggaggaggctatggagcactgttgcgaaaatatggccttgcagctgataatatcattgatgctcacttagtcaacgcagatggagaattccttgaccgaaaatctatgggagaagatttgttttgggccatacgtggtggtggtggagcaagctttggaatcattctcgcttggaaaatcagattggttgcagttccatctaaagttactatgttctctgttagtaaaaacttggagatgaatgagactgtgaagatatataacaaatggcaaaatactgcttacaagtttgacaaagatttgttactctttgttagcttcatgactattaattctaccgattcacaagggaaatacaagacaactatacaagcttcattctcttctatatttcttggtagggttgagagtctcctcatattgatgcaaaagaaatttcctgagttgggaattgaaagaaaagattgcctcgaaaagagctggattgaaactgtcgtttactttgatggtttttcaagtggggatacaccagaatctttacttaatacaacatttcaacaaaatgtatttttcaaggtgaaattagactatgtaaagaagccagttccagaagttgtgatggtaaaacttttggagaagttatatgaagaagatgtaggtgtggggtttcttatgatgtacccttatggtggtaaaatggatgagatttcagaatcagcaattccattccctcatcgagctggatttatgtacaaaattttgtacttgtctgcatgggagaaagaaggagaaagtgaaaagcatatgaattgggtccgaagtgcatataatttcatgtctccttatgtgtctcaaaatccaagagctacatatctcaattatagggaccttgatttgggaacaaataacgagaagggtcctattagttactcacaagcaagtgtttggggtaaaaagtatttcggtatgaactttaagaggttagttaatgtgaaaaccaaggtcgatccaagtaatttctttagaaacgaacaaagcatcccaccacttctgtcgcgacgcctctaaatatttgtactgatataatataataatga

SEQ ID NO: 407682 - DNA, 479 bp, Unknown
  Description of Unknown: LA_contig_54324 polynucleotide sequence
actatgttaagaaactaatacctgaaactgcaatggtcaaaattttggaaaaattatatgaagaagaggtaggagttgggatgtatgtgttgtacccttacggtggtataatggatgagatttcagaatcagcaattccattccctcatcgagctggaataatgtatgaactttggtacactgctacctgggagaagcaagaagataacgaaaagcatataaactgggttcgaagtgtttataatttcacaactccttatgtgtcccaaaatccaagattggcgtatctcaattatagggaccttgatttaggaaaaactaatcctgagagtcctaataattacacacaagcacgtatttggggtgaaaagtattttggtaaaaattttaacaggttagttaaggtgaaaaccaaagctgatcccaataatttttttagaaacgaacaaagtatcccacctcttccaccgcgtcatcat

SEQ ID NO: 407683 - DNA, 456 bp, Unknown
  Description of Unknown: LA_contig_163104 polynucleotide sequence
gaatctgcgtttgtcaaaattttggaaaaattatatgaagaagatgaaggagttgggatgtatgcgttgtacacttacggttgtataatggatgagatttcagaatcagcaattccattccctcatcgagttggaatcatgtatgaattatggtacacatgtagctgggagaagcacgaagataaagaaaagtatctaaactggattcgaaatgttgataacttcatgactccttatgtgtcccaaaatccaagattgacatatctcaattatagacaccttgatataggaataaatgatcccaagagtcaaaataattacacacaagcatgtatttggggtgagaagtattttggtaaaaattttgacaggctagtaaaagtgaaaaccctggttgatctcgataatttttttagaaatgaacaaagcatcccacctcttccaccgcatcgtcat

SEQ ID NO: 407684 - DNA, 1625 bp, Unknown
  Description of Unknown: Consensus polynucleotide  sequence
  modified_base (346)..(346): a, c, t, g, unknown or other
  modified_base (509)..(509): a, c, t, g, unknown or other
  modified_base (533)..(533): a, c, t, g, unknown or other
  modified_base (720)..(720): a, c, t, g, unknown or other
  modified_base (794)..(794): a, c, t, g, unknown or other
  modified_base (942)..(942): a, c, t, g, unknown or other
  modified_base (1053)..(1053): a, c, t, g, unknown or other
  modified_base (1125)..(1125): a, c, t, g, unknown or other
  modified_base (1151)..(1151): a, c, t, g, unknown or other
aatctcaacattctccttttggtttgtttgcaaataatatttttctttctctcattcaatatccaaatttcaatagctaatcctcaagaaaacttccttaaatgcttctccaatatattcccaacaatgaacaaatccaaaactctatacactcaacacgaccaattgtatatgtctgtcctgaattcgacaatacaaaatcttagattcacctctgatacaaccccaaaaccactcgttatcgtcactccttcaaatgtctcccatatccaagccactattctatgctccaagaaagttggcttgcagattcgaactcgaagcggtggccatgatgctgagggtntgtcctacatatctcaagtcccatttgttatagtagacttgagaaacatgcattcgatcaaaatagatgttcatagccaaactgcatgggttgaagccggagctacccttggagaagtttattattggatcaatgagaagaatgagaatcttagttttcctgntgggtattgccctactgttggcgnaggtggacactttagtggaggaggctatggagcattgatgcgaaattatggcctcgcggctgataatatcattgatgcacacttagtcaatgttgatggaaaagttctagatcgaaaatccatgggagaagatctgttttgggctatacgtggtggtggaggacaaaactttggaatcattgcagcntggaaaatcagactggttgctgtcccatcaaagtctactatattcagtgttaaaaagaacatggagatacatgngcttgtcaagttatttaacaaatggcaaaatattgcttacaagtatgacaaagatttattactcatgactcacttcataactaggaatattacagataatcaagggaagaataagacaacagtacacggttacttctcttccattttncttggtggagtggatagtctagtcgacttgatgaacaagagctttcctgagttgggtattaaaaaaactgattgcaaagaattgagctggattgatactaccatcttctanagtggtgttgtaaattcaacactgctaattttaaaaaggaaattttgcttgatagatcagctgggcagaagncagctttctcaattaagttagactangttaagaaaccaattccagaaactgcaatggtcaaaattttggaaaaattatatgaagaagatgtaggagttgggatgtatgtgttgtacccttacggtggtataatggatgagatttcagaatcagcaattccattccctcatcgagctggaatcatgtatgaactttggtacacagctacctgggagaagcaagaagataatgaaaagcatataaactgggttcgaagtgtttataatttcatgactccttatgtgtcccaaaatccaagattggcatatctcaattatagggaccttgatttaggaaaaactaatcccaagagtcctaataattacacacaagcacgtatttggggtgaaaagtattttggtaaaaattttaacaggttagttaaggtgaaaaccaaggttgatcccaataatttttttagaaacgaacaaagcatcccacctcttccaccgcatcgtcat

SEQ ID NO: 407685 - protein, 554 aa, Unknown
  Description of Unknown: Sequence logo 0.0bits polypeptide
  MOD_RES (10)..(10): Asn or Ser
  MOD_RES (11)..(11): Cys or Thr
  MOD_RES (12)..(12): Phe or Ser
  MOD_RES (13)..(13): Ala or Ser
  MOD_RES (15)..(15): Ser or Trp
  MOD_RES (17)..(17): Leu or Trp
  MOD_RES (18)..(18): Cys or Phe
  MOD_RES (19)..(19): Lys or Val
  MOD_RES (20)..(20): Cys or Ile
  MOD_RES (21)..(21): Lys or Leu
  MOD_RES (22)..(22): Ile or Val
  MOD_RES (23)..(23): Ile or Ser
  MOD_RES (24)..(24): Phe or Leu
  MOD_RES (25)..(25): Phe or Leu
  MOD_RES (26)..(26): Phe or Ser
  MOD_RES (27)..(27): Phe or Leu
  MOD_RES (29)..(29): Phe or Ile
  MOD_RES (30)..(30): Asn or Gln
  MOD_RES (31)..(31): Ile or Thr
  MOD_RES (32)..(32): Gln or Ser
  MOD_RES (33)..(33): Ile or Arg
  MOD_RES (34)..(34): Ala or Ser
  MOD_RES (35)..(35): Leu or Asn
  MOD_RES (36)..(36): Ala or Pro
  MOD_RES (37)..(37): His or Asn
  MOD_RES (38)..(38): Asp or Pro
  MOD_RES (39)..(39): Asn or Gln
  MOD_RES (40)..(40): Glu or Phe
  MOD_RES (41)..(41): Leu or Asn
  MOD_RES (42)..(42): Phe or Gln
  MOD_RES (43)..(43): Cys or Leu
  MOD_RES (44)..(44): Phe or Lys
  MOD_RES (45)..(45): Cys or Ser
  MOD_RES (46)..(46): Phe or Lys
  MOD_RES (47)..(47): His or Ser
  MOD_RES (48)..(48): Glu or Ile
  MOD_RES (49)..(49): Asn or Tyr
  MOD_RES (50)..(50): Ile or Asn
  MOD_RES (51)..(51): Asn or Pro
  MOD_RES (54)..(54): Lys or Pro
  MOD_RES (55)..(55): Ala or Ser
  MOD_RES (56)..(56): Ile or Asn
  MOD_RES (57)..(57): Pro or Val
  MOD_RES (59)..(59): Phe or Val
  MOD_RES (61)..(61): His or Tyr
  MOD_RES (63)..(63): Pro or Gln
  MOD_RES (64)..(64): His or Asn
  MOD_RES (66)..(66): Pro or Gln
  MOD_RES (67)..(67): Leu or Ser
  MOD_RES (69)..(69): Ile or Met
  MOD_RES (82)..(82): Ala or Ile
  MOD_RES (84)..(84): Asp or Pro
  MOD_RES (85)..(85): Ser or Thr
  MOD_RES (93)..(93): Ile or Val
  MOD_RES (98)..(98): Thr or Val
  MOD_RES (101)..(101): Ile or Val
  MOD_RES (104)..(104): Cys or Ser
  MOD_RES (105)..(105): Ile or Val
  MOD_RES (111)..(111): Val or Tyr
  MOD_RES (124)..(124): Ala or Phe
  MOD_RES (127)..(127): Leu or Ala
  MOD_RES (130)..(130): Ile or Val
  MOD_RES (132)..(132): Gln or Lys
  MOD_RES (136)..(136): Ala or Val
  MOD_RES (138)..(138): Val or Leu
  MOD_RES (140)..(140): Leu or Met
  MOD_RES (143)..(143): Met or Leu
  MOD_RES (144)..(144): His or Arg
  MOD_RES (145)..(145): Thr or Ser
  MOD_RES (146)..(146): Val or Ile
  MOD_RES (147)..(147): Lys or Thr
  MOD_RES (150)..(150): Ile or Val
  MOD_RES (151)..(151): His or Asp
  MOD_RES (152)..(152): Ser or Thr
  MOD_RES (153)..(153): Gln or Lys
  MOD_RES (163)..(163): Leu or Ile
  MOD_RES (166)..(166): Val or Leu
  MOD_RES (169)..(169): Gln or Arg
  MOD_RES (171)..(171): Asn or Ala
  MOD_RES (173)..(173): Met or Lys
  MOD_RES (175)..(175): Glu or Gly
  MOD_RES (177)..(177): Phe or Leu
  MOD_RES (181)..(181): Gly or Ala
  MOD_RES (185)..(185): Pro or Arg
  MOD_RES (202)..(202): Met or Leu
  MOD_RES (204)..(204): Asn or Lys
  MOD_RES (220)..(220): Val or Ala
  MOD_RES (223)..(223): Lys or Glu
  MOD_RES (224)..(224): Val or Phe
  MOD_RES (225)..(225): Val or Leu
  MOD_RES (244)..(244): Glu or Ala
  MOD_RES (245)..(245): Asn or Ser
  MOD_RES (250)..(250): Ala or Leu
  MOD_RES (255)..(255): Lys or Arg
  MOD_RES (258)..(258): Val or Ala
  MOD_RES (263)..(263): Ala or Val
  MOD_RES (265)..(265): Ile or Met
  MOD_RES (269)..(269): Lys or Ser
  MOD_RES (272)..(272): Met or Leu
  MOD_RES (274)..(274): Ile or Met
  MOD_RES (275)..(275): His or Asn
  MOD_RES (276)..(276): Gly or Glu
  MOD_RES (277)..(277): Leu or Thr
  MOD_RES (280)..(280): Leu or Ile
  MOD_RES (281)..(281): Phe or Tyr
  MOD_RES (287)..(287): Ile or Thr
  MOD_RES (291)..(291): Tyr or Phe
  MOD_RES (296)..(296): Met or Leu
  MOD_RES (298)..(298): Thr or Phe
  MOD_RES (299)..(299): Thr or Val
  MOD_RES (300)..(300): His or Ser
  MOD_RES (302)..(302): Arg or Met
  MOD_RES (304)..(304): Arg or Ile
  MOD_RES (306)..(306): Ile or Ser
  MOD_RES (309)..(309): Asn or Ser
  MOD_RES (310)..(310): His or Gln
  MOD_RES (313)..(313): Asn or Tyr
  MOD_RES (317)..(317): Val or Ile
  MOD_RES (318)..(318): His or Gln
  MOD_RES (319)..(319): Gly or Ala
  MOD_RES (320)..(320): Tyr or Ser
  MOD_RES (328)..(328): Gly or Arg
  MOD_RES (330)..(330): Asp or Glu
  MOD_RES (333)..(333): Val or Leu
  MOD_RES (334)..(334): Asp or Ile
  MOD_RES (337)..(337): Asn or Gln
  MOD_RES (339)..(339): Ser or Lys
  MOD_RES (346)..(346): Lys or Glu
  MOD_RES (347)..(347): Lys or Arg
  MOD_RES (348)..(348): Thr or Lys
  MOD_RES (351)..(351): Lys or Leu
  MOD_RES (353)..(353): Leu or Lys
  MOD_RES (357)..(357): Asp or Glu
  MOD_RES (359)..(359): Thr or Val
  MOD_RES (360)..(360): Ile or Val
  MOD_RES (361)..(361): Phe or Tyr
  MOD_RES (362)..(362): Tyr or Phe
  MOD_RES (363)..(363): Ser or Asp
  MOD_RES (365)..(365): Val or Phe
  MOD_RES (366)..(366): Val or Ser
  MOD_RES (367)..(367): Asn or Ser
  MOD_RES (368)..(368): Tyr or Gly
  MOD_RES (369)..(369): Asn or Asp
  MOD_RES (371)..(371): Ala or Pro
  MOD_RES (377)..(377): Ile or Ser
  MOD_RES (380)..(380): Asp or Asn
  MOD_RES (381)..(381): Arg or Thr
  MOD_RES (382)..(382): Ser or Thr
  MOD_RES (383)..(383): Ala or Phe
  MOD_RES (384)..(384): Gly or Gln
  MOD_RES (385)..(385): Lys or Gln
  MOD_RES (386)..(386): Lys or Asn
  MOD_RES (387)..(387): Thr or Val
  MOD_RES (388)..(388): Ala or Phe
  MOD_RES (390)..(390): Ser or Lys
  MOD_RES (391)..(391): Ile or Val
  MOD_RES (399)..(399): Leu or Pro
  MOD_RES (400)..(400): Ile or Val
  MOD_RES (403)..(403): Thr or Val
  MOD_RES (404)..(404): Ala or Val
  MOD_RES (408)..(408): Ile or Leu
  MOD_RES (416)..(416): Glu or Asp
  MOD_RES (421)..(421): Met or Phe
  MOD_RES (422)..(422): Tyr or Leu
  MOD_RES (423)..(423): Val or Met
  MOD_RES (424)..(424): Leu or Met
  MOD_RES (430)..(430): Ile or Lys
  MOD_RES (447)..(447): Ile or Phe
  MOD_RES (450)..(450): Glu or Lys
  MOD_RES (451)..(451): Leu or Ile
  MOD_RES (452)..(452): Trp or Leu
  MOD_RES (454)..(454): Thr or Leu
  MOD_RES (455)..(455): Ala or Ser
  MOD_RES (456)..(456): Thr or Ala
  MOD_RES (460)..(460): Gln or Glu
  MOD_RES (461)..(461): Glu or Gly
  MOD_RES (462)..(462): Asp or Glu
  MOD_RES (463)..(463): Asn or Ser
  MOD_RES (467)..(467): Ile or Met
  MOD_RES (473)..(473): Val or Ala
  MOD_RES (477)..(477): Thr or Met
  MOD_RES (478)..(478): Thr or Ser
  MOD_RES (487)..(487): Leu or Ala
  MOD_RES (488)..(488): Ala or Thr
  MOD_RES (500)..(500): Thr or Asn
  MOD_RES (502)..(502): Pro or Glu
  MOD_RES (503)..(503): Glu or Lys
  MOD_RES (504)..(504): Ser or Gly
  MOD_RES (506)..(506): Asn or Ile
  MOD_RES (507)..(507): Asn or Ser
  MOD_RES (509)..(509): Thr or Ser
  MOD_RES (512)..(512): Arg or Ser
  MOD_RES (513)..(513): Ile or Val
  MOD_RES (516)..(516): Glu or Lys
  MOD_RES (521)..(521): Lys or Met
  MOD_RES (524)..(524): Asn or Lys
  MOD_RES (528)..(528): Lys or Asn
  MOD_RES (533)..(533): Ala or Val
  MOD_RES (536)..(536): Asn or Ser
  MOD_RES (549)..(549): Pro or Leu
  MOD_RES (550)..(550): Pro or Ser
  MOD_RES (551)..(551): His or Arg
  MOD_RES (552)..(552): His or Arg
MLIAKKMKYXXXXFXFXXXXXXXXXXXSXXXXXXXXXXXXXXXXXXXXXXXNNXXXXKXIXTXXDXXYXSVLNSTIQNLRFXSXXTPKPLVIXTPSNXSHXQAXXLCSKKXGLQIRTRSGGHDXEGXSYXSXVPFXIXDXRNXXXXXVDXXXXTAWVEAGATXGEXYYXIXEXNXNXSFPXGYCXTVGVGGHFSGGGYGALXRXYGLAADNIIDAHLVNXDGXXXDRKSMGEDLFWAIRGGGGXXFGIIXAWKIXLVXVPSKXTXFSVXKNXEXXXXVKXXNKWQNXAYKXDKDLXLXXXFXTXNXTDXXGKXKTTXXXXFSSIFLGXVXSLXXLMXKXFPELGIXXXDCXEXSWIXTXXXXXGXXXXXTXNFKKEXLLXXXXXXXXXFXXKLDYVKKXXPEXXMVKXLEKLYEEXVGVGXXXXYPYGGXMDEISESAIPFPHRAGXMYXXXYXXXWEKXXXXEKHXNWVRSXYNFXXPYVSQNPRXXYLNYRDLDLGKXNXXXPXXVXQAXXWGXKYFGXNFXRLVXVKTKXDPXNFFRNEQSIPPLXXXXLH

SEQ ID NO: 407686 - protein, 546 aa, Unknown
  Description of Unknown: Sequence logo 0.0bits polypeptide
  MOD_RES (2)..(2): Lys or Asn
  MOD_RES (3)..(3): Cys or Tyr
  MOD_RES (6)..(6): Ala or Thr
  MOD_RES (10)..(10): Arg or Trp
  MOD_RES (13)..(13): Cys or Tyr
  MOD_RES (25)..(25): Lys or Gln
  MOD_RES (28)..(28): Ile or Leu
  MOD_RES (41)..(41): Glu or Gln
  MOD_RES (44)..(44): His or Pro
  MOD_RES (50)..(50): Leu or Pro
  MOD_RES (52)..(52): Phe or Leu
  MOD_RES (53)..(53): Ile or Val
  MOD_RES (67)..(67): Ser or Leu
  MOD_RES (97)..(97): Ser or Thr
  MOD_RES (123)..(123): Ile or Thr
  MOD_RES (129)..(129): Ala or Val
  MOD_RES (138)..(138): Thr or Ser
  MOD_RES (141)..(141): Val or Ile
  MOD_RES (144)..(144): His or Arg
  MOD_RES (147)..(147): Thr or Ile
  MOD_RES (170)..(170): Phe or Leu
  MOD_RES (192)..(192): Gly or Arg
  MOD_RES (248)..(248): Lys or Arg
  MOD_RES (251)..(251): Val or Ala
  MOD_RES (255)..(255): Lys or Arg
  MOD_RES (263)..(263): Lys or Arg
  MOD_RES (289)..(289): Met or Leu
  MOD_RES (291)..(291): Thr or Met
  MOD_RES (295)..(295): Arg or Ile
  MOD_RES (300)..(300): Thr or Ile
  MOD_RES (303)..(303): His or Gln
  MOD_RES (316)..(316): Ser or Cys
  MOD_RES (319)..(319): Leu or His
  MOD_RES (327)..(327): Asp or Asn
  MOD_RES (364)..(364): Ala or Thr
  MOD_RES (367)..(367): Lys or Gln
  MOD_RES (378)..(378): Lys or Gln
  MOD_RES (380)..(380): Thr or Val
  MOD_RES (384)..(384): Ile or Val
  MOD_RES (392)..(392): Leu or Pro
  MOD_RES (398)..(398): Met or Ile
  MOD_RES (409)..(409): Glu or Asp
  MOD_RES (414)..(414): Met or Val
  MOD_RES (426)..(426): Glu or Lys
  MOD_RES (431)..(431): Ala or Thr
  MOD_RES (444)..(444): Leu or Val
MXXYSXFSFXFVXKIIFFFLSFNIXISXANPQENFLKCFSXYIXNNPANXKXXYTQHDQLYMSVLNXTIQNLRFTSDTTPKPLVIVTPSNVSHIQAXILCSKKVGLQIRTRSGGHDAEGLSYXSQVPFXIVDLRNMHXVKXDIXSQXAWVEAGATLGEVYYWINEMNENXSFPGGYCPTVGVGGHFSGGGYXALMRNYGLAADNIIDAHLVNVDGKVLDRKSMGEDLFWAIRGGGGENFGIIAAWKIXLVXVPSXATIFSVKXNMEIHGLVKLFNKWQNIAYKYDKDLXLXTHFXTRNIXDNXGKNKTTVHGYFSXIFXGGVDSLVXLMNKSFPELGIKKTDCKELSWIDTTIFYSGVVNYNTXNFXKEILLDRSAGXKXAFSXKLDYVKKXIPETAXVKILEKLYEEXVGVGXYVLYPYGGIMDXISESXIPFPHRAGIMYEXWYTATWEKQEDNEKHINWVRSVYNFTTPYVSQNPRLAYLNYRDLDLGKTNPESPNNYTQARIWGEKYFGKNFNRLVKVKTKADPNNFFRNEQSIPPLPPHHH

SEQ ID NO: 407687 - protein, 574 aa, Unknown
  Description of Unknown: Sequence logo 0.0bits polypeptide
  MOD_RES (2)..(2): Cys or Tyr
  MOD_RES (29)..(29): Asn or Lys
  MOD_RES (30)..(30): Cys or Tyr
  MOD_RES (32)..(32): Ala or Ser
  MOD_RES (33)..(33): Phe or Val
  MOD_RES (35)..(35): Phe or Trp
  MOD_RES (36)..(36): Trp or Phe
  MOD_RES (37)..(37): Phe or Leu
  MOD_RES (38)..(38): Val or Cys
  MOD_RES (39)..(39): Cys, Lys or Gln
  MOD_RES (40)..(40): Lys or Ile
  MOD_RES (41)..(41): Ile or Leu
  MOD_RES (42)..(42): Ile or Leu
  MOD_RES (43)..(43): Phe or Val
  MOD_RES (44)..(44): Phe or Tyr
  MOD_RES (45)..(45): Phe or Leu
  MOD_RES (49)..(49): Asn or Ser
  MOD_RES (51)..(51): Ile or Thr
  MOD_RES (53)..(53): Leu or Gln
  MOD_RES (57)..(57): Gln or His
  MOD_RES (58)..(58): Glu or Asn
  MOD_RES (62)..(62): Lys or Gln
  MOD_RES (66)..(66): Glu or Lys
  MOD_RES (67)..(67): Tyr or His
  MOD_RES (69)..(69): Asn, Pro or Ser
  MOD_RES (73)..(73): Asn or Thr
  MOD_RES (74)..(74): Lys or Pro
  MOD_RES (75)..(75): Ala or Ser
  MOD_RES (76)..(76): Ile, Asn or Leu
  MOD_RES (77)..(77): Pro, Val or Ala
  MOD_RES (79)..(79): Phe or Leu
  MOD_RES (81)..(81): Val or His
  MOD_RES (83)..(83): Gln or Pro
  MOD_RES (84)..(84): His or Asn
  MOD_RES (86)..(86): Pro, Gln or Phe
  MOD_RES (87)..(87): Leu or Ser
  MOD_RES (89)..(89): Met or Ile
  MOD_RES (91)..(91): Leu or Val
  MOD_RES (102)..(102): Ala or Thr
  MOD_RES (104)..(104): Gln, Ile or Pro
  MOD_RES (105)..(105): Ser or Thr
  MOD_RES (113)..(113): Val or Ile
  MOD_RES (118)..(118): Val or Thr
  MOD_RES (121)..(121): Ile or Val
  MOD_RES (124)..(124): Ser or Cys
  MOD_RES (125)..(125): Ile or Val
  MOD_RES (131)..(131): Val or Tyr
  MOD_RES (144)..(144): Ala or Phe
  MOD_RES (147)..(147): Ala, Leu or Val
  MOD_RES (150)..(150): Ile or Val
  MOD_RES (152)..(152): Gln or Lys
  MOD_RES (156)..(156): Ala or Val
  MOD_RES (158)..(158): Val or Leu
  MOD_RES (160)..(160): Leu or Met
  MOD_RES (163)..(163): Met or Leu
  MOD_RES (164)..(164): His or Arg
  MOD_RES (165)..(165): Thr or Ser
  MOD_RES (166)..(166): Val or Ile
  MOD_RES (167)..(167): Ile, Lys or Thr
  MOD_RES (168)..(168): Ile or Val
  MOD_RES (170)..(170): Ile or Val
  MOD_RES (171)..(171): His or Asp
  MOD_RES (172)..(172): Ser or Asn
  MOD_RES (173)..(173): Gln or Lys
  MOD_RES (179)..(179): Ala or Ser
  MOD_RES (186)..(186): Val or Leu
  MOD_RES (189)..(189): Trp or Arg
  MOD_RES (191)..(191): Asn or Ala
  MOD_RES (193)..(193): Met or Lys
  MOD_RES (197)..(197): Phe or Leu
  MOD_RES (205)..(205): Pro or His
  MOD_RES (206)..(206): Thr or Ser
  MOD_RES (224)..(224): Asn or Lys
  MOD_RES (232)..(232): Ile or Val
  MOD_RES (240)..(240): Val or Ala
  MOD_RES (243)..(243): Lys or Glu
  MOD_RES (244)..(244): Val or Phe
  MOD_RES (245)..(245): Leu or Val
  MOD_RES (264)..(264): Glu or Ala
  MOD_RES (265)..(265): Asn or Ser
  MOD_RES (269)..(269): Ile or Val
  MOD_RES (270)..(270): Ala or Leu
  MOD_RES (275)..(275): Lys or Arg
  MOD_RES (278)..(278): Val or Pro
  MOD_RES (283)..(283): Ala or Val
  MOD_RES (285)..(285): Ile or Val
  MOD_RES (286)..(286): Phe or Leu
  MOD_RES (289)..(289): Lys or Ser
  MOD_RES (292)..(292): Met or Leu
  MOD_RES (293)..(293): Glu or Pro
  MOD_RES (295)..(295): His or Asn
  MOD_RES (296)..(296): Gly or Glu
  MOD_RES (297)..(297): Leu or Thr
  MOD_RES (300)..(300): Leu or Ile
  MOD_RES (301)..(301): Phe or Tyr
  MOD_RES (309)..(309): Tyr or His
  MOD_RES (311)..(311): Tyr or Phe
  MOD_RES (313)..(313): Lys or Gln
  MOD_RES (316)..(316): Met or Leu
  MOD_RES (317)..(317): Leu or Met
  MOD_RES (318)..(318): Thr or Val
  MOD_RES (319)..(319): Thr or Val
  MOD_RES (320)..(320): His or Arg
  MOD_RES (322)..(322): Arg or Leu
  MOD_RES (324)..(324): Arg or Val
  MOD_RES (326)..(326): Ile or Ser
  MOD_RES (329)..(329): Asn or Glu
  MOD_RES (334)..(334): Lys or Met
  MOD_RES (337)..(337): Val or Ile
  MOD_RES (338)..(338): His or Gln
  MOD_RES (339)..(339): Gly or Ala
  MOD_RES (340)..(340): Tyr or Thr
  MOD_RES (342)..(342): Ser or Phe
  MOD_RES (348)..(348): Gly or Arg
  MOD_RES (351)..(351): Lys, Ser or Asn
  MOD_RES (352)..(352): Leu or Phe
  MOD_RES (353)..(353): Val or Leu
  MOD_RES (354)..(354): Asp or Ser
  MOD_RES (357)..(357): Asn or Gln
  MOD_RES (358)..(358): Lys or Thr
  MOD_RES (359)..(359): Ser or Asn
  MOD_RES (365)..(365): Ile or Val
  MOD_RES (366)..(366): Lys or Val
  MOD_RES (367)..(367): Lys or Arg
  MOD_RES (368)..(368): Thr or Lys
  MOD_RES (371)..(371): Lys or Phe
  MOD_RES (373)..(373): Leu or Thr
  MOD_RES (377)..(377): Asp or Glu
  MOD_RES (378)..(378): Thr or Met
  MOD_RES (379)..(379): Thr or Ile
  MOD_RES (380)..(380): Ile or Phe
  MOD_RES (382)..(382): Tyr or Phe
  MOD_RES (388)..(388): Tyr or Glu
  MOD_RES (389)..(389): Asn or Phe
  MOD_RES (390)..(390): Thr or Ser
  MOD_RES (391)..(391): Ala or Ser
  MOD_RES (392)..(392): Asn or Glu
  MOD_RES (393)..(393): Phe or Asp
  MOD_RES (395)..(395): Lys or Leu
  MOD_RES (396)..(396): Asp or Glu
  MOD_RES (397)..(397): Ile or Val
  MOD_RES (401)..(401): Arg or Pro
  MOD_RES (402)..(402): Ser or Thr
  MOD_RES (403)..(403): Ala or Asn
  MOD_RES (404)..(404): Gly or Val
  MOD_RES (405)..(405): Lys or Val
  MOD_RES (407)..(407): Thr or Gly
  MOD_RES (408)..(408): Ala, Phe or Tyr
  MOD_RES (410)..(410): Ser or Lys
  MOD_RES (411)..(411): Ile or Gly
  MOD_RES (417)..(417): Lys or Arg
  MOD_RES (419)..(419): Leu or Pro
  MOD_RES (421)..(421): Pro or Ser
  MOD_RES (423)..(423): Thr or Ile
  MOD_RES (424)..(424): Ala or Val
  MOD_RES (428)..(428): Ile or Leu
  MOD_RES (436)..(436): Glu or Asp
  MOD_RES (439)..(439): Val or Leu
  MOD_RES (440)..(440): Gly or Ala
  MOD_RES (441)..(441): Met or Tyr
  MOD_RES (442)..(442): Tyr or Ile
  MOD_RES (443)..(443): Val or Gln
  MOD_RES (444)..(444): Leu or Met
  MOD_RES (450)..(450): Ile or Lys
  MOD_RES (452)..(452): Asp or Ser
  MOD_RES (455)..(455): Ser or Pro
  MOD_RES (467)..(467): Ile or Val
  MOD_RES (470)..(470): Glu or Lys
  MOD_RES (471)..(471): Leu or Ile
  MOD_RES (472)..(472): Trp or Leu
  MOD_RES (474)..(474): Thr or Trp
  MOD_RES (475)..(475): Ala or Ser
  MOD_RES (476)..(476): Thr or Gln
  MOD_RES (480)..(480): Gln or Glu
  MOD_RES (482)..(482): Asp or Glu
  MOD_RES (483)..(483): Asn or Ser
  MOD_RES (485)..(485): Lys or Arg
  MOD_RES (487)..(487): Ile, Thr or Met
  MOD_RES (489)..(489): Arg or Trp
  MOD_RES (496)..(496): Phe or Tyr
  MOD_RES (497)..(497): Thr or Met
  MOD_RES (503)..(503): Lys, Gln or Glu
  MOD_RES (507)..(507): Leu or Ala
  MOD_RES (508)..(508): Ala or Ser
  MOD_RES (510)..(510): Leu or Ile
  MOD_RES (519)..(519): Lys or Thr
  MOD_RES (520)..(520): Thr or Asn
  MOD_RES (522)..(522): Pro or Glu
  MOD_RES (523)..(523): Glu or Lys
  MOD_RES (524)..(524): Ser or Gly
  MOD_RES (526)..(526): Asn or Ile
  MOD_RES (527)..(527): Asn or Ser
  MOD_RES (529)..(529): Thr or Glu
  MOD_RES (532)..(532): Arg or Ser
  MOD_RES (536)..(536): Glu or Lys
  MOD_RES (540)..(540): Gly or Asn
  MOD_RES (544)..(544): Asn or Lys
  MOD_RES (545)..(545): Arg or Lys
  MOD_RES (548)..(548): Lys or Gln
  MOD_RES (553)..(553): Ala or Val
  MOD_RES (556)..(556): Asn or Thr
  MOD_RES (569)..(569): Pro or Ser
  MOD_RES (571)..(571): His or Arg
  MOD_RES (572)..(572): His or Phe
LXTFPCMKLYIRKISIHANAKHIRLKKMXXSXXSXXXXXXXXXXXLSFXQXSXANPXXNFLXCFSXXIXNNNXXXXXKXIXTXXDXXYXSXLNSTIQNLRFXSXXTPKPLVIXTPSNXSHXCAXXLCSKKXGLQIRTRSGGHDXEGXSYXSXVPFXIXDXRNXXXXXXDXXXXTAWVEXGATLGEXYYXIXEXNENXSFPGGYCXXVGVGGHFSGGGYGALMRXYGLAADNXIDAHLVNXDGXXXDRKSMGEDLFWAIRGGGGXXFGIXXAWKIXLVXVPSKXTXXSVXKNXXIXXXVKXXNKWQNIAXKXDXDLXXXXXFXTXNXTDXHGKNXTTXXXXFXSIFLGXVDXXXXLMXXXFPELGXXXXDCXEXSWIXXXXFXSGVVNXXXXXXKXXXLLDXXXXXKXXFXXKLDYVXKXIXEXXMVKXLEKLYEEXVGXXXXXXYPYGGXMXEIXESAIPFPHRAGXMYXXXYXXXWEKXEXXEXHXNXVRSVYNXXTPYVSXNPRXXYXNYRDLDLGXXNXXXPXXYXQAXIWGXKYFXKNFXXLVXVKTKXDPXNFFRNEQSIPPLXPXXLH

SEQ ID NO: 407688 - protein, 565 aa, Unknown
  Description of Unknown: Sequence logo 0.0bits polypeptide
  MOD_RES (1)..(1): Thr or Met
  MOD_RES (2)..(2): Ala, Asn or Gln
  MOD_RES (3)..(3): Cys, Asp or Arg
  MOD_RES (4)..(4): Leu, Pro or Ser
  MOD_RES (5)..(5): Ala, Ser or Tyr
  MOD_RES (6)..(6): Asp, Phe or Tyr
  MOD_RES (7)..(7): Gly or Ile
  MOD_RES (8)..(8): Gly or Val
  MOD_RES (17)..(17): Pro or Arg
  MOD_RES (19)..(19): Ser or Lys
  MOD_RES (20)..(20): Phe or Met
  MOD_RES (21)..(21): Trp or Lys
  MOD_RES (22)..(22): Phe or Tyr
  MOD_RES (23)..(23): Val or Tyr
  MOD_RES (24)..(24): Cys or Leu
  MOD_RES (25)..(25): Lys or Ala
  MOD_RES (26)..(26): Ile or Phe
  MOD_RES (27)..(27): Ile or Phe
  MOD_RES (28)..(28): Phe or Ser
  MOD_RES (29)..(29): Phe or Leu
  MOD_RES (30)..(30): Phe or Leu
  MOD_RES (31)..(31): Leu or Ser
  MOD_RES (32)..(32): Ser or Phe
  MOD_RES (33)..(33): Phe or Cys
  MOD_RES (34)..(34): Asn or Ile
  MOD_RES (36)..(36): Gln or Val
  MOD_RES (37)..(37): Ile or Thr
  MOD_RES (38)..(38): His, Asn or Ser
  MOD_RES (39)..(39): Leu or Ala
  MOD_RES (40)..(40): Ala or Ser
  MOD_RES (41)..(41): Asn or Gln
  MOD_RES (43)..(43): Gln or His
  MOD_RES (45)..(45): Asn or Asp
  MOD_RES (48)..(48): Lys or Gln
  MOD_RES (50)..(50): Phe or Leu
  MOD_RES (52)..(52): Glu or His
  MOD_RES (53)..(53): Tyr or Asn
  MOD_RES (55)..(55): Pro or Ser
  MOD_RES (57)..(57): Asn or Thr
  MOD_RES (58)..(58): Pro or Thr
  MOD_RES (59)..(59): Ala, Ile or Thr
  MOD_RES (60)..(60): Asn or Leu
  MOD_RES (61)..(61): Pro or Ala
  MOD_RES (62)..(62): Lys or Glu
  MOD_RES (63)..(63): Ser or Phe
  MOD_RES (64)..(64): Ile or Thr
  MOD_RES (67)..(67): Gln or Arg
  MOD_RES (68)..(68): His or Asn
  MOD_RES (70)..(70): Gln or Ser
  MOD_RES (71)..(71): Leu or Ser
  MOD_RES (72)..(72): Tyr or Phe
  MOD_RES (73)..(73): Ile or Met
  MOD_RES (76)..(76): Leu or Met
  MOD_RES (77)..(77): Ser or Asn
  MOD_RES (79)..(79): Thr or Asn
  MOD_RES (84)..(84): Lys or Arg
  MOD_RES (86)..(86): Thr or Ser
  MOD_RES (87)..(87): Ser or Phe
  MOD_RES (88)..(88): Asp or Pro
  MOD_RES (89)..(89): Thr or Ser
  MOD_RES (102)..(102): Val or Ala
  MOD_RES (105)..(105): Ile or Val
  MOD_RES (109)..(109): Ser or Ile
  MOD_RES (110)..(110): Leu or Tyr
  MOD_RES (114)..(114): Lys or Ile
  MOD_RES (115)..(115): Val or His
  MOD_RES (118)..(118): Gln or Glu
  MOD_RES (128)..(128): Ala or Phe
  MOD_RES (134)..(134): Ile or Val
  MOD_RES (136)..(136): Gln or Glu
  MOD_RES (140)..(140): Ala or Val
  MOD_RES (142)..(142): Val or Ile
  MOD_RES (147)..(147): Met or Leu
  MOD_RES (148)..(148): His or Ser
  MOD_RES (149)..(149): Thr or Ser
  MOD_RES (150)..(150): Val or Ile
  MOD_RES (151)..(151): Lys or Asn
  MOD_RES (153)..(153): Asp or Asn
  MOD_RES (154)..(154): Ile or Val
  MOD_RES (155)..(155): His or Asp
  MOD_RES (156)..(156): Ser or Phe
  MOD_RES (157)..(157): Gln or Lys
  MOD_RES (167)..(167): Leu or Ile
  MOD_RES (173)..(173): Trp or Arg
  MOD_RES (175)..(175): Asn or Ala
  MOD_RES (177)..(177): Met or Lys
  MOD_RES (178)..(178): Asn or Ser
  MOD_RES (179)..(179): Glu or Arg
  MOD_RES (181)..(181): Phe or Leu
  MOD_RES (182)..(182): Ser or Gly
  MOD_RES (185)..(185): Gly or Ala
  MOD_RES (187)..(187): Tyr or Phe
  MOD_RES (204)..(204): Ala or Pro
  MOD_RES (206)..(206): Met or Val
  MOD_RES (208)..(208): Asn or Lys
  MOD_RES (220)..(220): His or Tyr
  MOD_RES (221)..(221): Leu or Thr
  MOD_RES (228)..(228): Val or Ile
  MOD_RES (232)..(232): Lys or Glu
  MOD_RES (247)..(247): Gly or Ala
  MOD_RES (248)..(248): Glu or Ala
  MOD_RES (249)..(249): Asn or Ser
  MOD_RES (253)..(253): Ile or Val
  MOD_RES (254)..(254): Ala or Leu
  MOD_RES (259)..(259): Lys or Arg
  MOD_RES (262)..(262): Val or Pro
  MOD_RES (266)..(266): Lys or Thr
  MOD_RES (267)..(267): Ala or Val
  MOD_RES (269)..(269): Ile or Thr
  MOD_RES (271)..(271): Ser or Ile
  MOD_RES (273)..(273): Lys or Asn
  MOD_RES (274)..(274): Lys or Arg
  MOD_RES (275)..(275): Asn or Asp
  MOD_RES (276)..(276): Met or Leu
  MOD_RES (277)..(277): Glu or Gly
  MOD_RES (278)..(278): Ile or Gln
  MOD_RES (279)..(279): His or Asn
  MOD_RES (280)..(280): Gly or Glu
  MOD_RES (281)..(281): Leu or Thr
  MOD_RES (282)..(282): Val or Met
  MOD_RES (285)..(285): Phe or Val
  MOD_RES (290)..(290): Asn or Tyr
  MOD_RES (293)..(293): Tyr or Asp
  MOD_RES (295)..(295): Tyr or Leu
  MOD_RES (297)..(297): Lys or Asp
  MOD_RES (300)..(300): Met or Val
  MOD_RES (301)..(301): Leu or Ile
  MOD_RES (302)..(302): Thr or Leu
  MOD_RES (303)..(303): Thr or Ile
  MOD_RES (304)..(304): His or Arg
  MOD_RES (306)..(306): Arg or Ser
  MOD_RES (308)..(308): Arg or Val
  MOD_RES (310)..(310): Ile or Ser
  MOD_RES (312)..(312): Asp or Gln
  MOD_RES (319)..(319): Thr or Val
  MOD_RES (320)..(320): Thr or Ile
  MOD_RES (321)..(321): Val or Leu
  MOD_RES (322)..(322): His or Gln
  MOD_RES (323)..(323): Gly or Ala
  MOD_RES (324)..(324): Tyr or Gln
  MOD_RES (326)..(326): Ser or Leu
  MOD_RES (328)..(328): Ile or Leu
  MOD_RES (335)..(335): Ser or Asn
  MOD_RES (337)..(337): Val or Leu
  MOD_RES (338)..(338): Asp or Ser
  MOD_RES (341)..(341): Asn or Glu
  MOD_RES (347)..(347): Leu or Phe
  MOD_RES (349)..(349): Ile or Leu
  MOD_RES (351)..(351): Lys or Arg
  MOD_RES (352)..(352): Thr or Glu
  MOD_RES (355)..(355): Lys or Asn
  MOD_RES (357)..(357): Leu or Met
  MOD_RES (361)..(361): Asp or Glu
  MOD_RES (362)..(362): Thr or Ser
  MOD_RES (363)..(363): Thr or Val
  MOD_RES (364)..(364): Ile or Ser
  MOD_RES (365)..(365): Phe or Tyr
  MOD_RES (366)..(366): Tyr or Phe
  MOD_RES (367)..(367): Ser or Ala
  MOD_RES (369)..(369): Val or Phe
  MOD_RES (374)..(374): Thr or Pro
  MOD_RES (375)..(375): Ala or Ile
  MOD_RES (376)..(376): Asn or Gly
  MOD_RES (377)..(377): Phe or Ala
  MOD_RES (378)..(378): Lys or Glu
  MOD_RES (379)..(379): Lys or Met
  MOD_RES (381)..(381): Ile or Asn
  MOD_RES (384)..(384): Asp or Asn
  MOD_RES (386)..(386): Ser or Thr
  MOD_RES (387)..(387): Ala or Gln
  MOD_RES (388)..(388): Gly or Gln
  MOD_RES (389)..(389): Lys or Trp
  MOD_RES (390)..(390): Lys or Leu
  MOD_RES (391)..(391): Thr or Phe
  MOD_RES (392)..(392): Ala or Ser
  MOD_RES (394)..(394): Ser or Lys
  MOD_RES (395)..(395): Ile or Gly
  MOD_RES (403)..(403): Leu or Thr
  MOD_RES (407)..(407): Thr or Asn
  MOD_RES (408)..(408): Ala or Val
  MOD_RES (409)..(409): Met or Leu
  MOD_RES (410)..(410): Val or Lys
  MOD_RES (411)..(411): Lys or Thr
  MOD_RES (412)..(412): Ile or Met
  MOD_RES (420)..(420): Glu or Asp
  MOD_RES (425)..(425): Met or Phe
  MOD_RES (426)..(426): Tyr or Phe
  MOD_RES (427)..(427): Val or Gln
  MOD_RES (429)..(429): Tyr or Phe
  MOD_RES (434)..(434): Ile or Lys
  MOD_RES (436)..(436): Asp or Asn
  MOD_RES (442)..(442): Ala or Glu
  MOD_RES (446)..(446): Pro or Ser
  MOD_RES (451)..(451): Ile or Asn
  MOD_RES (452)..(452): Met or Leu
  MOD_RES (454)..(454): Glu or Lys
  MOD_RES (455)..(455): Leu or Ile
  MOD_RES (456)..(456): Trp or Leu
  MOD_RES (458)..(458): Thr or Tyr
  MOD_RES (460)..(460): Thr or Gln
  MOD_RES (462)..(462): Glu or Val
  MOD_RES (463)..(463): Lys or Gln
  MOD_RES (464)..(464): Gln or Lys
  MOD_RES (469)..(469): Glu or Asp
  MOD_RES (471)..(471): Ser or Asn
  MOD_RES (472)..(472): Asp or Glu
  MOD_RES (473)..(473): Lys or Gly
  MOD_RES (474)..(474): His or Ser
  MOD_RES (478)..(478): Val or Pro
  MOD_RES (483)..(483): Lys or Asn
  MOD_RES (484)..(484): Phe or Tyr
  MOD_RES (485)..(485): Thr or Met
  MOD_RES (491)..(491): Gln or Lys
  MOD_RES (492)..(492): Asn or Ser
  MOD_RES (495)..(495): Leu or Ser
  MOD_RES (498)..(498): Leu or Val
  MOD_RES (508)..(508): Thr or Asn
  MOD_RES (510)..(510): Pro or Asp
  MOD_RES (511)..(511): Glu or Lys
  MOD_RES (512)..(512): Ser or Gly
  MOD_RES (514)..(514): Asn or Thr
  MOD_RES (515)..(515): Asn or Ser
  MOD_RES (520)..(520): Arg or Ser
  MOD_RES (524)..(524): Glu or Arg
  MOD_RES (533)..(533): Asn or Lys
  MOD_RES (537)..(537): Lys or His
  MOD_RES (542)..(542): Ala or Val
  MOD_RES (545)..(545): Asn or Gln
  MOD_RES (563)..(563): His or Ser
  MOD_RES (564)..(564): His, Pro or Gln
XXXXXXXXHTKKAKTLXRXXXXXXXXXXXXXXXXIXXXXXXPXEXFLXCXSXXIXNXXXXXXXXYTXXDXXXXSVXXSXIQNLXFXXXXTPKPLVIVTPSNXSHXQASXXCSKXXGLXIRTRSGGHDXEGLSYXSXVPFXIXDLRNXXXXXVXXXXXTAWVEAGATXGEVYYXIXEXXXNXXFPXGXCPTVGVGGHFSGGGYGXLXRXYGLAADNIIDAXXVNVDGKXLDRXSMGEDLFWAIRGGGXXXFGIXXAWKIXLVXVPSXXTXFXVXXXXXXXXXXKLXNKWQXIAXKXDXDLXXXXXFXTXNXTXNHGKNKXXXXXXFXSXFLGGVDXLXXLMXKSFPEXGXKXXDCXEXSWIXXXXXXXGXVNYNXXXXXXEXLLXRXXXXXXXFXXKLDYVKKXIPEXXXXXXLEKLYEEXVGVGXXXLXPYGGXMXEISESXIPFXHRAGXXYXXXYXAXWXXXPGDDXDXXXXINWXRSVYXXXTPYVSXXPRXAYXNYRDLDLGKXNXXXPXXYTQAXIWGXKYFGKDNFXRLVXVKTKXDPXNFFRNEQSIPPLPLPLPXXH

SEQ ID NO: 407689 - DNA, 1667 bp, Unknown
  Description of Unknown: Sequence logo 5.5bits polynucleotide
atgaaktrctcarcattytsytttwggtwtgtttrcaaratwatattttymyttytctcattcmmtatcmaaayttcmmwwgctaatccwsrwgraaayttyctwmaatgcttctcssaayatatyymyamyaaysywrcawmwsywrmmswmrtmwwmmmymmwmwyraysmmttktmwwwkyyyryccwrmwwwykwmmaymmwmmakmwymkwwkywycwytkmyrcaacmccaaaacyactygttatyrtcacwccttyamatryytcycaywtccargsmwswmttytmtgctcyaagaaakwkgryttgyaattcgaactygaagyggtrgycaygaykytgargrkwystcctayryrtctmaagtcccattyrykrtaktaraywtgagaaaymtrcrtwyrrtstmwrtagayrtwsrtascmaaayygcrwgggttgaagcyggagctaccmttggmgaastttaytwywrgrtyrmtgagawmaatgrgaatytkartttksskgstgggtwytgycstactgttkgsgyrgstggrcayttywgtggaggaggmtatrgascaytrwtrmraaawtatggcctygcrgctrataayatyrttgatgcrcacwtagtcaaygywsatgsararktyytwgaycgaaaatcyatgrgrgaagatytrttttgggcywtacgtggtggwggwgswgmaarcttyggaatmattrymsyrtggaaaatyaraytkgttgywgtymyrwcwawrkytactatrttywstgttrrwarrawywtggagatrmatgrgmytgtsaagwkakwtrayaaatggcaaaataytgcttacaagtwtgacaaagatttrwtrctcwykrytmryttcakracyarraaywytaymratwmwcawggraarwayaaracwmcwrtacayrsttmmttcycttsyrtwttycwtggtrgrgysgakagtytmstyrwmttgatgmayaagarmtttcstgagttgggwattraaaraamwgattgcmwmsaawwkagctrrattgawayyrycrtytwytwyrrykgwrttkyaartkrsrryacwrmtaattttmamaargaawytttrcttratmsawcmkytsrrmmraagrywkytttmwmrrtkaarttagactaygtwaagaamcyartwcyrraawyygyrwtkgtmmaamttttggaraarttrtatgaagaagakrwaggwgykgggwtkywwrykwtgwwcmyktayggysgtayaatggayragatytcagaatcarcaattccwttccstcatygagytggawtmwtgtayrarctwtkrtacrywkstrsmtrggaraarsamgragawarysaaaaagyatmtraaytggrtymgaartrywkayaryttyayrwckccttatgtgtcyyaaaaycmaagawysscrtatstcaattatagrsaccttgatwyrggaawaamtraysmyrmgrrtcmwawtarttacwcmcaagmamgtrtytggggtraraagtayttyrgtawraaytttrasargytwgtwaaggtgaaaacymwrgyygatcymrrtaayttytttagaaaygarcaaagyatcccaccwcttcyrysgcrwcrycwytaawtatctttactgatataatataataatat
